United States Patent Application Publication US 2012/0094332 A1 - sequence listing, part 3

SEQ ID NO: 2113 - DNA, 2673 bp, Artificial Sequence
  Description of Artificial Sequence: Synthetic DNA sequence of Dictyoglomus thermophilum DNA K789P
atgaaatacctgctgccgaccgctgctgctggtctgctgctcctcgctgcccagccggcgatggccatggatatcggaattaattcggatccgaaatctctgtgggatctttttcaagaaaataccgagaaagagtccaaaaggaagattctgattattgatggctcaagcctcatatacagggtttattacgcccttccccctttaaagacaaaaaatggtgaattaactaatgctctttatggcttcataagaatacttttaaaggccgtagaagattttaatcctgatcttgtaggcgttgcctttgatagacctgaacctacttttaggcatgtgatttataaagagtataaggctaagagaccacctatgaaggatgatttgaaagcgcagataccatggataagagaatttctaaggttaaatgatatacctctattggaagagcctggctatgaagcggatgatataatagctactatagtgaataaatataaggatgatttaaaatatattctctctggagatttagatcttttgcaattagtctcggacaaaacctttctaatacatcctcaaaagggaattactgagtttactatttatgatccaaaagctgtaaaggataggtttggagtagagccctataagattcccttatacaaagtattagtaggggacgaatctgataatattccaggagtaaatggaataggtcctaaaaaggcctcaaagattcttgagaaaatttcaagtgtagatgaatttaaaagtaaaataaaagttttggatagtgatttaagggagcttattgagaaaaattggaatattattgaaagaaatttagaacttgttactttaaaaaatatagataaggatcttattcttaaacccttcgagattaaaagagatgaaaaagtaatagattttttgaagagatatgaacttaagagtattcttcaaaagttatttcctgatcttcaagaggaagaaaatatagagattaaagatgtcgaagagatcaattttaatgaggtagaaaaagaaggctactttgcctttaaatgtcttggagatagggcttttgagggtatttctctttccttcaaggagggggaaggatattttatatctccttttgatttcaataatgagataagaaagaagattgaaaatataatttcttcagagaatgttaaaaaaattggctcttatattcaaagagatttacattttttaaactgtaaaataaagggcgatgtatttgatgttagtctcgcatcttatcttttgaaccctgaaagacaaaatcactctcttgatattttgataggagagtatctaaataaaacctcttttattcctcaaaaatacgctggttatctttttccgttaaagtctattcttgaggagaggataaagaatgaagggttagaatttgtactttataacatagagattccattaatccctgtactttactccatggagaagtgggggataaaggtagataaggaatatttaaaacagctttctgatgaattctgcgagagaattaaaaaattggaagaagagatatatgaacttgcaggaaccagatttaatctcaattctccaaaacaactttctgaagttttatttgagaggttaaaacttccttctggtaagaaaggaaaaacaggatattctacgtcgtcttctgtgcttcaaaacttaataaatgctcatcctatagtgagaaaaatcctccaatatagagaactctataaattgaagagtacttatgtggatgctattcctaatctggttaatccacaaacaggtagagttcatacaaaatttaatcctacaggtacagctacaggaagaataagtagtagtgaacctaatcttcagaatattcctataaaaagtgaagaaggtagaaagataagaagagccttcgtgtcagaagatggatattttcttgtatctcttgattattctcagatagagctaaggattatggctcatctttctcaggagcctaaattaatatctgccttccaaaaaggagaggatattcatagaagaacagcatcggagatttttggagtgccagaggaagaagttgatgatcttttaaggtcaagggcaaaggccgttaattttggaattatttatggtatctcttcttttggactttctgagactgtaagtattacaccagaagaggcagagaaatttatagactcgtattttaagcactatccaagagtgaagctttttatagataagactattcatgaggcaagagaaaaactgtacgttaaaaccttatttggcagaaaaagatatattcctgagattaagagcataaatcctcaggtaaggaatgcctatgaaaggatagcaataaatgcgccaattcagggaacagctgctgatattataaaacttgccatgatagaaatttacaaggagattgaaaataaaaatctcaagtcaagaatactccttcaaattcatgatgagcttattcttgaagtgccagaggaggagatggaatttactcctttaatggcaaaggaaaaaatggaaaaggtggtagaactttcggttcctcttgtagttgaaatctcggtaggtaaaaatcttgctgaattaaaatgagctataagattggtcgac

SEQ ID NO: 2114 - DNA, 2673 bp, Artificial Sequence
  Description of Artificial Sequence: Synthetic DNA sequence of Dictyoglomus thermophilum DNA K789S
atgaaatacctgctgccgaccgctgctgctggtctgctgctcctcgctgcccagccggcgatggccatggatatcggaattaattcggatccgaaatctctgtgggatctttttcaagaaaataccgagaaagagtccaaaaggaagattctgattattgatggctcaagcctcatatacagggtttattacgcccttccccctttaaagacaaaaaatggtgaattaactaatgctctttatggcttcataagaatacttttaaaggccgtagaagattttaatcctgatcttgtaggcgttgcctttgatagacctgaacctacttttaggcatgtgatttataaagagtataaggctaagagaccacctatgaaggatgatttgaaagcgcagataccatggataagagaatttctaaggttaaatgatatacctctattggaagagcctggctatgaagcggatgatataatagctactatagtgaataaatataaggatgatttaaaatatattctctctggagatttagatcttttgcaattagtctcggacaaaacctttctaatacatcctcaaaagggaattactgagtttactatttatgatccaaaagctgtaaaggataggtttggagtagagccctataagattcccttatacaaagtattagtaggggacgaatctgataatattccaggagtaaatggaataggtcctaaaaaggcctcaaagattcttgagaaaatttcaagtgtagatgaatttaaaagtaaaataaaagttttggatagtgatttaagggagcttattgagaaaaattggaatattattgaaagaaatttagaacttgttactttaaaaaatatagataaggatcttattcttaaacccttcgagattaaaagagatgaaaaagtaatagattttttgaagagatatgaacttaagagtattcttcaaaagttatttcctgatcttcaagaggaagaaaatatagagattaaagatgtcgaagagatcaattttaatgaggtagaaaaagaaggctactttgcctttaaatgtcttggagatagggcttttgagggtatttctctttccttcaaggagggggaaggatattttatatctccttttgatttcaataatgagataagaaagaagattgaaaatataatttcttcagagaatgttaaaaaaattggctcttatattcaaagagatttacattttttaaactgtaaaataaagggcgatgtatttgatgttagtctcgcatcttatcttttgaaccctgaaagacaaaatcactctcttgatattttgataggagagtatctaaataaaacctcttttattcctcaaaaatacgctggttatctttttccgttaaagtctattcttgaggagaggataaagaatgaagggttagaatttgtactttataacatagagattccattaatccctgtactttactccatggagaagtgggggataaaggtagataaggaatatttaaaacagctttctgatgaattctgcgagagaattaaaaaattggaagaagagatatatgaacttgcaggaaccagatttaatctcaattctccaaaacaactttctgaagttttatttgagaggttaaaacttccttctggtaagaaaggaaaaacaggatattctacgtcgtcttctgtgcttcaaaacttaataaatgctcatcctatagtgagaaaaatcctccaatatagagaactctataaattgaagagtacttatgtggatgctattcctaatctggttaatccacaaacaggtagagttcatacaaaatttaatcctacaggtacagctacaggaagaataagtagtagtgaacctaatcttcagaatattcctataaaaagtgaagaaggtagaaagataagaagagccttcgtgtcagaagatggatattttcttgtatctcttgattattctcagatagagctaaggattatggctcatctttctcaggagcctaaattaatatctgccttccaaaaaggagaggatattcatagaagaacagcatcggagatttttggagtgccagaggaagaagttgatgatcttttaaggtcaagggcaaaggccgttaattttggaattatttatggtatctcttcttttggactttctgagactgtaagtattacaccagaagaggcagagaaatttatagactcgtattttaagcactatccaagagtgaagctttttatagataagactattcatgaggcaagagaaaaactgtacgttaaaaccttatttggcagaaaaagatatattcctgagattaagagcataaattctcaggtaaggaatgcctatgaaaggatagcaataaatgcgccaattcagggaacagctgctgatattataaaacttgccatgatagaaatttacaaggagattgaaaataaaaatctcaagtcaagaatactccttcaaattcatgatgagcttattcttgaagtgccagaggaggagatggaatttactcctttaatggcaaaggaaaaaatggaaaaggtggtagaactttcggttcctcttgtagttgaaatctcggtaggtaaaaatcttgctgaattaaaatgagctataagattggtcgac

SEQ ID NO: 2115 - DNA, 2673 bp, Artificial Sequence
  Description of Artificial Sequence: Synthetic DNA sequence of Dictyoglomus thermophilum DNA K789T
atgaaatacctgctgccgaccgctgctgctggtctgctgctcctcgctgcccagccggcgatggccatggatatcggaattaattcggatccgaaatctctgtgggatctttttcaagaaaataccgagaaagagtccaaaaggaagattctgattattgatggctcaagcctcatatacagggtttattacgcccttccccctttaaagacaaaaaatggtgaattaactaatgctctttatggcttcataagaatacttttaaaggccgtagaagattttaatcctgatcttgtaggcgttgcctttgatagacctgaacctacttttaggcatgtgatttataaagagtataaggctaagagaccacctatgaaggatgatttgaaagcgcagataccatggataagagaatttctaaggttaaatgatatacctctattggaagagcctggctatgaagcggatgatataatagctactatagtgaataaatataaggatgatttaaaatatattctctctggagatttagatcttttgcaattagtctcggacaaaacctttctaatacatcctcaaaagggaattactgagtttactatttatgatccaaaagctgtaaaggataggtttggagtagagccctataagattcccttatacaaagtattagtaggggacgaatctgataatattccaggagtaaatggaataggtcctaaaaaggcctcaaagattcttgagaaaatttcaagtgtagatgaatttaaaagtaaaataaaagttttggatagtgatttaagggagcttattgagaaaaattggaatattattgaaagaaatttagaacttgttactttaaaaaatatagataaggatcttattcttaaacccttcgagattaaaagagatgaaaaagtaatagattttttgaagagatatgaacttaagagtattcttcaaaagttatttcctgatcttcaagaggaagaaaatatagagattaaagatgtcgaagagatcaattttaatgaggtagaaaaagaaggctactttgcctttaaatgtcttggagatagggcttttgagggtatttctctttccttcaaggagggggaaggatattttatatctccttttgatttcaataatgagataagaaagaagattgaaaatataatttcttcagagaatgttaaaaaaattggctcttatattcaaagagatttacattttttaaactgtaaaataaagggcgatgtatttgatgttagtctcgcatcttatcttttgaaccctgaaagacaaaatcactctcttgatattttgataggagagtatctaaataaaacctcttttattcctcaaaaatacgctggttatctttttccgttaaagtctattcttgaggagaggataaagaatgaagggttagaatttgtactttataacatagagattccattaatccctgtactttactccatggagaagtgggggataaaggtagataaggaatatttaaaacagctttctgatgaattctgcgagagaattaaaaaattggaagaagagatatatgaacttgcaggaaccagatttaatctcaattctccaaaacaactttctgaagttttatttgagaggttaaaacttccttctggtaagaaaggaaaaacaggatattctacgtcgtcttctgtgcttcaaaacttaataaatgctcatcctatagtgagaaaaatcctccaatatagagaactctataaattgaagagtacttatgtggatgctattcctaatctggttaatccacaaacaggtagagttcatacaaaatttaatcctacaggtacagctacaggaagaataagtagtagtgaacctaatcttcagaatattcctataaaaagtgaagaaggtagaaagataagaagagccttcgtgtcagaagatggatattttcttgtatctcttgattattctcagatagagctaaggattatggctcatctttctcaggagcctaaattaatatctgccttccaaaaaggagaggatattcatagaagaacagcatcggagatttttggagtgccagaggaagaagttgatgatcttttaaggtcaagggcaaaggccgttaattttggaattatttatggtatctcttcttttggactttctgagactgtaagtattacaccagaagaggcagagaaatttatagactcgtattttaagcactatccaagagtgaagctttttatagataagactattcatgaggcaagagaaaaactgtacgttaaaaccttatttggcagaaaaagatatattcctgagattaagagcataaatactcaggtaaggaatgcctatgaaaggatagcaataaatgcgccaattcagggaacagctgctgatattataaaacttgccatgatagaaatttacaaggagattgaaaataaaaatctcaagtcaagaatactccttcaaattcatgatgagcttattcttgaagtgccagaggaggagatggaatttactcctttaatggcaaaggaaaaaatggaaaaggtggtagaactttcggttcctcttgtagttgaaatctcggtaggtaaaaatcttgctgaattaaaatgagctataagattggtcgac

SEQ ID NO: 2116 - DNA, 2673 bp, Artificial Sequence
  Description of Artificial Sequence: Synthetic DNA sequence of Dictyoglomus thermophilum DNA K789W
atgaaatacctgctgccgaccgctgctgctggtctgctgctcctcgctgcccagccggcgatggccatggatatcggaattaattcggatccgaaatctctgtgggatctttttcaagaaaataccgagaaagagtccaaaaggaagattctgattattgatggctcaagcctcatatacagggtttattacgcccttccccctttaaagacaaaaaatggtgaattaactaatgctctttatggcttcataagaatacttttaaaggccgtagaagattttaatcctgatcttgtaggcgttgcctttgatagacctgaacctacttttaggcatgtgatttataaagagtataaggctaagagaccacctatgaaggatgatttgaaagcgcagataccatggataagagaatttctaaggttaaatgatatacctctattggaagagcctggctatgaagcggatgatataatagctactatagtgaataaatataaggatgatttaaaatatattctctctggagatttagatcttttgcaattagtctcggacaaaacctttctaatacatcctcaaaagggaattactgagtttactatttatgatccaaaagctgtaaaggataggtttggagtagagccctataagattcccttatacaaagtattagtaggggacgaatctgataatattccaggagtaaatggaataggtcctaaaaaggcctcaaagattcttgagaaaatttcaagtgtagatgaatttaaaagtaaaataaaagttttggatagtgatttaagggagcttattgagaaaaattggaatattattgaaagaaatttagaacttgttactttaaaaaatatagataaggatcttattcttaaacccttcgagattaaaagagatgaaaaagtaatagattttttgaagagatatgaacttaagagtattcttcaaaagttatttcctgatcttcaagaggaagaaaatatagagattaaagatgtcgaagagatcaattttaatgaggtagaaaaagaaggctactttgcctttaaatgtcttggagatagggcttttgagggtatttctctttccttcaaggagggggaaggatattttatatctccttttgatttcaataatgagataagaaagaagattgaaaatataatttcttcagagaatgttaaaaaaattggctcttatattcaaagagatttacattttttaaactgtaaaataaagggcgatgtatttgatgttagtctcgcatcttatcttttgaaccctgaaagacaaaatcactctcttgatattttgataggagagtatctaaataaaacctcttttattcctcaaaaatacgctggttatctttttccgttaaagtctattcttgaggagaggataaagaatgaagggttagaatttgtactttataacatagagattccattaatccctgtactttactccatggagaagtgggggataaaggtagataaggaatatttaaaacagctttctgatgaattctgcgagagaattaaaaaattggaagaagagatatatgaacttgcaggaaccagatttaatctcaattctccaaaacaactttctgaagttttatttgagaggttaaaacttccttctggtaagaaaggaaaaacaggatattctacgtcgtcttctgtgcttcaaaacttaataaatgctcatcctatagtgagaaaaatcctccaatatagagaactctataaattgaagagtacttatgtggatgctattcctaatctggttaatccacaaacaggtagagttcatacaaaatttaatcctacaggtacagctacaggaagaataagtagtagtgaacctaatcttcagaatattcctataaaaagtgaagaaggtagaaagataagaagagccttcgtgtcagaagatggatattttcttgtatctcttgattattctcagatagagctaaggattatggctcatctttctcaggagcctaaattaatatctgccttccaaaaaggagaggatattcatagaagaacagcatcggagatttttggagtgccagaggaagaagttgatgatcttttaaggtcaagggcaaaggccgttaattttggaattatttatggtatctcttcttttggactttctgagactgtaagtattacaccagaagaggcagagaaatttatagactcgtattttaagcactatccaagagtgaagctttttatagataagactattcatgaggcaagagaaaaactgtacgttaaaaccttatttggcagaaaaagatatattcctgagattaagagcataaattggcaggtaaggaatgcctatgaaaggatagcaataaatgcgccaattcagggaacagctgctgatattataaaacttgccatgatagaaatttacaaggagattgaaaataaaaatctcaagtcaagaatactccttcaaattcatgatgagcttattcttgaagtgccagaggaggagatggaatttactcctttaatggcaaaggaaaaaatggaaaaggtggtagaactttcggttcctcttgtagttgaaatctcggtaggtaaaaatcttgctgaattaaaatgagctataagattggtcgac

SEQ ID NO: 2117 - DNA, 2673 bp, Artificial Sequence
  Description of Artificial Sequence: Synthetic DNA sequence of Dictyoglomus thermophilum DNA K789Y
atgaaatacctgctgccgaccgctgctgctggtctgctgctcctcgctgcccagccggcgatggccatggatatcggaattaattcggatccgaaatctctgtgggatctttttcaagaaaataccgagaaagagtccaaaaggaagattctgattattgatggctcaagcctcatatacagggtttattacgcccttccccctttaaagacaaaaaatggtgaattaactaatgctctttatggcttcataagaatacttttaaaggccgtagaagattttaatcctgatcttgtaggcgttgcctttgatagacctgaacctacttttaggcatgtgatttataaagagtataaggctaagagaccacctatgaaggatgatttgaaagcgcagataccatggataagagaatttctaaggttaaatgatatacctctattggaagagcctggctatgaagcggatgatataatagctactatagtgaataaatataaggatgatttaaaatatattctctctggagatttagatcttttgcaattagtctcggacaaaacctttctaatacatcctcaaaagggaattactgagtttactatttatgatccaaaagctgtaaaggataggtttggagtagagccctataagattcccttatacaaagtattagtaggggacgaatctgataatattccaggagtaaatggaataggtcctaaaaaggcctcaaagattcttgagaaaatttcaagtgtagatgaatttaaaagtaaaataaaagttttggatagtgatttaagggagcttattgagaaaaattggaatattattgaaagaaatttagaacttgttactttaaaaaatatagataaggatcttattcttaaacccttcgagattaaaagagatgaaaaagtaatagattttttgaagagatatgaacttaagagtattcttcaaaagttatttcctgatcttcaagaggaagaaaatatagagattaaagatgtcgaagagatcaattttaatgaggtagaaaaagaaggctactttgcctttaaatgtcttggagatagggcttttgagggtatttctctttccttcaaggagggggaaggatattttatatctccttttgatttcaataatgagataagaaagaagattgaaaatataatttcttcagagaatgttaaaaaaattggctcttatattcaaagagatttacattttttaaactgtaaaataaagggcgatgtatttgatgttagtctcgcatcttatcttttgaaccctgaaagacaaaatcactctcttgatattttgataggagagtatctaaataaaacctcttttattcctcaaaaatacgctggttatctttttccgttaaagtctattcttgaggagaggataaagaatgaagggttagaatttgtactttataacatagagattccattaatccctgtactttactccatggagaagtgggggataaaggtagataaggaatatttaaaacagctttctgatgaattctgcgagagaattaaaaaattggaagaagagatatatgaacttgcaggaaccagatttaatctcaattctccaaaacaactttctgaagttttatttgagaggttaaaacttccttctggtaagaaaggaaaaacaggatattctacgtcgtcttctgtgcttcaaaacttaataaatgctcatcctatagtgagaaaaatcctccaatatagagaactctataaattgaagagtacttatgtggatgctattcctaatctggttaatccacaaacaggtagagttcatacaaaatttaatcctacaggtacagctacaggaagaataagtagtagtgaacctaatcttcagaatattcctataaaaagtgaagaaggtagaaagataagaagagccttcgtgtcagaagatggatattttcttgtatctcttgattattctcagatagagctaaggattatggctcatctttctcaggagcctaaattaatatctgccttccaaaaaggagaggatattcatagaagaacagcatcggagatttttggagtgccagaggaagaagttgatgatcttttaaggtcaagggcaaaggccgttaattttggaattatttatggtatctcttcttttggactttctgagactgtaagtattacaccagaagaggcagagaaatttatagactcgtattttaagcactatccaagagtgaagctttttatagataagactattcatgaggcaagagaaaaactgtacgttaaaaccttatttggcagaaaaagatatattcctgagattaagagcataaattatcaggtaaggaatgcctatgaaaggatagcaataaatgcgccaattcagggaacagctgctgatattataaaacttgccatgatagaaatttacaaggagattgaaaataaaaatctcaagtcaagaatactccttcaaattcatgatgagcttattcttgaagtgccagaggaggagatggaatttactcctttaatggcaaaggaaaaaatggaaaaggtggtagaactttcggttcctcttgtagttgaaatctcggtaggtaaaaatcttgctgaattaaaatgagctataagattggtcgac

SEQ ID NO: 2118 - DNA, 2673 bp, Artificial Sequence
  Description of Artificial Sequence: Synthetic DNA sequence of Dictyoglomus thermophilum DNA K789V
atgaaatacctgctgccgaccgctgctgctggtctgctgctcctcgctgcccagccggcgatggccatggatatcggaattaattcggatccgaaatctctgtgggatctttttcaagaaaataccgagaaagagtccaaaaggaagattctgattattgatggctcaagcctcatatacagggtttattacgcccttccccctttaaagacaaaaaatggtgaattaactaatgctctttatggcttcataagaatacttttaaaggccgtagaagattttaatcctgatcttgtaggcgttgcctttgatagacctgaacctacttttaggcatgtgatttataaagagtataaggctaagagaccacctatgaaggatgatttgaaagcgcagataccatggataagagaatttctaaggttaaatgatatacctctattggaagagcctggctatgaagcggatgatataatagctactatagtgaataaatataaggatgatttaaaatatattctctctggagatttagatcttttgcaattagtctcggacaaaacctttctaatacatcctcaaaagggaattactgagtttactatttatgatccaaaagctgtaaaggataggtttggagtagagccctataagattcccttatacaaagtattagtaggggacgaatctgataatattccaggagtaaatggaataggtcctaaaaaggcctcaaagattcttgagaaaatttcaagtgtagatgaatttaaaagtaaaataaaagttttggatagtgatttaagggagcttattgagaaaaattggaatattattgaaagaaatttagaacttgttactttaaaaaatatagataaggatcttattcttaaacccttcgagattaaaagagatgaaaaagtaatagattttttgaagagatatgaacttaagagtattcttcaaaagttatttcctgatcttcaagaggaagaaaatatagagattaaagatgtcgaagagatcaattttaatgaggtagaaaaagaaggctactttgcctttaaatgtcttggagatagggcttttgagggtatttctctttccttcaaggagggggaaggatattttatatctccttttgatttcaataatgagataagaaagaagattgaaaatataatttcttcagagaatgttaaaaaaattggctcttatattcaaagagatttacattttttaaactgtaaaataaagggcgatgtatttgatgttagtctcgcatcttatcttttgaaccctgaaagacaaaatcactctcttgatattttgataggagagtatctaaataaaacctcttttattcctcaaaaatacgctggttatctttttccgttaaagtctattcttgaggagaggataaagaatgaagggttagaatttgtactttataacatagagattccattaatccctgtactttactccatggagaagtgggggataaaggtagataaggaatatttaaaacagctttctgatgaattctgcgagagaattaaaaaattggaagaagagatatatgaacttgcaggaaccagatttaatctcaattctccaaaacaactttctgaagttttatttgagaggttaaaacttccttctggtaagaaaggaaaaacaggatattctacgtcgtcttctgtgcttcaaaacttaataaatgctcatcctatagtgagaaaaatcctccaatatagagaactctataaattgaagagtacttatgtggatgctattcctaatctggttaatccacaaacaggtagagttcatacaaaatttaatcctacaggtacagctacaggaagaataagtagtagtgaacctaatcttcagaatattcctataaaaagtgaagaaggtagaaagataagaagagccttcgtgtcagaagatggatattttcttgtatctcttgattattctcagatagagctaaggattatggctcatctttctcaggagcctaaattaatatctgccttccaaaaaggagaggatattcatagaagaacagcatcggagatttttggagtgccagaggaagaagttgatgatcttttaaggtcaagggcaaaggccgttaattttggaattatttatggtatctcttcttttggactttctgagactgtaagtattacaccagaagaggcagagaaatttatagactcgtattttaagcactatccaagagtgaagctttttatagataagactattcatgaggcaagagaaaaactgtacgttaaaaccttatttggcagaaaaagatatattcctgagattaagagcataaatgttcaggtaaggaatgcctatgaaaggatagcaataaatgcgccaattcagggaacagctgctgatattataaaacttgccatgatagaaatttacaaggagattgaaaataaaaatctcaagtcaagaatactccttcaaattcatgatgagcttattcttgaagtgccagaggaggagatggaatttactcctttaatggcaaaggaaaaaatggaaaaggtggtagaactttcggttcctcttgtagttgaaatctcggtaggtaaaaatcttgctgaattaaaatgagctataagattggtcgac

SEQ ID NO: 2119 - DNA, 2673 bp, Artificial Sequence
  Description of Artificial Sequence: Synthetic DNA sequence of Dictyoglomus thermophilum DNA Q790A
atgaaatacctgctgccgaccgctgctgctggtctgctgctcctcgctgcccagccggcgatggccatggatatcggaattaattcggatccgaaatctctgtgggatctttttcaagaaaataccgagaaagagtccaaaaggaagattctgattattgatggctcaagcctcatatacagggtttattacgcccttccccctttaaagacaaaaaatggtgaattaactaatgctctttatggcttcataagaatacttttaaaggccgtagaagattttaatcctgatcttgtaggcgttgcctttgatagacctgaacctacttttaggcatgtgatttataaagagtataaggctaagagaccacctatgaaggatgatttgaaagcgcagataccatggataagagaatttctaaggttaaatgatatacctctattggaagagcctggctatgaagcggatgatataatagctactatagtgaataaatataaggatgatttaaaatatattctctctggagatttagatcttttgcaattagtctcggacaaaacctttctaatacatcctcaaaagggaattactgagtttactatttatgatccaaaagctgtaaaggataggtttggagtagagccctataagattcccttatacaaagtattagtaggggacgaatctgataatattccaggagtaaatggaataggtcctaaaaaggcctcaaagattcttgagaaaatttcaagtgtagatgaatttaaaagtaaaataaaagttttggatagtgatttaagggagcttattgagaaaaattggaatattattgaaagaaatttagaacttgttactttaaaaaatatagataaggatcttattcttaaacccttcgagattaaaagagatgaaaaagtaatagattttttgaagagatatgaacttaagagtattcttcaaaagttatttcctgatcttcaagaggaagaaaatatagagattaaagatgtcgaagagatcaattttaatgaggtagaaaaagaaggctactttgcctttaaatgtcttggagatagggcttttgagggtatttctctttccttcaaggagggggaaggatattttatatctccttttgatttcaataatgagataagaaagaagattgaaaatataatttcttcagagaatgttaaaaaaattggctcttatattcaaagagatttacattttttaaactgtaaaataaagggcgatgtatttgatgttagtctcgcatcttatcttttgaaccctgaaagacaaaatcactctcttgatattttgataggagagtatctaaataaaacctcttttattcctcaaaaatacgctggttatctttttccgttaaagtctattcttgaggagaggataaagaatgaagggttagaatttgtactttataacatagagattccattaatccctgtactttactccatggagaagtgggggataaaggtagataaggaatatttaaaacagctttctgatgaattctgcgagagaattaaaaaattggaagaagagatatatgaacttgcaggaaccagatttaatctcaattctccaaaacaactttctgaagttttatttgagaggttaaaacttccttctggtaagaaaggaaaaacaggatattctacgtcgtcttctgtgcttcaaaacttaataaatgctcatcctatagtgagaaaaatcctccaatatagagaactctataaattgaagagtacttatgtggatgctattcctaatctggttaatccacaaacaggtagagttcatacaaaatttaatcctacaggtacagctacaggaagaataagtagtagtgaacctaatcttcagaatattcctataaaaagtgaagaaggtagaaagataagaagagccttcgtgtcagaagatggatattttcttgtatctcttgattattctcagatagagctaaggattatggctcatctttctcaggagcctaaattaatatctgccttccaaaaaggagaggatattcatagaagaacagcatcggagatttttggagtgccagaggaagaagttgatgatcttttaaggtcaagggcaaaggccgttaattttggaattatttatggtatctcttcttttggactttctgagactgtaagtattacaccagaagaggcagagaaatttatagactcgtattttaagcactatccaagagtgaagctttttatagataagactattcatgaggcaagagaaaaactgtacgttaaaaccttatttggcagaaaaagatatattcctgagattaagagcataaataaagctgtaaggaatgcctatgaaaggatagcaataaatgcgccaattcagggaacagctgctgatattataaaacttgccatgatagaaatttacaaggagattgaaaataaaaatctcaagtcaagaatactccttcaaattcatgatgagcttattcttgaagtgccagaggaggagatggaatttactcctttaatggcaaaggaaaaaatggaaaaggtggtagaactttcggttcctcttgtagttgaaatctcggtaggtaaaaatcttgctgaattaaaatgagctataagattggtcgac

SEQ ID NO: 2120 - DNA, 2673 bp, Artificial Sequence
  Description of Artificial Sequence: Synthetic DNA sequence of Dictyoglomus thermophilum DNA Q790R
atgaaatacctgctgccgaccgctgctgctggtctgctgctcctcgctgcccagccggcgatggccatggatatcggaattaattcggatccgaaatctctgtgggatctttttcaagaaaataccgagaaagagtccaaaaggaagattctgattattgatggctcaagcctcatatacagggtttattacgcccttccccctttaaagacaaaaaatggtgaattaactaatgctctttatggcttcataagaatacttttaaaggccgtagaagattttaatcctgatcttgtaggcgttgcctttgatagacctgaacctacttttaggcatgtgatttataaagagtataaggctaagagaccacctatgaaggatgatttgaaagcgcagataccatggataagagaatttctaaggttaaatgatatacctctattggaagagcctggctatgaagcggatgatataatagctactatagtgaataaatataaggatgatttaaaatatattctctctggagatttagatcttttgcaattagtctcggacaaaacctttctaatacatcctcaaaagggaattactgagtttactatttatgatccaaaagctgtaaaggataggtttggagtagagccctataagattcccttatacaaagtattagtaggggacgaatctgataatattccaggagtaaatggaataggtcctaaaaaggcctcaaagattcttgagaaaatttcaagtgtagatgaatttaaaagtaaaataaaagttttggatagtgatttaagggagcttattgagaaaaattggaatattattgaaagaaatttagaacttgttactttaaaaaatatagataaggatcttattcttaaacccttcgagattaaaagagatgaaaaagtaatagattttttgaagagatatgaacttaagagtattcttcaaaagttatttcctgatcttcaagaggaagaaaatatagagattaaagatgtcgaagagatcaattttaatgaggtagaaaaagaaggctactttgcctttaaatgtcttggagatagggcttttgagggtatttctctttccttcaaggagggggaaggatattttatatctccttttgatttcaataatgagataagaaagaagattgaaaatataatttcttcagagaatgttaaaaaaattggctcttatattcaaagagatttacattttttaaactgtaaaataaagggcgatgtatttgatgttagtctcgcatcttatcttttgaaccctgaaagacaaaatcactctcttgatattttgataggagagtatctaaataaaacctcttttattcctcaaaaatacgctggttatctttttccgttaaagtctattcttgaggagaggataaagaatgaagggttagaatttgtactttataacatagagattccattaatccctgtactttactccatggagaagtgggggataaaggtagataaggaatatttaaaacagctttctgatgaattctgcgagagaattaaaaaattggaagaagagatatatgaacttgcaggaaccagatttaatctcaattctccaaaacaactttctgaagttttatttgagaggttaaaacttccttctggtaagaaaggaaaaacaggatattctacgtcgtcttctgtgcttcaaaacttaataaatgctcatcctatagtgagaaaaatcctccaatatagagaactctataaattgaagagtacttatgtggatgctattcctaatctggttaatccacaaacaggtagagttcatacaaaatttaatcctacaggtacagctacaggaagaataagtagtagtgaacctaatcttcagaatattcctataaaaagtgaagaaggtagaaagataagaagagccttcgtgtcagaagatggatattttcttgtatctcttgattattctcagatagagctaaggattatggctcatctttctcaggagcctaaattaatatctgccttccaaaaaggagaggatattcatagaagaacagcatcggagatttttggagtgccagaggaagaagttgatgatcttttaaggtcaagggcaaaggccgttaattttggaattatttatggtatctcttcttttggactttctgagactgtaagtattacaccagaagaggcagagaaatttatagactcgtattttaagcactatccaagagtgaagctttttatagataagactattcatgaggcaagagaaaaactgtacgttaaaaccttatttggcagaaaaagatatattcctgagattaagagcataaataaacgtgtaaggaatgcctatgaaaggatagcaataaatgcgccaattcagggaacagctgctgatattataaaacttgccatgatagaaatttacaaggagattgaaaataaaaatctcaagtcaagaatactccttcaaattcatgatgagcttattcttgaagtgccagaggaggagatggaatttactcctttaatggcaaaggaaaaaatggaaaaggtggtagaactttcggttcctcttgtagttgaaatctcggtaggtaaaaatcttgctgaattaaaatgagctataagattggtcgac

SEQ ID NO: 2121 - DNA, 2673 bp, Artificial Sequence
  Description of Artificial Sequence: Synthetic DNA sequence of Dictyoglomus thermophilum DNA Q790N
atgaaatacctgctgccgaccgctgctgctggtctgctgctcctcgctgcccagccggcgatggccatggatatcggaattaattcggatccgaaatctctgtgggatctttttcaagaaaataccgagaaagagtccaaaaggaagattctgattattgatggctcaagcctcatatacagggtttattacgcccttccccctttaaagacaaaaaatggtgaattaactaatgctctttatggcttcataagaatacttttaaaggccgtagaagattttaatcctgatcttgtaggcgttgcctttgatagacctgaacctacttttaggcatgtgatttataaagagtataaggctaagagaccacctatgaaggatgatttgaaagcgcagataccatggataagagaatttctaaggttaaatgatatacctctattggaagagcctggctatgaagcggatgatataatagctactatagtgaataaatataaggatgatttaaaatatattctctctggagatttagatcttttgcaattagtctcggacaaaacctttctaatacatcctcaaaagggaattactgagtttactatttatgatccaaaagctgtaaaggataggtttggagtagagccctataagattcccttatacaaagtattagtaggggacgaatctgataatattccaggagtaaatggaataggtcctaaaaaggcctcaaagattcttgagaaaatttcaagtgtagatgaatttaaaagtaaaataaaagttttggatagtgatttaagggagcttattgagaaaaattggaatattattgaaagaaatttagaacttgttactttaaaaaatatagataaggatcttattcttaaacccttcgagattaaaagagatgaaaaagtaatagattttttgaagagatatgaacttaagagtattcttcaaaagttatttcctgatcttcaagaggaagaaaatatagagattaaagatgtcgaagagatcaattttaatgaggtagaaaaagaaggctactttgcctttaaatgtcttggagatagggcttttgagggtatttctctttccttcaaggagggggaaggatattttatatctccttttgatttcaataatgagataagaaagaagattgaaaatataatttcttcagagaatgttaaaaaaattggctcttatattcaaagagatttacattttttaaactgtaaaataaagggcgatgtatttgatgttagtctcgcatcttatcttttgaaccctgaaagacaaaatcactctcttgatattttgataggagagtatctaaataaaacctcttttattcctcaaaaatacgctggttatctttttccgttaaagtctattcttgaggagaggataaagaatgaagggttagaatttgtactttataacatagagattccattaatccctgtactttactccatggagaagtgggggataaaggtagataaggaatatttaaaacagctttctgatgaattctgcgagagaattaaaaaattggaagaagagatatatgaacttgcaggaaccagatttaatctcaattctccaaaacaactttctgaagttttatttgagaggttaaaacttccttctggtaagaaaggaaaaacaggatattctacgtcgtcttctgtgcttcaaaacttaataaatgctcatcctatagtgagaaaaatcctccaatatagagaactctataaattgaagagtacttatgtggatgctattcctaatctggttaatccacaaacaggtagagttcatacaaaatttaatcctacaggtacagctacaggaagaataagtagtagtgaacctaatcttcagaatattcctataaaaagtgaagaaggtagaaagataagaagagccttcgtgtcagaagatggatattttcttgtatctcttgattattctcagatagagctaaggattatggctcatctttctcaggagcctaaattaatatctgccttccaaaaaggagaggatattcatagaagaacagcatcggagatttttggagtgccagaggaagaagttgatgatcttttaaggtcaagggcaaaggccgttaattttggaattatttatggtatctcttcttttggactttctgagactgtaagtattacaccagaagaggcagagaaatttatagactcgtattttaagcactatccaagagtgaagctttttatagataagactattcatgaggcaagagaaaaactgtacgttaaaaccttatttggcagaaaaagatatattcctgagattaagagcataaataaaaatgtaaggaatgcctatgaaaggatagcaataaatgcgccaattcagggaacagctgctgatattataaaacttgccatgatagaaatttacaaggagattgaaaataaaaatctcaagtcaagaatactccttcaaattcatgatgagcttattcttgaagtgccagaggaggagatggaatttactcctttaatggcaaaggaaaaaatggaaaaggtggtagaactttcggttcctcttgtagttgaaatctcggtaggtaaaaatcttgctgaattaaaatgagctataagattggtcgac

SEQ ID NO: 2122 - DNA, 2673 bp, Artificial Sequence
  Description of Artificial Sequence: Synthetic DNA sequence of Dictyoglomus thermophilum DNA Q790D
atgaaatacctgctgccgaccgctgctgctggtctgctgctcctcgctgcccagccggcgatggccatggatatcggaattaattcggatccgaaatctctgtgggatctttttcaagaaaataccgagaaagagtccaaaaggaagattctgattattgatggctcaagcctcatatacagggtttattacgcccttccccctttaaagacaaaaaatggtgaattaactaatgctctttatggcttcataagaatacttttaaaggccgtagaagattttaatcctgatcttgtaggcgttgcctttgatagacctgaacctacttttaggcatgtgatttataaagagtataaggctaagagaccacctatgaaggatgatttgaaagcgcagataccatggataagagaatttctaaggttaaatgatatacctctattggaagagcctggctatgaagcggatgatataatagctactatagtgaataaatataaggatgatttaaaatatattctctctggagatttagatcttttgcaattagtctcggacaaaacctttctaatacatcctcaaaagggaattactgagtttactatttatgatccaaaagctgtaaaggataggtttggagtagagccctataagattcccttatacaaagtattagtaggggacgaatctgataatattccaggagtaaatggaataggtcctaaaaaggcctcaaagattcttgagaaaatttcaagtgtagatgaatttaaaagtaaaataaaagttttggatagtgatttaagggagcttattgagaaaaattggaatattattgaaagaaatttagaacttgttactttaaaaaatatagataaggatcttattcttaaacccttcgagattaaaagagatgaaaaagtaatagattttttgaagagatatgaacttaagagtattcttcaaaagttatttcctgatcttcaagaggaagaaaatatagagattaaagatgtcgaagagatcaattttaatgaggtagaaaaagaaggctactttgcctttaaatgtcttggagatagggcttttgagggtatttctctttccttcaaggagggggaaggatattttatatctccttttgatttcaataatgagataagaaagaagattgaaaatataatttcttcagagaatgttaaaaaaattggctcttatattcaaagagatttacattttttaaactgtaaaataaagggcgatgtatttgatgttagtctcgcatcttatcttttgaaccctgaaagacaaaatcactctcttgatattttgataggagagtatctaaataaaacctcttttattcctcaaaaatacgctggttatctttttccgttaaagtctattcttgaggagaggataaagaatgaagggttagaatttgtactttataacatagagattccattaatccctgtactttactccatggagaagtgggggataaaggtagataaggaatatttaaaacagctttctgatgaattctgcgagagaattaaaaaattggaagaagagatatatgaacttgcaggaaccagatttaatctcaattctccaaaacaactttctgaagttttatttgagaggttaaaacttccttctggtaagaaaggaaaaacaggatattctacgtcgtcttctgtgcttcaaaacttaataaatgctcatcctatagtgagaaaaatcctccaatatagagaactctataaattgaagagtacttatgtggatgctattcctaatctggttaatccacaaacaggtagagttcatacaaaatttaatcctacaggtacagctacaggaagaataagtagtagtgaacctaatcttcagaatattcctataaaaagtgaagaaggtagaaagataagaagagccttcgtgtcagaagatggatattttcttgtatctcttgattattctcagatagagctaaggattatggctcatctttctcaggagcctaaattaatatctgccttccaaaaaggagaggatattcatagaagaacagcatcggagatttttggagtgccagaggaagaagttgatgatcttttaaggtcaagggcaaaggccgttaattttggaattatttatggtatctcttcttttggactttctgagactgtaagtattacaccagaagaggcagagaaatttatagactcgtattttaagcactatccaagagtgaagctttttatagataagactattcatgaggcaagagaaaaactgtacgttaaaaccttatttggcagaaaaagatatattcctgagattaagagcataaataaagatgtaaggaatgcctatgaaaggatagcaataaatgcgccaattcagggaacagctgctgatattataaaacttgccatgatagaaatttacaaggagattgaaaataaaaatctcaagtcaagaatactccttcaaattcatgatgagcttattcttgaagtgccagaggaggagatggaatttactcctttaatggcaaaggaaaaaatggaaaaggtggtagaactttcggttcctcttgtagttgaaatctcggtaggtaaaaatcttgctgaattaaaatgagctataagattggtcgac

SEQ ID NO: 2123 - DNA, 2673 bp, Artificial Sequence
  Description of Artificial Sequence: Synthetic DNA sequence of Dictyoglomus thermophilum DNA Q790C
atgaaatacctgctgccgaccgctgctgctggtctgctgctcctcgctgcccagccggcgatggccatggatatcggaattaattcggatccgaaatctctgtgggatctttttcaagaaaataccgagaaagagtccaaaaggaagattctgattattgatggctcaagcctcatatacagggtttattacgcccttccccctttaaagacaaaaaatggtgaattaactaatgctctttatggcttcataagaatacttttaaaggccgtagaagattttaatcctgatcttgtaggcgttgcctttgatagacctgaacctacttttaggcatgtgatttataaagagtataaggctaagagaccacctatgaaggatgatttgaaagcgcagataccatggataagagaatttctaaggttaaatgatatacctctattggaagagcctggctatgaagcggatgatataatagctactatagtgaataaatataaggatgatttaaaatatattctctctggagatttagatcttttgcaattagtctcggacaaaacctttctaatacatcctcaaaagggaattactgagtttactatttatgatccaaaagctgtaaaggataggtttggagtagagccctataagattcccttatacaaagtattagtaggggacgaatctgataatattccaggagtaaatggaataggtcctaaaaaggcctcaaagattcttgagaaaatttcaagtgtagatgaatttaaaagtaaaataaaagttttggatagtgatttaagggagcttattgagaaaaattggaatattattgaaagaaatttagaacttgttactttaaaaaatatagataaggatcttattcttaaacccttcgagattaaaagagatgaaaaagtaatagattttttgaagagatatgaacttaagagtattcttcaaaagttatttcctgatcttcaagaggaagaaaatatagagattaaagatgtcgaagagatcaattttaatgaggtagaaaaagaaggctactttgcctttaaatgtcttggagatagggcttttgagggtatttctctttccttcaaggagggggaaggatattttatatctccttttgatttcaataatgagataagaaagaagattgaaaatataatttcttcagagaatgttaaaaaaattggctcttatattcaaagagatttacattttttaaactgtaaaataaagggcgatgtatttgatgttagtctcgcatcttatcttttgaaccctgaaagacaaaatcactctcttgatattttgataggagagtatctaaataaaacctcttttattcctcaaaaatacgctggttatctttttccgttaaagtctattcttgaggagaggataaagaatgaagggttagaatttgtactttataacatagagattccattaatccctgtactttactccatggagaagtgggggataaaggtagataaggaatatttaaaacagctttctgatgaattctgcgagagaattaaaaaattggaagaagagatatatgaacttgcaggaaccagatttaatctcaattctccaaaacaactttctgaagttttatttgagaggttaaaacttccttctggtaagaaaggaaaaacaggatattctacgtcgtcttctgtgcttcaaaacttaataaatgctcatcctatagtgagaaaaatcctccaatatagagaactctataaattgaagagtacttatgtggatgctattcctaatctggttaatccacaaacaggtagagttcatacaaaatttaatcctacaggtacagctacaggaagaataagtagtagtgaacctaatcttcagaatattcctataaaaagtgaagaaggtagaaagataagaagagccttcgtgtcagaagatggatattttcttgtatctcttgattattctcagatagagctaaggattatggctcatctttctcaggagcctaaattaatatctgccttccaaaaaggagaggatattcatagaagaacagcatcggagatttttggagtgccagaggaagaagttgatgatcttttaaggtcaagggcaaaggccgttaattttggaattatttatggtatctcttcttttggactttctgagactgtaagtattacaccagaagaggcagagaaatttatagactcgtattttaagcactatccaagagtgaagctttttatagataagactattcatgaggcaagagaaaaactgtacgttaaaaccttatttggcagaaaaagatatattcctgagattaagagcataaataaatgtgtaaggaatgcctatgaaaggatagcaataaatgcgccaattcagggaacagctgctgatattataaaacttgccatgatagaaatttacaaggagattgaaaataaaaatctcaagtcaagaatactccttcaaattcatgatgagcttattcttgaagtgccagaggaggagatggaatttactcctttaatggcaaaggaaaaaatggaaaaggtggtagaactttcggttcctcttgtagttgaaatctcggtaggtaaaaatcttgctgaattaaaatgagctataagattggtcgac

SEQ ID NO: 2124 - DNA, 2673 bp, Artificial Sequence
  Description of Artificial Sequence: Synthetic DNA sequence of Dictyoglomus thermophilum DNA Q790E
atgaaatacctgctgccgaccgctgctgctggtctgctgctcctcgctgcccagccggcgatggccatggatatcggaattaattcggatccgaaatctctgtgggatctttttcaagaaaataccgagaaagagtccaaaaggaagattctgattattgatggctcaagcctcatatacagggtttattacgcccttccccctttaaagacaaaaaatggtgaattaactaatgctctttatggcttcataagaatacttttaaaggccgtagaagattttaatcctgatcttgtaggcgttgcctttgatagacctgaacctacttttaggcatgtgatttataaagagtataaggctaagagaccacctatgaaggatgatttgaaagcgcagataccatggataagagaatttctaaggttaaatgatatacctctattggaagagcctggctatgaagcggatgatataatagctactatagtgaataaatataaggatgatttaaaatatattctctctggagatttagatcttttgcaattagtctcggacaaaacctttctaatacatcctcaaaagggaattactgagtttactatttatgatccaaaagctgtaaaggataggtttggagtagagccctataagattcccttatacaaagtattagtaggggacgaatctgataatattccaggagtaaatggaataggtcctaaaaaggcctcaaagattcttgagaaaatttcaagtgtagatgaatttaaaagtaaaataaaagttttggatagtgatttaagggagcttattgagaaaaattggaatattattgaaagaaatttagaacttgttactttaaaaaatatagataaggatcttattcttaaacccttcgagattaaaagagatgaaaaagtaatagattttttgaagagatatgaacttaagagtattcttcaaaagttatttcctgatcttcaagaggaagaaaatatagagattaaagatgtcgaagagatcaattttaatgaggtagaaaaagaaggctactttgcctttaaatgtcttggagatagggcttttgagggtatttctctttccttcaaggagggggaaggatattttatatctccttttgatttcaataatgagataagaaagaagattgaaaatataatttcttcagagaatgttaaaaaaattggctcttatattcaaagagatttacattttttaaactgtaaaataaagggcgatgtatttgatgttagtctcgcatcttatcttttgaaccctgaaagacaaaatcactctcttgatattttgataggagagtatctaaataaaacctcttttattcctcaaaaatacgctggttatctttttccgttaaagtctattcttgaggagaggataaagaatgaagggttagaatttgtactttataacatagagattccattaatccctgtactttactccatggagaagtgggggataaaggtagataaggaatatttaaaacagctttctgatgaattctgcgagagaattaaaaaattggaagaagagatatatgaacttgcaggaaccagatttaatctcaattctccaaaacaactttctgaagttttatttgagaggttaaaacttccttctggtaagaaaggaaaaacaggatattctacgtcgtcttctgtgcttcaaaacttaataaatgctcatcctatagtgagaaaaatcctccaatatagagaactctataaattgaagagtacttatgtggatgctattcctaatctggttaatccacaaacaggtagagttcatacaaaatttaatcctacaggtacagctacaggaagaataagtagtagtgaacctaatcttcagaatattcctataaaaagtgaagaaggtagaaagataagaagagccttcgtgtcagaagatggatattttcttgtatctcttgattattctcagatagagctaaggattatggctcatctttctcaggagcctaaattaatatctgccttccaaaaaggagaggatattcatagaagaacagcatcggagatttttggagtgccagaggaagaagttgatgatcttttaaggtcaagggcaaaggccgttaattttggaattatttatggtatctcttcttttggactttctgagactgtaagtattacaccagaagaggcagagaaatttatagactcgtattttaagcactatccaagagtgaagctttttatagataagactattcatgaggcaagagaaaaactgtacgttaaaaccttatttggcagaaaaagatatattcctgagattaagagcataaataaagaagtaaggaatgcctatgaaaggatagcaataaatgcgccaattcagggaacagctgctgatattataaaacttgccatgatagaaatttacaaggagattgaaaataaaaatctcaagtcaagaatactccttcaaattcatgatgagcttattcttgaagtgccagaggaggagatggaatttactcctttaatggcaaaggaaaaaatggaaaaggtggtagaactttcggttcctcttgtagttgaaatctcggtaggtaaaaatcttgctgaattaaaatgagctataagattggtcgac

SEQ ID NO: 2125 - DNA, 2673 bp, Artificial Sequence
  Description of Artificial Sequence: Synthetic DNA sequence of Dictyoglomus thermophilum DNA Q790G
atgaaatacctgctgccgaccgctgctgctggtctgctgctcctcgctgcccagccggcgatggccatggatatcggaattaattcggatccgaaatctctgtgggatctttttcaagaaaataccgagaaagagtccaaaaggaagattctgattattgatggctcaagcctcatatacagggtttattacgcccttccccctttaaagacaaaaaatggtgaattaactaatgctctttatggcttcataagaatacttttaaaggccgtagaagattttaatcctgatcttgtaggcgttgcctttgatagacctgaacctacttttaggcatgtgatttataaagagtataaggctaagagaccacctatgaaggatgatttgaaagcgcagataccatggataagagaatttctaaggttaaatgatatacctctattggaagagcctggctatgaagcggatgatataatagctactatagtgaataaatataaggatgatttaaaatatattctctctggagatttagatcttttgcaattagtctcggacaaaacctttctaatacatcctcaaaagggaattactgagtttactatttatgatccaaaagctgtaaaggataggtttggagtagagccctataagattcccttatacaaagtattagtaggggacgaatctgataatattccaggagtaaatggaataggtcctaaaaaggcctcaaagattcttgagaaaatttcaagtgtagatgaatttaaaagtaaaataaaagttttggatagtgatttaagggagcttattgagaaaaattggaatattattgaaagaaatttagaacttgttactttaaaaaatatagataaggatcttattcttaaacccttcgagattaaaagagatgaaaaagtaatagattttttgaagagatatgaacttaagagtattcttcaaaagttatttcctgatcttcaagaggaagaaaatatagagattaaagatgtcgaagagatcaattttaatgaggtagaaaaagaaggctactttgcctttaaatgtcttggagatagggcttttgagggtatttctctttccttcaaggagggggaaggatattttatatctccttttgatttcaataatgagataagaaagaagattgaaaatataatttcttcagagaatgttaaaaaaattggctcttatattcaaagagatttacattttttaaactgtaaaataaagggcgatgtatttgatgttagtctcgcatcttatcttttgaaccctgaaagacaaaatcactctcttgatattttgataggagagtatctaaataaaacctcttttattcctcaaaaatacgctggttatctttttccgttaaagtctattcttgaggagaggataaagaatgaagggttagaatttgtactttataacatagagattccattaatccctgtactttactccatggagaagtgggggataaaggtagataaggaatatttaaaacagctttctgatgaattctgcgagagaattaaaaaattggaagaagagatatatgaacttgcaggaaccagatttaatctcaattctccaaaacaactttctgaagttttatttgagaggttaaaacttccttctggtaagaaaggaaaaacaggatattctacgtcgtcttctgtgcttcaaaacttaataaatgctcatcctatagtgagaaaaatcctccaatatagagaactctataaattgaagagtacttatgtggatgctattcctaatctggttaatccacaaacaggtagagttcatacaaaatttaatcctacaggtacagctacaggaagaataagtagtagtgaacctaatcttcagaatattcctataaaaagtgaagaaggtagaaagataagaagagccttcgtgtcagaagatggatattttcttgtatctcttgattattctcagatagagctaaggattatggctcatctttctcaggagcctaaattaatatctgccttccaaaaaggagaggatattcatagaagaacagcatcggagatttttggagtgccagaggaagaagttgatgatcttttaaggtcaagggcaaaggccgttaattttggaattatttatggtatctcttcttttggactttctgagactgtaagtattacaccagaagaggcagagaaatttatagactcgtattttaagcactatccaagagtgaagctttttatagataagactattcatgaggcaagagaaaaactgtacgttaaaaccttatttggcagaaaaagatatattcctgagattaagagcataaataaaggtgtaaggaatgcctatgaaaggatagcaataaatgcgccaattcagggaacagctgctgatattataaaacttgccatgatagaaatttacaaggagattgaaaataaaaatctcaagtcaagaatactccttcaaattcatgatgagcttattcttgaagtgccagaggaggagatggaatttactcctttaatggcaaaggaaaaaatggaaaaggtggtagaactttcggttcctcttgtagttgaaatctcggtaggtaaaaatcttgctgaattaaaatgagctataagattggtcgac

SEQ ID NO: 2126 - DNA, 2673 bp, Artificial Sequence
  Description of Artificial Sequence: Synthetic DNA sequence of Dictyoglomus thermophilum DNA Q790H
atgaaatacctgctgccgaccgctgctgctggtctgctgctcctcgctgcccagccggcgatggccatggatatcggaattaattcggatccgaaatctctgtgggatctttttcaagaaaataccgagaaagagtccaaaaggaagattctgattattgatggctcaagcctcatatacagggtttattacgcccttccccctttaaagacaaaaaatggtgaattaactaatgctctttatggcttcataagaatacttttaaaggccgtagaagattttaatcctgatcttgtaggcgttgcctttgatagacctgaacctacttttaggcatgtgatttataaagagtataaggctaagagaccacctatgaaggatgatttgaaagcgcagataccatggataagagaatttctaaggttaaatgatatacctctattggaagagcctggctatgaagcggatgatataatagctactatagtgaataaatataaggatgatttaaaatatattctctctggagatttagatcttttgcaattagtctcggacaaaacctttctaatacatcctcaaaagggaattactgagtttactatttatgatccaaaagctgtaaaggataggtttggagtagagccctataagattcccttatacaaagtattagtaggggacgaatctgataatattccaggagtaaatggaataggtcctaaaaaggcctcaaagattcttgagaaaatttcaagtgtagatgaatttaaaagtaaaataaaagttttggatagtgatttaagggagcttattgagaaaaattggaatattattgaaagaaatttagaacttgttactttaaaaaatatagataaggatcttattcttaaacccttcgagattaaaagagatgaaaaagtaatagattttttgaagagatatgaacttaagagtattcttcaaaagttatttcctgatcttcaagaggaagaaaatatagagattaaagatgtcgaagagatcaattttaatgaggtagaaaaagaaggctactttgcctttaaatgtcttggagatagggcttttgagggtatttctctttccttcaaggagggggaaggatattttatatctccttttgatttcaataatgagataagaaagaagattgaaaatataatttcttcagagaatgttaaaaaaattggctcttatattcaaagagatttacattttttaaactgtaaaataaagggcgatgtatttgatgttagtctcgcatcttatcttttgaaccctgaaagacaaaatcactctcttgatattttgataggagagtatctaaataaaacctcttttattcctcaaaaatacgctggttatctttttccgttaaagtctattcttgaggagaggataaagaatgaagggttagaatttgtactttataacatagagattccattaatccctgtactttactccatggagaagtgggggataaaggtagataaggaatatttaaaacagctttctgatgaattctgcgagagaattaaaaaattggaagaagagatatatgaacttgcaggaaccagatttaatctcaattctccaaaacaactttctgaagttttatttgagaggttaaaacttccttctggtaagaaaggaaaaacaggatattctacgtcgtcttctgtgcttcaaaacttaataaatgctcatcctatagtgagaaaaatcctccaatatagagaactctataaattgaagagtacttatgtggatgctattcctaatctggttaatccacaaacaggtagagttcatacaaaatttaatcctacaggtacagctacaggaagaataagtagtagtgaacctaatcttcagaatattcctataaaaagtgaagaaggtagaaagataagaagagccttcgtgtcagaagatggatattttcttgtatctcttgattattctcagatagagctaaggattatggctcatctttctcaggagcctaaattaatatctgccttccaaaaaggagaggatattcatagaagaacagcatcggagatttttggagtgccagaggaagaagttgatgatcttttaaggtcaagggcaaaggccgttaattttggaattatttatggtatctcttcttttggactttctgagactgtaagtattacaccagaagaggcagagaaatttatagactcgtattttaagcactatccaagagtgaagctttttatagataagactattcatgaggcaagagaaaaactgtacgttaaaaccttatttggcagaaaaagatatattcctgagattaagagcataaataaacatgtaaggaatgcctatgaaaggatagcaataaatgcgccaattcagggaacagctgctgatattataaaacttgccatgatagaaatttacaaggagattgaaaataaaaatctcaagtcaagaatactccttcaaattcatgatgagcttattcttgaagtgccagaggaggagatggaatttactcctttaatggcaaaggaaaaaatggaaaaggtggtagaactttcggttcctcttgtagttgaaatctcggtaggtaaaaatcttgctgaattaaaatgagctataagattggtcgac

SEQ ID NO: 2127 - DNA, 2673 bp, Artificial Sequence
  Description of Artificial Sequence: Synthetic DNA sequence of Dictyoglomus thermophilum DNA Q790I
atgaaatacctgctgccgaccgctgctgctggtctgctgctcctcgctgcccagccggcgatggccatggatatcggaattaattcggatccgaaatctctgtgggatctttttcaagaaaataccgagaaagagtccaaaaggaagattctgattattgatggctcaagcctcatatacagggtttattacgcccttccccctttaaagacaaaaaatggtgaattaactaatgctctttatggcttcataagaatacttttaaaggccgtagaagattttaatcctgatcttgtaggcgttgcctttgatagacctgaacctacttttaggcatgtgatttataaagagtataaggctaagagaccacctatgaaggatgatttgaaagcgcagataccatggataagagaatttctaaggttaaatgatatacctctattggaagagcctggctatgaagcggatgatataatagctactatagtgaataaatataaggatgatttaaaatatattctctctggagatttagatcttttgcaattagtctcggacaaaacctttctaatacatcctcaaaagggaattactgagtttactatttatgatccaaaagctgtaaaggataggtttggagtagagccctataagattcccttatacaaagtattagtaggggacgaatctgataatattccaggagtaaatggaataggtcctaaaaaggcctcaaagattcttgagaaaatttcaagtgtagatgaatttaaaagtaaaataaaagttttggatagtgatttaagggagcttattgagaaaaattggaatattattgaaagaaatttagaacttgttactttaaaaaatatagataaggatcttattcttaaacccttcgagattaaaagagatgaaaaagtaatagattttttgaagagatatgaacttaagagtattcttcaaaagttatttcctgatcttcaagaggaagaaaatatagagattaaagatgtcgaagagatcaattttaatgaggtagaaaaagaaggctactttgcctttaaatgtcttggagatagggcttttgagggtatttctctttccttcaaggagggggaaggatattttatatctccttttgatttcaataatgagataagaaagaagattgaaaatataatttcttcagagaatgttaaaaaaattggctcttatattcaaagagatttacattttttaaactgtaaaataaagggcgatgtatttgatgttagtctcgcatcttatcttttgaaccctgaaagacaaaatcactctcttgatattttgataggagagtatctaaataaaacctcttttattcctcaaaaatacgctggttatctttttccgttaaagtctattcttgaggagaggataaagaatgaagggttagaatttgtactttataacatagagattccattaatccctgtactttactccatggagaagtgggggataaaggtagataaggaatatttaaaacagctttctgatgaattctgcgagagaattaaaaaattggaagaagagatatatgaacttgcaggaaccagatttaatctcaattctccaaaacaactttctgaagttttatttgagaggttaaaacttccttctggtaagaaaggaaaaacaggatattctacgtcgtcttctgtgcttcaaaacttaataaatgctcatcctatagtgagaaaaatcctccaatatagagaactctataaattgaagagtacttatgtggatgctattcctaatctggttaatccacaaacaggtagagttcatacaaaatttaatcctacaggtacagctacaggaagaataagtagtagtgaacctaatcttcagaatattcctataaaaagtgaagaaggtagaaagataagaagagccttcgtgtcagaagatggatattttcttgtatctcttgattattctcagatagagctaaggattatggctcatctttctcaggagcctaaattaatatctgccttccaaaaaggagaggatattcatagaagaacagcatcggagatttttggagtgccagaggaagaagttgatgatcttttaaggtcaagggcaaaggccgttaattttggaattatttatggtatctcttcttttggactttctgagactgtaagtattacaccagaagaggcagagaaatttatagactcgtattttaagcactatccaagagtgaagctttttatagataagactattcatgaggcaagagaaaaactgtacgttaaaaccttatttggcagaaaaagatatattcctgagattaagagcataaataaaattgtaaggaatgcctatgaaaggatagcaataaatgcgccaattcagggaacagctgctgatattataaaacttgccatgatagaaatttacaaggagattgaaaataaaaatctcaagtcaagaatactccttcaaattcatgatgagcttattcttgaagtgccagaggaggagatggaatttactcctttaatggcaaaggaaaaaatggaaaaggtggtagaactttcggttcctcttgtagttgaaatctcggtaggtaaaaatcttgctgaattaaaatgagctataagattggtcgac

SEQ ID NO: 2128 - DNA, 2673 bp, Artificial Sequence
  Description of Artificial Sequence: Synthetic DNA sequence of Dictyoglomus thermophilum DNA Q790L
atgaaatacctgctgccgaccgctgctgctggtctgctgctcctcgctgcccagccggcgatggccatggatatcggaattaattcggatccgaaatctctgtgggatctttttcaagaaaataccgagaaagagtccaaaaggaagattctgattattgatggctcaagcctcatatacagggtttattacgcccttccccctttaaagacaaaaaatggtgaattaactaatgctctttatggcttcataagaatacttttaaaggccgtagaagattttaatcctgatcttgtaggcgttgcctttgatagacctgaacctacttttaggcatgtgatttataaagagtataaggctaagagaccacctatgaaggatgatttgaaagcgcagataccatggataagagaatttctaaggttaaatgatatacctctattggaagagcctggctatgaagcggatgatataatagctactatagtgaataaatataaggatgatttaaaatatattctctctggagatttagatcttttgcaattagtctcggacaaaacctttctaatacatcctcaaaagggaattactgagtttactatttatgatccaaaagctgtaaaggataggtttggagtagagccctataagattcccttatacaaagtattagtaggggacgaatctgataatattccaggagtaaatggaataggtcctaaaaaggcctcaaagattcttgagaaaatttcaagtgtagatgaatttaaaagtaaaataaaagttttggatagtgatttaagggagcttattgagaaaaattggaatattattgaaagaaatttagaacttgttactttaaaaaatatagataaggatcttattcttaaacccttcgagattaaaagagatgaaaaagtaatagattttttgaagagatatgaacttaagagtattcttcaaaagttatttcctgatcttcaagaggaagaaaatatagagattaaagatgtcgaagagatcaattttaatgaggtagaaaaagaaggctactttgcctttaaatgtcttggagatagggcttttgagggtatttctctttccttcaaggagggggaaggatattttatatctccttttgatttcaataatgagataagaaagaagattgaaaatataatttcttcagagaatgttaaaaaaattggctcttatattcaaagagatttacattttttaaactgtaaaataaagggcgatgtatttgatgttagtctcgcatcttatcttttgaaccctgaaagacaaaatcactctcttgatattttgataggagagtatctaaataaaacctcttttattcctcaaaaatacgctggttatctttttccgttaaagtctattcttgaggagaggataaagaatgaagggttagaatttgtactttataacatagagattccattaatccctgtactttactccatggagaagtgggggataaaggtagataaggaatatttaaaacagctttctgatgaattctgcgagagaattaaaaaattggaagaagagatatatgaacttgcaggaaccagatttaatctcaattctccaaaacaactttctgaagttttatttgagaggttaaaacttccttctggtaagaaaggaaaaacaggatattctacgtcgtcttctgtgcttcaaaacttaataaatgctcatcctatagtgagaaaaatcctccaatatagagaactctataaattgaagagtacttatgtggatgctattcctaatctggttaatccacaaacaggtagagttcatacaaaatttaatcctacaggtacagctacaggaagaataagtagtagtgaacctaatcttcagaatattcctataaaaagtgaagaaggtagaaagataagaagagccttcgtgtcagaagatggatattttcttgtatctcttgattattctcagatagagctaaggattatggctcatctttctcaggagcctaaattaatatctgccttccaaaaaggagaggatattcatagaagaacagcatcggagatttttggagtgccagaggaagaagttgatgatcttttaaggtcaagggcaaaggccgttaattttggaattatttatggtatctcttcttttggactttctgagactgtaagtattacaccagaagaggcagagaaatttatagactcgtattttaagcactatccaagagtgaagctttttatagataagactattcatgaggcaagagaaaaactgtacgttaaaaccttatttggcagaaaaagatatattcctgagattaagagcataaataaacttgtaaggaatgcctatgaaaggatagcaataaatgcgccaattcagggaacagctgctgatattataaaacttgccatgatagaaatttacaaggagattgaaaataaaaatctcaagtcaagaatactccttcaaattcatgatgagcttattcttgaagtgccagaggaggagatggaatttactcctttaatggcaaaggaaaaaatggaaaaggtggtagaactttcggttcctcttgtagttgaaatctcggtaggtaaaaatcttgctgaattaaaatgagctataagattggtcgac

SEQ ID NO: 2129 - DNA, 2673 bp, Artificial Sequence
  Description of Artificial Sequence: Synthetic DNA sequence of Dictyoglomus thermophilum DNA Q790K
atgaaatacctgctgccgaccgctgctgctggtctgctgctcctcgctgcccagccggcgatggccatggatatcggaattaattcggatccgaaatctctgtgggatctttttcaagaaaataccgagaaagagtccaaaaggaagattctgattattgatggctcaagcctcatatacagggtttattacgcccttccccctttaaagacaaaaaatggtgaattaactaatgctctttatggcttcataagaatacttttaaaggccgtagaagattttaatcctgatcttgtaggcgttgcctttgatagacctgaacctacttttaggcatgtgatttataaagagtataaggctaagagaccacctatgaaggatgatttgaaagcgcagataccatggataagagaatttctaaggttaaatgatatacctctattggaagagcctggctatgaagcggatgatataatagctactatagtgaataaatataaggatgatttaaaatatattctctctggagatttagatcttttgcaattagtctcggacaaaacctttctaatacatcctcaaaagggaattactgagtttactatttatgatccaaaagctgtaaaggataggtttggagtagagccctataagattcccttatacaaagtattagtaggggacgaatctgataatattccaggagtaaatggaataggtcctaaaaaggcctcaaagattcttgagaaaatttcaagtgtagatgaatttaaaagtaaaataaaagttttggatagtgatttaagggagcttattgagaaaaattggaatattattgaaagaaatttagaacttgttactttaaaaaatatagataaggatcttattcttaaacccttcgagattaaaagagatgaaaaagtaatagattttttgaagagatatgaacttaagagtattcttcaaaagttatttcctgatcttcaagaggaagaaaatatagagattaaagatgtcgaagagatcaattttaatgaggtagaaaaagaaggctactttgcctttaaatgtcttggagatagggcttttgagggtatttctctttccttcaaggagggggaaggatattttatatctccttttgatttcaataatgagataagaaagaagattgaaaatataatttcttcagagaatgttaaaaaaattggctcttatattcaaagagatttacattttttaaactgtaaaataaagggcgatgtatttgatgttagtctcgcatcttatcttttgaaccctgaaagacaaaatcactctcttgatattttgataggagagtatctaaataaaacctcttttattcctcaaaaatacgctggttatctttttccgttaaagtctattcttgaggagaggataaagaatgaagggttagaatttgtactttataacatagagattccattaatccctgtactttactccatggagaagtgggggataaaggtagataaggaatatttaaaacagctttctgatgaattctgcgagagaattaaaaaattggaagaagagatatatgaacttgcaggaaccagatttaatctcaattctccaaaacaactttctgaagttttatttgagaggttaaaacttccttctggtaagaaaggaaaaacaggatattctacgtcgtcttctgtgcttcaaaacttaataaatgctcatcctatagtgagaaaaatcctccaatatagagaactctataaattgaagagtacttatgtggatgctattcctaatctggttaatccacaaacaggtagagttcatacaaaatttaatcctacaggtacagctacaggaagaataagtagtagtgaacctaatcttcagaatattcctataaaaagtgaagaaggtagaaagataagaagagccttcgtgtcagaagatggatattttcttgtatctcttgattattctcagatagagctaaggattatggctcatctttctcaggagcctaaattaatatctgccttccaaaaaggagaggatattcatagaagaacagcatcggagatttttggagtgccagaggaagaagttgatgatcttttaaggtcaagggcaaaggccgttaattttggaattatttatggtatctcttcttttggactttctgagactgtaagtattacaccagaagaggcagagaaatttatagactcgtattttaagcactatccaagagtgaagctttttatagataagactattcatgaggcaagagaaaaactgtacgttaaaaccttatttggcagaaaaagatatattcctgagattaagagcataaataaaaaagtaaggaatgcctatgaaaggatagcaataaatgcgccaattcagggaacagctgctgatattataaaacttgccatgatagaaatttacaaggagattgaaaataaaaatctcaagtcaagaatactccttcaaattcatgatgagcttattcttgaagtgccagaggaggagatggaatttactcctttaatggcaaaggaaaaaatggaaaaggtggtagaactttcggttcctcttgtagttgaaatctcggtaggtaaaaatcttgctgaattaaaatgagctataagattggtcgac

SEQ ID NO: 2130 - DNA, 2673 bp, Artificial Sequence
  Description of Artificial Sequence: Synthetic DNA sequence of Dictyoglomus thermophilum DNA Q790M
atgaaatacctgctgccgaccgctgctgctggtctgctgctcctcgctgcccagccggcgatggccatggatatcggaattaattcggatccgaaatctctgtgggatctttttcaagaaaataccgagaaagagtccaaaaggaagattctgattattgatggctcaagcctcatatacagggtttattacgcccttccccctttaaagacaaaaaatggtgaattaactaatgctctttatggcttcataagaatacttttaaaggccgtagaagattttaatcctgatcttgtaggcgttgcctttgatagacctgaacctacttttaggcatgtgatttataaagagtataaggctaagagaccacctatgaaggatgatttgaaagcgcagataccatggataagagaatttctaaggttaaatgatatacctctattggaagagcctggctatgaagcggatgatataatagctactatagtgaataaatataaggatgatttaaaatatattctctctggagatttagatcttttgcaattagtctcggacaaaacctttctaatacatcctcaaaagggaattactgagtttactatttatgatccaaaagctgtaaaggataggtttggagtagagccctataagattcccttatacaaagtattagtaggggacgaatctgataatattccaggagtaaatggaataggtcctaaaaaggcctcaaagattcttgagaaaatttcaagtgtagatgaatttaaaagtaaaataaaagttttggatagtgatttaagggagcttattgagaaaaattggaatattattgaaagaaatttagaacttgttactttaaaaaatatagataaggatcttattcttaaacccttcgagattaaaagagatgaaaaagtaatagattttttgaagagatatgaacttaagagtattcttcaaaagttatttcctgatcttcaagaggaagaaaatatagagattaaagatgtcgaagagatcaattttaatgaggtagaaaaagaaggctactttgcctttaaatgtcttggagatagggcttttgagggtatttctctttccttcaaggagggggaaggatattttatatctccttttgatttcaataatgagataagaaagaagattgaaaatataatttcttcagagaatgttaaaaaaattggctcttatattcaaagagatttacattttttaaactgtaaaataaagggcgatgtatttgatgttagtctcgcatcttatcttttgaaccctgaaagacaaaatcactctcttgatattttgataggagagtatctaaataaaacctcttttattcctcaaaaatacgctggttatctttttccgttaaagtctattcttgaggagaggataaagaatgaagggttagaatttgtactttataacatagagattccattaatccctgtactttactccatggagaagtgggggataaaggtagataaggaatatttaaaacagctttctgatgaattctgcgagagaattaaaaaattggaagaagagatatatgaacttgcaggaaccagatttaatctcaattctccaaaacaactttctgaagttttatttgagaggttaaaacttccttctggtaagaaaggaaaaacaggatattctacgtcgtcttctgtgcttcaaaacttaataaatgctcatcctatagtgagaaaaatcctccaatatagagaactctataaattgaagagtacttatgtggatgctattcctaatctggttaatccacaaacaggtagagttcatacaaaatttaatcctacaggtacagctacaggaagaataagtagtagtgaacctaatcttcagaatattcctataaaaagtgaagaaggtagaaagataagaagagccttcgtgtcagaagatggatattttcttgtatctcttgattattctcagatagagctaaggattatggctcatctttctcaggagcctaaattaatatctgccttccaaaaaggagaggatattcatagaagaacagcatcggagatttttggagtgccagaggaagaagttgatgatcttttaaggtcaagggcaaaggccgttaattttggaattatttatggtatctcttcttttggactttctgagactgtaagtattacaccagaagaggcagagaaatttatagactcgtattttaagcactatccaagagtgaagctttttatagataagactattcatgaggcaagagaaaaactgtacgttaaaaccttatttggcagaaaaagatatattcctgagattaagagcataaataaaatggtaaggaatgcctatgaaaggatagcaataaatgcgccaattcagggaacagctgctgatattataaaacttgccatgatagaaatttacaaggagattgaaaataaaaatctcaagtcaagaatactccttcaaattcatgatgagcttattcttgaagtgccagaggaggagatggaatttactcctttaatggcaaaggaaaaaatggaaaaggtggtagaactttcggttcctcttgtagttgaaatctcggtaggtaaaaatcttgctgaattaaaatgagctataagattggtcgac

SEQ ID NO: 2131 - DNA, 2673 bp, Artificial Sequence
  Description of Artificial Sequence: Synthetic DNA sequence of Dictyoglomus thermophilum DNA Q790F
atgaaatacctgctgccgaccgctgctgctggtctgctgctcctcgctgcccagccggcgatggccatggatatcggaattaattcggatccgaaatctctgtgggatctttttcaagaaaataccgagaaagagtccaaaaggaagattctgattattgatggctcaagcctcatatacagggtttattacgcccttccccctttaaagacaaaaaatggtgaattaactaatgctctttatggcttcataagaatacttttaaaggccgtagaagattttaatcctgatcttgtaggcgttgcctttgatagacctgaacctacttttaggcatgtgatttataaagagtataaggctaagagaccacctatgaaggatgatttgaaagcgcagataccatggataagagaatttctaaggttaaatgatatacctctattggaagagcctggctatgaagcggatgatataatagctactatagtgaataaatataaggatgatttaaaatatattctctctggagatttagatcttttgcaattagtctcggacaaaacctttctaatacatcctcaaaagggaattactgagtttactatttatgatccaaaagctgtaaaggataggtttggagtagagccctataagattcccttatacaaagtattagtaggggacgaatctgataatattccaggagtaaatggaataggtcctaaaaaggcctcaaagattcttgagaaaatttcaagtgtagatgaatttaaaagtaaaataaaagttttggatagtgatttaagggagcttattgagaaaaattggaatattattgaaagaaatttagaacttgttactttaaaaaatatagataaggatcttattcttaaacccttcgagattaaaagagatgaaaaagtaatagattttttgaagagatatgaacttaagagtattcttcaaaagttatttcctgatcttcaagaggaagaaaatatagagattaaagatgtcgaagagatcaattttaatgaggtagaaaaagaaggctactttgcctttaaatgtcttggagatagggcttttgagggtatttctctttccttcaaggagggggaaggatattttatatctccttttgatttcaataatgagataagaaagaagattgaaaatataatttcttcagagaatgttaaaaaaattggctcttatattcaaagagatttacattttttaaactgtaaaataaagggcgatgtatttgatgttagtctcgcatcttatcttttgaaccctgaaagacaaaatcactctcttgatattttgataggagagtatctaaataaaacctcttttattcctcaaaaatacgctggttatctttttccgttaaagtctattcttgaggagaggataaagaatgaagggttagaatttgtactttataacatagagattccattaatccctgtactttactccatggagaagtgggggataaaggtagataaggaatatttaaaacagctttctgatgaattctgcgagagaattaaaaaattggaagaagagatatatgaacttgcaggaaccagatttaatctcaattctccaaaacaactttctgaagttttatttgagaggttaaaacttccttctggtaagaaaggaaaaacaggatattctacgtcgtcttctgtgcttcaaaacttaataaatgctcatcctatagtgagaaaaatcctccaatatagagaactctataaattgaagagtacttatgtggatgctattcctaatctggttaatccacaaacaggtagagttcatacaaaatttaatcctacaggtacagctacaggaagaataagtagtagtgaacctaatcttcagaatattcctataaaaagtgaagaaggtagaaagataagaagagccttcgtgtcagaagatggatattttcttgtatctcttgattattctcagatagagctaaggattatggctcatctttctcaggagcctaaattaatatctgccttccaaaaaggagaggatattcatagaagaacagcatcggagatttttggagtgccagaggaagaagttgatgatcttttaaggtcaagggcaaaggccgttaattttggaattatttatggtatctcttcttttggactttctgagactgtaagtattacaccagaagaggcagagaaatttatagactcgtattttaagcactatccaagagtgaagctttttatagataagactattcatgaggcaagagaaaaactgtacgttaaaaccttatttggcagaaaaagatatattcctgagattaagagcataaataaatttgtaaggaatgcctatgaaaggatagcaataaatgcgccaattcagggaacagctgctgatattataaaacttgccatgatagaaatttacaaggagattgaaaataaaaatctcaagtcaagaatactccttcaaattcatgatgagcttattcttgaagtgccagaggaggagatggaatttactcctttaatggcaaaggaaaaaatggaaaaggtggtagaactttcggttcctcttgtagttgaaatctcggtaggtaaaaatcttgctgaattaaaatgagctataagattggtcgac

SEQ ID NO: 2132 - DNA, 2673 bp, Artificial Sequence
  Description of Artificial Sequence: Synthetic DNA sequence of Dictyoglomus thermophilum DNA Q790P
atgaaatacctgctgccgaccgctgctgctggtctgctgctcctcgctgcccagccggcgatggccatggatatcggaattaattcggatccgaaatctctgtgggatctttttcaagaaaataccgagaaagagtccaaaaggaagattctgattattgatggctcaagcctcatatacagggtttattacgcccttccccctttaaagacaaaaaatggtgaattaactaatgctctttatggcttcataagaatacttttaaaggccgtagaagattttaatcctgatcttgtaggcgttgcctttgatagacctgaacctacttttaggcatgtgatttataaagagtataaggctaagagaccacctatgaaggatgatttgaaagcgcagataccatggataagagaatttctaaggttaaatgatatacctctattggaagagcctggctatgaagcggatgatataatagctactatagtgaataaatataaggatgatttaaaatatattctctctggagatttagatcttttgcaattagtctcggacaaaacctttctaatacatcctcaaaagggaattactgagtttactatttatgatccaaaagctgtaaaggataggtttggagtagagccctataagattcccttatacaaagtattagtaggggacgaatctgataatattccaggagtaaatggaataggtcctaaaaaggcctcaaagattcttgagaaaatttcaagtgtagatgaatttaaaagtaaaataaaagttttggatagtgatttaagggagcttattgagaaaaattggaatattattgaaagaaatttagaacttgttactttaaaaaatatagataaggatcttattcttaaacccttcgagattaaaagagatgaaaaagtaatagattttttgaagagatatgaacttaagagtattcttcaaaagttatttcctgatcttcaagaggaagaaaatatagagattaaagatgtcgaagagatcaattttaatgaggtagaaaaagaaggctactttgcctttaaatgtcttggagatagggcttttgagggtatttctctttccttcaaggagggggaaggatattttatatctccttttgatttcaataatgagataagaaagaagattgaaaatataatttcttcagagaatgttaaaaaaattggctcttatattcaaagagatttacattttttaaactgtaaaataaagggcgatgtatttgatgttagtctcgcatcttatcttttgaaccctgaaagacaaaatcactctcttgatattttgataggagagtatctaaataaaacctcttttattcctcaaaaatacgctggttatctttttccgttaaagtctattcttgaggagaggataaagaatgaagggttagaatttgtactttataacatagagattccattaatccctgtactttactccatggagaagtgggggataaaggtagataaggaatatttaaaacagctttctgatgaattctgcgagagaattaaaaaattggaagaagagatatatgaacttgcaggaaccagatttaatctcaattctccaaaacaactttctgaagttttatttgagaggttaaaacttccttctggtaagaaaggaaaaacaggatattctacgtcgtcttctgtgcttcaaaacttaataaatgctcatcctatagtgagaaaaatcctccaatatagagaactctataaattgaagagtacttatgtggatgctattcctaatctggttaatccacaaacaggtagagttcatacaaaatttaatcctacaggtacagctacaggaagaataagtagtagtgaacctaatcttcagaatattcctataaaaagtgaagaaggtagaaagataagaagagccttcgtgtcagaagatggatattttcttgtatctcttgattattctcagatagagctaaggattatggctcatctttctcaggagcctaaattaatatctgccttccaaaaaggagaggatattcatagaagaacagcatcggagatttttggagtgccagaggaagaagttgatgatcttttaaggtcaagggcaaaggccgttaattttggaattatttatggtatctcttcttttggactttctgagactgtaagtattacaccagaagaggcagagaaatttatagactcgtattttaagcactatccaagagtgaagctttttatagataagactattcatgaggcaagagaaaaactgtacgttaaaaccttatttggcagaaaaagatatattcctgagattaagagcataaataaacctgtaaggaatgcctatgaaaggatagcaataaatgcgccaattcagggaacagctgctgatattataaaacttgccatgatagaaatttacaaggagattgaaaataaaaatctcaagtcaagaatactccttcaaattcatgatgagcttattcttgaagtgccagaggaggagatggaatttactcctttaatggcaaaggaaaaaatggaaaaggtggtagaactttcggttcctcttgtagttgaaatctcggtaggtaaaaatcttgctgaattaaaatgagctataagattggtcgac

SEQ ID NO: 2133 - DNA, 2673 bp, Artificial Sequence
  Description of Artificial Sequence: Synthetic DNA sequence of Dictyoglomus thermophilum DNA Q790S
atgaaatacctgctgccgaccgctgctgctggtctgctgctcctcgctgcccagccggcgatggccatggatatcggaattaattcggatccgaaatctctgtgggatctttttcaagaaaataccgagaaagagtccaaaaggaagattctgattattgatggctcaagcctcatatacagggtttattacgcccttccccctttaaagacaaaaaatggtgaattaactaatgctctttatggcttcataagaatacttttaaaggccgtagaagattttaatcctgatcttgtaggcgttgcctttgatagacctgaacctacttttaggcatgtgatttataaagagtataaggctaagagaccacctatgaaggatgatttgaaagcgcagataccatggataagagaatttctaaggttaaatgatatacctctattggaagagcctggctatgaagcggatgatataatagctactatagtgaataaatataaggatgatttaaaatatattctctctggagatttagatcttttgcaattagtctcggacaaaacctttctaatacatcctcaaaagggaattactgagtttactatttatgatccaaaagctgtaaaggataggtttggagtagagccctataagattcccttatacaaagtattagtaggggacgaatctgataatattccaggagtaaatggaataggtcctaaaaaggcctcaaagattcttgagaaaatttcaagtgtagatgaatttaaaagtaaaataaaagttttggatagtgatttaagggagcttattgagaaaaattggaatattattgaaagaaatttagaacttgttactttaaaaaatatagataaggatcttattcttaaacccttcgagattaaaagagatgaaaaagtaatagattttttgaagagatatgaacttaagagtattcttcaaaagttatttcctgatcttcaagaggaagaaaatatagagattaaagatgtcgaagagatcaattttaatgaggtagaaaaagaaggctactttgcctttaaatgtcttggagatagggcttttgagggtatttctctttccttcaaggagggggaaggatattttatatctccttttgatttcaataatgagataagaaagaagattgaaaatataatttcttcagagaatgttaaaaaaattggctcttatattcaaagagatttacattttttaaactgtaaaataaagggcgatgtatttgatgttagtctcgcatcttatcttttgaaccctgaaagacaaaatcactctcttgatattttgataggagagtatctaaataaaacctcttttattcctcaaaaatacgctggttatctttttccgttaaagtctattcttgaggagaggataaagaatgaagggttagaatttgtactttataacatagagattccattaatccctgtactttactccatggagaagtgggggataaaggtagataaggaatatttaaaacagctttctgatgaattctgcgagagaattaaaaaattggaagaagagatatatgaacttgcaggaaccagatttaatctcaattctccaaaacaactttctgaagttttatttgagaggttaaaacttccttctggtaagaaaggaaaaacaggatattctacgtcgtcttctgtgcttcaaaacttaataaatgctcatcctatagtgagaaaaatcctccaatatagagaactctataaattgaagagtacttatgtggatgctattcctaatctggttaatccacaaacaggtagagttcatacaaaatttaatcctacaggtacagctacaggaagaataagtagtagtgaacctaatcttcagaatattcctataaaaagtgaagaaggtagaaagataagaagagccttcgtgtcagaagatggatattttcttgtatctcttgattattctcagatagagctaaggattatggctcatctttctcaggagcctaaattaatatctgccttccaaaaaggagaggatattcatagaagaacagcatcggagatttttggagtgccagaggaagaagttgatgatcttttaaggtcaagggcaaaggccgttaattttggaattatttatggtatctcttcttttggactttctgagactgtaagtattacaccagaagaggcagagaaatttatagactcgtattttaagcactatccaagagtgaagctttttatagataagactattcatgaggcaagagaaaaactgtacgttaaaaccttatttggcagaaaaagatatattcctgagattaagagcataaataaatctgtaaggaatgcctatgaaaggatagcaataaatgcgccaattcagggaacagctgctgatattataaaacttgccatgatagaaatttacaaggagattgaaaataaaaatctcaagtcaagaatactccttcaaattcatgatgagcttattcttgaagtgccagaggaggagatggaatttactcctttaatggcaaaggaaaaaatggaaaaggtggtagaactttcggttcctcttgtagttgaaatctcggtaggtaaaaatcttgctgaattaaaatgagctataagattggtcgac

SEQ ID NO: 2134 - DNA, 2673 bp, Artificial Sequence
  Description of Artificial Sequence: Synthetic DNA sequence of Dictyoglomus thermophilum DNA Q790T
atgaaatacctgctgccgaccgctgctgctggtctgctgctcctcgctgcccagccggcgatggccatggatatcggaattaattcggatccgaaatctctgtgggatctttttcaagaaaataccgagaaagagtccaaaaggaagattctgattattgatggctcaagcctcatatacagggtttattacgcccttccccctttaaagacaaaaaatggtgaattaactaatgctctttatggcttcataagaatacttttaaaggccgtagaagattttaatcctgatcttgtaggcgttgcctttgatagacctgaacctacttttaggcatgtgatttataaagagtataaggctaagagaccacctatgaaggatgatttgaaagcgcagataccatggataagagaatttctaaggttaaatgatatacctctattggaagagcctggctatgaagcggatgatataatagctactatagtgaataaatataaggatgatttaaaatatattctctctggagatttagatcttttgcaattagtctcggacaaaacctttctaatacatcctcaaaagggaattactgagtttactatttatgatccaaaagctgtaaaggataggtttggagtagagccctataagattcccttatacaaagtattagtaggggacgaatctgataatattccaggagtaaatggaataggtcctaaaaaggcctcaaagattcttgagaaaatttcaagtgtagatgaatttaaaagtaaaataaaagttttggatagtgatttaagggagcttattgagaaaaattggaatattattgaaagaaatttagaacttgttactttaaaaaatatagataaggatcttattcttaaacccttcgagattaaaagagatgaaaaagtaatagattttttgaagagatatgaacttaagagtattcttcaaaagttatttcctgatcttcaagaggaagaaaatatagagattaaagatgtcgaagagatcaattttaatgaggtagaaaaagaaggctactttgcctttaaatgtcttggagatagggcttttgagggtatttctctttccttcaaggagggggaaggatattttatatctccttttgatttcaataatgagataagaaagaagattgaaaatataatttcttcagagaatgttaaaaaaattggctcttatattcaaagagatttacattttttaaactgtaaaataaagggcgatgtatttgatgttagtctcgcatcttatcttttgaaccctgaaagacaaaatcactctcttgatattttgataggagagtatctaaataaaacctcttttattcctcaaaaatacgctggttatctttttccgttaaagtctattcttgaggagaggataaagaatgaagggttagaatttgtactttataacatagagattccattaatccctgtactttactccatggagaagtgggggataaaggtagataaggaatatttaaaacagctttctgatgaattctgcgagagaattaaaaaattggaagaagagatatatgaacttgcaggaaccagatttaatctcaattctccaaaacaactttctgaagttttatttgagaggttaaaacttccttctggtaagaaaggaaaaacaggatattctacgtcgtcttctgtgcttcaaaacttaataaatgctcatcctatagtgagaaaaatcctccaatatagagaactctataaattgaagagtacttatgtggatgctattcctaatctggttaatccacaaacaggtagagttcatacaaaatttaatcctacaggtacagctacaggaagaataagtagtagtgaacctaatcttcagaatattcctataaaaagtgaagaaggtagaaagataagaagagccttcgtgtcagaagatggatattttcttgtatctcttgattattctcagatagagctaaggattatggctcatctttctcaggagcctaaattaatatctgccttccaaaaaggagaggatattcatagaagaacagcatcggagatttttggagtgccagaggaagaagttgatgatcttttaaggtcaagggcaaaggccgttaattttggaattatttatggtatctcttcttttggactttctgagactgtaagtattacaccagaagaggcagagaaatttatagactcgtattttaagcactatccaagagtgaagctttttatagataagactattcatgaggcaagagaaaaactgtacgttaaaaccttatttggcagaaaaagatatattcctgagattaagagcataaataaaactgtaaggaatgcctatgaaaggatagcaataaatgcgccaattcagggaacagctgctgatattataaaacttgccatgatagaaatttacaaggagattgaaaataaaaatctcaagtcaagaatactccttcaaattcatgatgagcttattcttgaagtgccagaggaggagatggaatttactcctttaatggcaaaggaaaaaatggaaaaggtggtagaactttcggttcctcttgtagttgaaatctcggtaggtaaaaatcttgctgaattaaaatgagctataagattggtcgac

SEQ ID NO: 2135 - DNA, 2673 bp, Artificial Sequence
  Description of Artificial Sequence: Synthetic DNA sequence of Dictyoglomus thermophilum DNA Q790W
atgaaatacctgctgccgaccgctgctgctggtctgctgctcctcgctgcccagccggcgatggccatggatatcggaattaattcggatccgaaatctctgtgggatctttttcaagaaaataccgagaaagagtccaaaaggaagattctgattattgatggctcaagcctcatatacagggtttattacgcccttccccctttaaagacaaaaaatggtgaattaactaatgctctttatggcttcataagaatacttttaaaggccgtagaagattttaatcctgatcttgtaggcgttgcctttgatagacctgaacctacttttaggcatgtgatttataaagagtataaggctaagagaccacctatgaaggatgatttgaaagcgcagataccatggataagagaatttctaaggttaaatgatatacctctattggaagagcctggctatgaagcggatgatataatagctactatagtgaataaatataaggatgatttaaaatatattctctctggagatttagatcttttgcaattagtctcggacaaaacctttctaatacatcctcaaaagggaattactgagtttactatttatgatccaaaagctgtaaaggataggtttggagtagagccctataagattcccttatacaaagtattagtaggggacgaatctgataatattccaggagtaaatggaataggtcctaaaaaggcctcaaagattcttgagaaaatttcaagtgtagatgaatttaaaagtaaaataaaagttttggatagtgatttaagggagcttattgagaaaaattggaatattattgaaagaaatttagaacttgttactttaaaaaatatagataaggatcttattcttaaacccttcgagattaaaagagatgaaaaagtaatagattttttgaagagatatgaacttaagagtattcttcaaaagttatttcctgatcttcaagaggaagaaaatatagagattaaagatgtcgaagagatcaattttaatgaggtagaaaaagaaggctactttgcctttaaatgtcttggagatagggcttttgagggtatttctctttccttcaaggagggggaaggatattttatatctccttttgatttcaataatgagataagaaagaagattgaaaatataatttcttcagagaatgttaaaaaaattggctcttatattcaaagagatttacattttttaaactgtaaaataaagggcgatgtatttgatgttagtctcgcatcttatcttttgaaccctgaaagacaaaatcactctcttgatattttgataggagagtatctaaataaaacctcttttattcctcaaaaatacgctggttatctttttccgttaaagtctattcttgaggagaggataaagaatgaagggttagaatttgtactttataacatagagattccattaatccctgtactttactccatggagaagtgggggataaaggtagataaggaatatttaaaacagctttctgatgaattctgcgagagaattaaaaaattggaagaagagatatatgaacttgcaggaaccagatttaatctcaattctccaaaacaactttctgaagttttatttgagaggttaaaacttccttctggtaagaaaggaaaaacaggatattctacgtcgtcttctgtgcttcaaaacttaataaatgctcatcctatagtgagaaaaatcctccaatatagagaactctataaattgaagagtacttatgtggatgctattcctaatctggttaatccacaaacaggtagagttcatacaaaatttaatcctacaggtacagctacaggaagaataagtagtagtgaacctaatcttcagaatattcctataaaaagtgaagaaggtagaaagataagaagagccttcgtgtcagaagatggatattttcttgtatctcttgattattctcagatagagctaaggattatggctcatctttctcaggagcctaaattaatatctgccttccaaaaaggagaggatattcatagaagaacagcatcggagatttttggagtgccagaggaagaagttgatgatcttttaaggtcaagggcaaaggccgttaattttggaattatttatggtatctcttcttttggactttctgagactgtaagtattacaccagaagaggcagagaaatttatagactcgtattttaagcactatccaagagtgaagctttttatagataagactattcatgaggcaagagaaaaactgtacgttaaaaccttatttggcagaaaaagatatattcctgagattaagagcataaataaatgggtaaggaatgcctatgaaaggatagcaataaatgcgccaattcagggaacagctgctgatattataaaacttgccatgatagaaatttacaaggagattgaaaataaaaatctcaagtcaagaatactccttcaaattcatgatgagcttattcttgaagtgccagaggaggagatggaatttactcctttaatggcaaaggaaaaaatggaaaaggtggtagaactttcggttcctcttgtagttgaaatctcggtaggtaaaaatcttgctgaattaaaatgagctataagattggtcgac

SEQ ID NO: 2136 - DNA, 2673 bp, Artificial Sequence
  Description of Artificial Sequence: Synthetic DNA sequence of Dictyoglomus thermophilum DNA Q790Y
atgaaatacctgctgccgaccgctgctgctggtctgctgctcctcgctgcccagccggcgatggccatggatatcggaattaattcggatccgaaatctctgtgggatctttttcaagaaaataccgagaaagagtccaaaaggaagattctgattattgatggctcaagcctcatatacagggtttattacgcccttccccctttaaagacaaaaaatggtgaattaactaatgctctttatggcttcataagaatacttttaaaggccgtagaagattttaatcctgatcttgtaggcgttgcctttgatagacctgaacctacttttaggcatgtgatttataaagagtataaggctaagagaccacctatgaaggatgatttgaaagcgcagataccatggataagagaatttctaaggttaaatgatatacctctattggaagagcctggctatgaagcggatgatataatagctactatagtgaataaatataaggatgatttaaaatatattctctctggagatttagatcttttgcaattagtctcggacaaaacctttctaatacatcctcaaaagggaattactgagtttactatttatgatccaaaagctgtaaaggataggtttggagtagagccctataagattcccttatacaaagtattagtaggggacgaatctgataatattccaggagtaaatggaataggtcctaaaaaggcctcaaagattcttgagaaaatttcaagtgtagatgaatttaaaagtaaaataaaagttttggatagtgatttaagggagcttattgagaaaaattggaatattattgaaagaaatttagaacttgttactttaaaaaatatagataaggatcttattcttaaacccttcgagattaaaagagatgaaaaagtaatagattttttgaagagatatgaacttaagagtattcttcaaaagttatttcctgatcttcaagaggaagaaaatatagagattaaagatgtcgaagagatcaattttaatgaggtagaaaaagaaggctactttgcctttaaatgtcttggagatagggcttttgagggtatttctctttccttcaaggagggggaaggatattttatatctccttttgatttcaataatgagataagaaagaagattgaaaatataatttcttcagagaatgttaaaaaaattggctcttatattcaaagagatttacattttttaaactgtaaaataaagggcgatgtatttgatgttagtctcgcatcttatcttttgaaccctgaaagacaaaatcactctcttgatattttgataggagagtatctaaataaaacctcttttattcctcaaaaatacgctggttatctttttccgttaaagtctattcttgaggagaggataaagaatgaagggttagaatttgtactttataacatagagattccattaatccctgtactttactccatggagaagtgggggataaaggtagataaggaatatttaaaacagctttctgatgaattctgcgagagaattaaaaaattggaagaagagatatatgaacttgcaggaaccagatttaatctcaattctccaaaacaactttctgaagttttatttgagaggttaaaacttccttctggtaagaaaggaaaaacaggatattctacgtcgtcttctgtgcttcaaaacttaataaatgctcatcctatagtgagaaaaatcctccaatatagagaactctataaattgaagagtacttatgtggatgctattcctaatctggttaatccacaaacaggtagagttcatacaaaatttaatcctacaggtacagctacaggaagaataagtagtagtgaacctaatcttcagaatattcctataaaaagtgaagaaggtagaaagataagaagagccttcgtgtcagaagatggatattttcttgtatctcttgattattctcagatagagctaaggattatggctcatctttctcaggagcctaaattaatatctgccttccaaaaaggagaggatattcatagaagaacagcatcggagatttttggagtgccagaggaagaagttgatgatcttttaaggtcaagggcaaaggccgttaattttggaattatttatggtatctcttcttttggactttctgagactgtaagtattacaccagaagaggcagagaaatttatagactcgtattttaagcactatccaagagtgaagctttttatagataagactattcatgaggcaagagaaaaactgtacgttaaaaccttatttggcagaaaaagatatattcctgagattaagagcataaataaatatgtaaggaatgcctatgaaaggatagcaataaatgcgccaattcagggaacagctgctgatattataaaacttgccatgatagaaatttacaaggagattgaaaataaaaatctcaagtcaagaatactccttcaaattcatgatgagcttattcttgaagtgccagaggaggagatggaatttactcctttaatggcaaaggaaaaaatggaaaaggtggtagaactttcggttcctcttgtagttgaaatctcggtaggtaaaaatcttgctgaattaaaatgagctataagattggtcgac

SEQ ID NO: 2137 - DNA, 2673 bp, Artificial Sequence
  Description of Artificial Sequence: Synthetic DNA sequence of Dictyoglomus thermophilum DNA Q790V
atgaaatacctgctgccgaccgctgctgctggtctgctgctcctcgctgcccagccggcgatggccatggatatcggaattaattcggatccgaaatctctgtgggatctttttcaagaaaataccgagaaagagtccaaaaggaagattctgattattgatggctcaagcctcatatacagggtttattacgcccttccccctttaaagacaaaaaatggtgaattaactaatgctctttatggcttcataagaatacttttaaaggccgtagaagattttaatcctgatcttgtaggcgttgcctttgatagacctgaacctacttttaggcatgtgatttataaagagtataaggctaagagaccacctatgaaggatgatttgaaagcgcagataccatggataagagaatttctaaggttaaatgatatacctctattggaagagcctggctatgaagcggatgatataatagctactatagtgaataaatataaggatgatttaaaatatattctctctggagatttagatcttttgcaattagtctcggacaaaacctttctaatacatcctcaaaagggaattactgagtttactatttatgatccaaaagctgtaaaggataggtttggagtagagccctataagattcccttatacaaagtattagtaggggacgaatctgataatattccaggagtaaatggaataggtcctaaaaaggcctcaaagattcttgagaaaatttcaagtgtagatgaatttaaaagtaaaataaaagttttggatagtgatttaagggagcttattgagaaaaattggaatattattgaaagaaatttagaacttgttactttaaaaaatatagataaggatcttattcttaaacccttcgagattaaaagagatgaaaaagtaatagattttttgaagagatatgaacttaagagtattcttcaaaagttatttcctgatcttcaagaggaagaaaatatagagattaaagatgtcgaagagatcaattttaatgaggtagaaaaagaaggctactttgcctttaaatgtcttggagatagggcttttgagggtatttctctttccttcaaggagggggaaggatattttatatctccttttgatttcaataatgagataagaaagaagattgaaaatataatttcttcagagaatgttaaaaaaattggctcttatattcaaagagatttacattttttaaactgtaaaataaagggcgatgtatttgatgttagtctcgcatcttatcttttgaaccctgaaagacaaaatcactctcttgatattttgataggagagtatctaaataaaacctcttttattcctcaaaaatacgctggttatctttttccgttaaagtctattcttgaggagaggataaagaatgaagggttagaatttgtactttataacatagagattccattaatccctgtactttactccatggagaagtgggggataaaggtagataaggaatatttaaaacagctttctgatgaattctgcgagagaattaaaaaattggaagaagagatatatgaacttgcaggaaccagatttaatctcaattctccaaaacaactttctgaagttttatttgagaggttaaaacttccttctggtaagaaaggaaaaacaggatattctacgtcgtcttctgtgcttcaaaacttaataaatgctcatcctatagtgagaaaaatcctccaatatagagaactctataaattgaagagtacttatgtggatgctattcctaatctggttaatccacaaacaggtagagttcatacaaaatttaatcctacaggtacagctacaggaagaataagtagtagtgaacctaatcttcagaatattcctataaaaagtgaagaaggtagaaagataagaagagccttcgtgtcagaagatggatattttcttgtatctcttgattattctcagatagagctaaggattatggctcatctttctcaggagcctaaattaatatctgccttccaaaaaggagaggatattcatagaagaacagcatcggagatttttggagtgccagaggaagaagttgatgatcttttaaggtcaagggcaaaggccgttaattttggaattatttatggtatctcttcttttggactttctgagactgtaagtattacaccagaagaggcagagaaatttatagactcgtattttaagcactatccaagagtgaagctttttatagataagactattcatgaggcaagagaaaaactgtacgttaaaaccttatttggcagaaaaagatatattcctgagattaagagcataaataaagttgtaaggaatgcctatgaaaggatagcaataaatgcgccaattcagggaacagctgctgatattataaaacttgccatgatagaaatttacaaggagattgaaaataaaaatctcaagtcaagaatactccttcaaattcatgatgagcttattcttgaagtgccagaggaggagatggaatttactcctttaatggcaaaggaaaaaatggaaaaggtggtagaactttcggttcctcttgtagttgaaatctcggtaggtaaaaatcttgctgaattaaaatgagctataagattggtcgac

SEQ ID NO: 2138 - DNA, 2673 bp, Artificial Sequence
  Description of Artificial Sequence: Synthetic DNA sequence of Dictyoglomus thermophilum DNA V791A
atgaaatacctgctgccgaccgctgctgctggtctgctgctcctcgctgcccagccggcgatggccatggatatcggaattaattcggatccgaaatctctgtgggatctttttcaagaaaataccgagaaagagtccaaaaggaagattctgattattgatggctcaagcctcatatacagggtttattacgcccttccccctttaaagacaaaaaatggtgaattaactaatgctctttatggcttcataagaatacttttaaaggccgtagaagattttaatcctgatcttgtaggcgttgcctttgatagacctgaacctacttttaggcatgtgatttataaagagtataaggctaagagaccacctatgaaggatgatttgaaagcgcagataccatggataagagaatttctaaggttaaatgatatacctctattggaagagcctggctatgaagcggatgatataatagctactatagtgaataaatataaggatgatttaaaatatattctctctggagatttagatcttttgcaattagtctcggacaaaacctttctaatacatcctcaaaagggaattactgagtttactatttatgatccaaaagctgtaaaggataggtttggagtagagccctataagattcccttatacaaagtattagtaggggacgaatctgataatattccaggagtaaatggaataggtcctaaaaaggcctcaaagattcttgagaaaatttcaagtgtagatgaatttaaaagtaaaataaaagttttggatagtgatttaagggagcttattgagaaaaattggaatattattgaaagaaatttagaacttgttactttaaaaaatatagataaggatcttattcttaaacccttcgagattaaaagagatgaaaaagtaatagattttttgaagagatatgaacttaagagtattcttcaaaagttatttcctgatcttcaagaggaagaaaatatagagattaaagatgtcgaagagatcaattttaatgaggtagaaaaagaaggctactttgcctttaaatgtcttggagatagggcttttgagggtatttctctttccttcaaggagggggaaggatattttatatctccttttgatttcaataatgagataagaaagaagattgaaaatataatttcttcagagaatgttaaaaaaattggctcttatattcaaagagatttacattttttaaactgtaaaataaagggcgatgtatttgatgttagtctcgcatcttatcttttgaaccctgaaagacaaaatcactctcttgatattttgataggagagtatctaaataaaacctcttttattcctcaaaaatacgctggttatctttttccgttaaagtctattcttgaggagaggataaagaatgaagggttagaatttgtactttataacatagagattccattaatccctgtactttactccatggagaagtgggggataaaggtagataaggaatatttaaaacagctttctgatgaattctgcgagagaattaaaaaattggaagaagagatatatgaacttgcaggaaccagatttaatctcaattctccaaaacaactttctgaagttttatttgagaggttaaaacttccttctggtaagaaaggaaaaacaggatattctacgtcgtcttctgtgcttcaaaacttaataaatgctcatcctatagtgagaaaaatcctccaatatagagaactctataaattgaagagtacttatgtggatgctattcctaatctggttaatccacaaacaggtagagttcatacaaaatttaatcctacaggtacagctacaggaagaataagtagtagtgaacctaatcttcagaatattcctataaaaagtgaagaaggtagaaagataagaagagccttcgtgtcagaagatggatattttcttgtatctcttgattattctcagatagagctaaggattatggctcatctttctcaggagcctaaattaatatctgccttccaaaaaggagaggatattcatagaagaacagcatcggagatttttggagtgccagaggaagaagttgatgatcttttaaggtcaagggcaaaggccgttaattttggaattatttatggtatctcttcttttggactttctgagactgtaagtattacaccagaagaggcagagaaatttatagactcgtattttaagcactatccaagagtgaagctttttatagataagactattcatgaggcaagagaaaaactgtacgttaaaaccttatttggcagaaaaagatatattcctgagattaagagcataaataaacaggctaggaatgcctatgaaaggatagcaataaatgcgccaattcagggaacagctgctgatattataaaacttgccatgatagaaatttacaaggagattgaaaataaaaatctcaagtcaagaatactccttcaaattcatgatgagcttattcttgaagtgccagaggaggagatggaatttactcctttaatggcaaaggaaaaaatggaaaaggtggtagaactttcggttcctcttgtagttgaaatctcggtaggtaaaaatcttgctgaattaaaatgagctataagattggtcgac

SEQ ID NO: 2139 - DNA, 2673 bp, Artificial Sequence
  Description of Artificial Sequence: Synthetic DNA sequence of Dictyoglomus thermophilum DNA V791R
atgaaatacctgctgccgaccgctgctgctggtctgctgctcctcgctgcccagccggcgatggccatggatatcggaattaattcggatccgaaatctctgtgggatctttttcaagaaaataccgagaaagagtccaaaaggaagattctgattattgatggctcaagcctcatatacagggtttattacgcccttccccctttaaagacaaaaaatggtgaattaactaatgctctttatggcttcataagaatacttttaaaggccgtagaagattttaatcctgatcttgtaggcgttgcctttgatagacctgaacctacttttaggcatgtgatttataaagagtataaggctaagagaccacctatgaaggatgatttgaaagcgcagataccatggataagagaatttctaaggttaaatgatatacctctattggaagagcctggctatgaagcggatgatataatagctactatagtgaataaatataaggatgatttaaaatatattctctctggagatttagatcttttgcaattagtctcggacaaaacctttctaatacatcctcaaaagggaattactgagtttactatttatgatccaaaagctgtaaaggataggtttggagtagagccctataagattcccttatacaaagtattagtaggggacgaatctgataatattccaggagtaaatggaataggtcctaaaaaggcctcaaagattcttgagaaaatttcaagtgtagatgaatttaaaagtaaaataaaagttttggatagtgatttaagggagcttattgagaaaaattggaatattattgaaagaaatttagaacttgttactttaaaaaatatagataaggatcttattcttaaacccttcgagattaaaagagatgaaaaagtaatagattttttgaagagatatgaacttaagagtattcttcaaaagttatttcctgatcttcaagaggaagaaaatatagagattaaagatgtcgaagagatcaattttaatgaggtagaaaaagaaggctactttgcctttaaatgtcttggagatagggcttttgagggtatttctctttccttcaaggagggggaaggatattttatatctccttttgatttcaataatgagataagaaagaagattgaaaatataatttcttcagagaatgttaaaaaaattggctcttatattcaaagagatttacattttttaaactgtaaaataaagggcgatgtatttgatgttagtctcgcatcttatcttttgaaccctgaaagacaaaatcactctcttgatattttgataggagagtatctaaataaaacctcttttattcctcaaaaatacgctggttatctttttccgttaaagtctattcttgaggagaggataaagaatgaagggttagaatttgtactttataacatagagattccattaatccctgtactttactccatggagaagtgggggataaaggtagataaggaatatttaaaacagctttctgatgaattctgcgagagaattaaaaaattggaagaagagatatatgaacttgcaggaaccagatttaatctcaattctccaaaacaactttctgaagttttatttgagaggttaaaacttccttctggtaagaaaggaaaaacaggatattctacgtcgtcttctgtgcttcaaaacttaataaatgctcatcctatagtgagaaaaatcctccaatatagagaactctataaattgaagagtacttatgtggatgctattcctaatctggttaatccacaaacaggtagagttcatacaaaatttaatcctacaggtacagctacaggaagaataagtagtagtgaacctaatcttcagaatattcctataaaaagtgaagaaggtagaaagataagaagagccttcgtgtcagaagatggatattttcttgtatctcttgattattctcagatagagctaaggattatggctcatctttctcaggagcctaaattaatatctgccttccaaaaaggagaggatattcatagaagaacagcatcggagatttttggagtgccagaggaagaagttgatgatcttttaaggtcaagggcaaaggccgttaattttggaattatttatggtatctcttcttttggactttctgagactgtaagtattacaccagaagaggcagagaaatttatagactcgtattttaagcactatccaagagtgaagctttttatagataagactattcatgaggcaagagaaaaactgtacgttaaaaccttatttggcagaaaaagatatattcctgagattaagagcataaataaacagcgtaggaatgcctatgaaaggatagcaataaatgcgccaattcagggaacagctgctgatattataaaacttgccatgatagaaatttacaaggagattgaaaataaaaatctcaagtcaagaatactccttcaaattcatgatgagcttattcttgaagtgccagaggaggagatggaatttactcctttaatggcaaaggaaaaaatggaaaaggtggtagaactttcggttcctcttgtagttgaaatctcggtaggtaaaaatcttgctgaattaaaatgagctataagattggtcgac

SEQ ID NO: 2140 - DNA, 2673 bp, Artificial Sequence
  Description of Artificial Sequence: Synthetic DNA sequence of Dictyoglomus thermophilum DNA V791N
atgaaatacctgctgccgaccgctgctgctggtctgctgctcctcgctgcccagccggcgatggccatggatatcggaattaattcggatccgaaatctctgtgggatctttttcaagaaaataccgagaaagagtccaaaaggaagattctgattattgatggctcaagcctcatatacagggtttattacgcccttccccctttaaagacaaaaaatggtgaattaactaatgctctttatggcttcataagaatacttttaaaggccgtagaagattttaatcctgatcttgtaggcgttgcctttgatagacctgaacctacttttaggcatgtgatttataaagagtataaggctaagagaccacctatgaaggatgatttgaaagcgcagataccatggataagagaatttctaaggttaaatgatatacctctattggaagagcctggctatgaagcggatgatataatagctactatagtgaataaatataaggatgatttaaaatatattctctctggagatttagatcttttgcaattagtctcggacaaaacctttctaatacatcctcaaaagggaattactgagtttactatttatgatccaaaagctgtaaaggataggtttggagtagagccctataagattcccttatacaaagtattagtaggggacgaatctgataatattccaggagtaaatggaataggtcctaaaaaggcctcaaagattcttgagaaaatttcaagtgtagatgaatttaaaagtaaaataaaagttttggatagtgatttaagggagcttattgagaaaaattggaatattattgaaagaaatttagaacttgttactttaaaaaatatagataaggatcttattcttaaacccttcgagattaaaagagatgaaaaagtaatagattttttgaagagatatgaacttaagagtattcttcaaaagttatttcctgatcttcaagaggaagaaaatatagagattaaagatgtcgaagagatcaattttaatgaggtagaaaaagaaggctactttgcctttaaatgtcttggagatagggcttttgagggtatttctctttccttcaaggagggggaaggatattttatatctccttttgatttcaataatgagataagaaagaagattgaaaatataatttcttcagagaatgttaaaaaaattggctcttatattcaaagagatttacattttttaaactgtaaaataaagggcgatgtatttgatgttagtctcgcatcttatcttttgaaccctgaaagacaaaatcactctcttgatattttgataggagagtatctaaataaaacctcttttattcctcaaaaatacgctggttatctttttccgttaaagtctattcttgaggagaggataaagaatgaagggttagaatttgtactttataacatagagattccattaatccctgtactttactccatggagaagtgggggataaaggtagataaggaatatttaaaacagctttctgatgaattctgcgagagaattaaaaaattggaagaagagatatatgaacttgcaggaaccagatttaatctcaattctccaaaacaactttctgaagttttatttgagaggttaaaacttccttctggtaagaaaggaaaaacaggatattctacgtcgtcttctgtgcttcaaaacttaataaatgctcatcctatagtgagaaaaatcctccaatatagagaactctataaattgaagagtacttatgtggatgctattcctaatctggttaatccacaaacaggtagagttcatacaaaatttaatcctacaggtacagctacaggaagaataagtagtagtgaacctaatcttcagaatattcctataaaaagtgaagaaggtagaaagataagaagagccttcgtgtcagaagatggatattttcttgtatctcttgattattctcagatagagctaaggattatggctcatctttctcaggagcctaaattaatatctgccttccaaaaaggagaggatattcatagaagaacagcatcggagatttttggagtgccagaggaagaagttgatgatcttttaaggtcaagggcaaaggccgttaattttggaattatttatggtatctcttcttttggactttctgagactgtaagtattacaccagaagaggcagagaaatttatagactcgtattttaagcactatccaagagtgaagctttttatagataagactattcatgaggcaagagaaaaactgtacgttaaaaccttatttggcagaaaaagatatattcctgagattaagagcataaataaacagaataggaatgcctatgaaaggatagcaataaatgcgccaattcagggaacagctgctgatattataaaacttgccatgatagaaatttacaaggagattgaaaataaaaatctcaagtcaagaatactccttcaaattcatgatgagcttattcttgaagtgccagaggaggagatggaatttactcctttaatggcaaaggaaaaaatggaaaaggtggtagaactttcggttcctcttgtagttgaaatctcggtaggtaaaaatcttgctgaattaaaatgagctataagattggtcgac

SEQ ID NO: 2141 - DNA, 2673 bp, Artificial Sequence
  Description of Artificial Sequence: Synthetic DNA sequence of Dictyoglomus thermophilum DNA V791D
atgaaatacctgctgccgaccgctgctgctggtctgctgctcctcgctgcccagccggcgatggccatggatatcggaattaattcggatccgaaatctctgtgggatctttttcaagaaaataccgagaaagagtccaaaaggaagattctgattattgatggctcaagcctcatatacagggtttattacgcccttccccctttaaagacaaaaaatggtgaattaactaatgctctttatggcttcataagaatacttttaaaggccgtagaagattttaatcctgatcttgtaggcgttgcctttgatagacctgaacctacttttaggcatgtgatttataaagagtataaggctaagagaccacctatgaaggatgatttgaaagcgcagataccatggataagagaatttctaaggttaaatgatatacctctattggaagagcctggctatgaagcggatgatataatagctactatagtgaataaatataaggatgatttaaaatatattctctctggagatttagatcttttgcaattagtctcggacaaaacctttctaatacatcctcaaaagggaattactgagtttactatttatgatccaaaagctgtaaaggataggtttggagtagagccctataagattcccttatacaaagtattagtaggggacgaatctgataatattccaggagtaaatggaataggtcctaaaaaggcctcaaagattcttgagaaaatttcaagtgtagatgaatttaaaagtaaaataaaagttttggatagtgatttaagggagcttattgagaaaaattggaatattattgaaagaaatttagaacttgttactttaaaaaatatagataaggatcttattcttaaacccttcgagattaaaagagatgaaaaagtaatagattttttgaagagatatgaacttaagagtattcttcaaaagttatttcctgatcttcaagaggaagaaaatatagagattaaagatgtcgaagagatcaattttaatgaggtagaaaaagaaggctactttgcctttaaatgtcttggagatagggcttttgagggtatttctctttccttcaaggagggggaaggatattttatatctccttttgatttcaataatgagataagaaagaagattgaaaatataatttcttcagagaatgttaaaaaaattggctcttatattcaaagagatttacattttttaaactgtaaaataaagggcgatgtatttgatgttagtctcgcatcttatcttttgaaccctgaaagacaaaatcactctcttgatattttgataggagagtatctaaataaaacctcttttattcctcaaaaatacgctggttatctttttccgttaaagtctattcttgaggagaggataaagaatgaagggttagaatttgtactttataacatagagattccattaatccctgtactttactccatggagaagtgggggataaaggtagataaggaatatttaaaacagctttctgatgaattctgcgagagaattaaaaaattggaagaagagatatatgaacttgcaggaaccagatttaatctcaattctccaaaacaactttctgaagttttatttgagaggttaaaacttccttctggtaagaaaggaaaaacaggatattctacgtcgtcttctgtgcttcaaaacttaataaatgctcatcctatagtgagaaaaatcctccaatatagagaactctataaattgaagagtacttatgtggatgctattcctaatctggttaatccacaaacaggtagagttcatacaaaatttaatcctacaggtacagctacaggaagaataagtagtagtgaacctaatcttcagaatattcctataaaaagtgaagaaggtagaaagataagaagagccttcgtgtcagaagatggatattttcttgtatctcttgattattctcagatagagctaaggattatggctcatctttctcaggagcctaaattaatatctgccttccaaaaaggagaggatattcatagaagaacagcatcggagatttttggagtgccagaggaagaagttgatgatcttttaaggtcaagggcaaaggccgttaattttggaattatttatggtatctcttcttttggactttctgagactgtaagtattacaccagaagaggcagagaaatttatagactcgtattttaagcactatccaagagtgaagctttttatagataagactattcatgaggcaagagaaaaactgtacgttaaaaccttatttggcagaaaaagatatattcctgagattaagagcataaataaacaggataggaatgcctatgaaaggatagcaataaatgcgccaattcagggaacagctgctgatattataaaacttgccatgatagaaatttacaaggagattgaaaataaaaatctcaagtcaagaatactccttcaaattcatgatgagcttattcttgaagtgccagaggaggagatggaatttactcctttaatggcaaaggaaaaaatggaaaaggtggtagaactttcggttcctcttgtagttgaaatctcggtaggtaaaaatcttgctgaattaaaatgagctataagattggtcgac

SEQ ID NO: 2142 - DNA, 2673 bp, Artificial Sequence
  Description of Artificial Sequence: Synthetic DNA sequence of Dictyoglomus thermophilum DNA V791C
atgaaatacctgctgccgaccgctgctgctggtctgctgctcctcgctgcccagccggcgatggccatggatatcggaattaattcggatccgaaatctctgtgggatctttttcaagaaaataccgagaaagagtccaaaaggaagattctgattattgatggctcaagcctcatatacagggtttattacgcccttccccctttaaagacaaaaaatggtgaattaactaatgctctttatggcttcataagaatacttttaaaggccgtagaagattttaatcctgatcttgtaggcgttgcctttgatagacctgaacctacttttaggcatgtgatttataaagagtataaggctaagagaccacctatgaaggatgatttgaaagcgcagataccatggataagagaatttctaaggttaaatgatatacctctattggaagagcctggctatgaagcggatgatataatagctactatagtgaataaatataaggatgatttaaaatatattctctctggagatttagatcttttgcaattagtctcggacaaaacctttctaatacatcctcaaaagggaattactgagtttactatttatgatccaaaagctgtaaaggataggtttggagtagagccctataagattcccttatacaaagtattagtaggggacgaatctgataatattccaggagtaaatggaataggtcctaaaaaggcctcaaagattcttgagaaaatttcaagtgtagatgaatttaaaagtaaaataaaagttttggatagtgatttaagggagcttattgagaaaaattggaatattattgaaagaaatttagaacttgttactttaaaaaatatagataaggatcttattcttaaacccttcgagattaaaagagatgaaaaagtaatagattttttgaagagatatgaacttaagagtattcttcaaaagttatttcctgatcttcaagaggaagaaaatatagagattaaagatgtcgaagagatcaattttaatgaggtagaaaaagaaggctactttgcctttaaatgtcttggagatagggcttttgagggtatttctctttccttcaaggagggggaaggatattttatatctccttttgatttcaataatgagataagaaagaagattgaaaatataatttcttcagagaatgttaaaaaaattggctcttatattcaaagagatttacattttttaaactgtaaaataaagggcgatgtatttgatgttagtctcgcatcttatcttttgaaccctgaaagacaaaatcactctcttgatattttgataggagagtatctaaataaaacctcttttattcctcaaaaatacgctggttatctttttccgttaaagtctattcttgaggagaggataaagaatgaagggttagaatttgtactttataacatagagattccattaatccctgtactttactccatggagaagtgggggataaaggtagataaggaatatttaaaacagctttctgatgaattctgcgagagaattaaaaaattggaagaagagatatatgaacttgcaggaaccagatttaatctcaattctccaaaacaactttctgaagttttatttgagaggttaaaacttccttctggtaagaaaggaaaaacaggatattctacgtcgtcttctgtgcttcaaaacttaataaatgctcatcctatagtgagaaaaatcctccaatatagagaactctataaattgaagagtacttatgtggatgctattcctaatctggttaatccacaaacaggtagagttcatacaaaatttaatcctacaggtacagctacaggaagaataagtagtagtgaacctaatcttcagaatattcctataaaaagtgaagaaggtagaaagataagaagagccttcgtgtcagaagatggatattttcttgtatctcttgattattctcagatagagctaaggattatggctcatctttctcaggagcctaaattaatatctgccttccaaaaaggagaggatattcatagaagaacagcatcggagatttttggagtgccagaggaagaagttgatgatcttttaaggtcaagggcaaaggccgttaattttggaattatttatggtatctcttcttttggactttctgagactgtaagtattacaccagaagaggcagagaaatttatagactcgtattttaagcactatccaagagtgaagctttttatagataagactattcatgaggcaagagaaaaactgtacgttaaaaccttatttggcagaaaaagatatattcctgagattaagagcataaataaacagtgtaggaatgcctatgaaaggatagcaataaatgcgccaattcagggaacagctgctgatattataaaacttgccatgatagaaatttacaaggagattgaaaataaaaatctcaagtcaagaatactccttcaaattcatgatgagcttattcttgaagtgccagaggaggagatggaatttactcctttaatggcaaaggaaaaaatggaaaaggtggtagaactttcggttcctcttgtagttgaaatctcggtaggtaaaaatcttgctgaattaaaatgagctataagattggtcgac

SEQ ID NO: 2143 - DNA, 2673 bp, Artificial Sequence
  Description of Artificial Sequence: Synthetic DNA sequence of Dictyoglomus thermophilum DNA V791E
atgaaatacctgctgccgaccgctgctgctggtctgctgctcctcgctgcccagccggcgatggccatggatatcggaattaattcggatccgaaatctctgtgggatctttttcaagaaaataccgagaaagagtccaaaaggaagattctgattattgatggctcaagcctcatatacagggtttattacgcccttccccctttaaagacaaaaaatggtgaattaactaatgctctttatggcttcataagaatacttttaaaggccgtagaagattttaatcctgatcttgtaggcgttgcctttgatagacctgaacctacttttaggcatgtgatttataaagagtataaggctaagagaccacctatgaaggatgatttgaaagcgcagataccatggataagagaatttctaaggttaaatgatatacctctattggaagagcctggctatgaagcggatgatataatagctactatagtgaataaatataaggatgatttaaaatatattctctctggagatttagatcttttgcaattagtctcggacaaaacctttctaatacatcctcaaaagggaattactgagtttactatttatgatccaaaagctgtaaaggataggtttggagtagagccctataagattcccttatacaaagtattagtaggggacgaatctgataatattccaggagtaaatggaataggtcctaaaaaggcctcaaagattcttgagaaaatttcaagtgtagatgaatttaaaagtaaaataaaagttttggatagtgatttaagggagcttattgagaaaaattggaatattattgaaagaaatttagaacttgttactttaaaaaatatagataaggatcttattcttaaacccttcgagattaaaagagatgaaaaagtaatagattttttgaagagatatgaacttaagagtattcttcaaaagttatttcctgatcttcaagaggaagaaaatatagagattaaagatgtcgaagagatcaattttaatgaggtagaaaaagaaggctactttgcctttaaatgtcttggagatagggcttttgagggtatttctctttccttcaaggagggggaaggatattttatatctccttttgatttcaataatgagataagaaagaagattgaaaatataatttcttcagagaatgttaaaaaaattggctcttatattcaaagagatttacattttttaaactgtaaaataaagggcgatgtatttgatgttagtctcgcatcttatcttttgaaccctgaaagacaaaatcactctcttgatattttgataggagagtatctaaataaaacctcttttattcctcaaaaatacgctggttatctttttccgttaaagtctattcttgaggagaggataaagaatgaagggttagaatttgtactttataacatagagattccattaatccctgtactttactccatggagaagtgggggataaaggtagataaggaatatttaaaacagctttctgatgaattctgcgagagaattaaaaaattggaagaagagatatatgaacttgcaggaaccagatttaatctcaattctccaaaacaactttctgaagttttatttgagaggttaaaacttccttctggtaagaaaggaaaaacaggatattctacgtcgtcttctgtgcttcaaaacttaataaatgctcatcctatagtgagaaaaatcctccaatatagagaactctataaattgaagagtacttatgtggatgctattcctaatctggttaatccacaaacaggtagagttcatacaaaatttaatcctacaggtacagctacaggaagaataagtagtagtgaacctaatcttcagaatattcctataaaaagtgaagaaggtagaaagataagaagagccttcgtgtcagaagatggatattttcttgtatctcttgattattctcagatagagctaaggattatggctcatctttctcaggagcctaaattaatatctgccttccaaaaaggagaggatattcatagaagaacagcatcggagatttttggagtgccagaggaagaagttgatgatcttttaaggtcaagggcaaaggccgttaattttggaattatttatggtatctcttcttttggactttctgagactgtaagtattacaccagaagaggcagagaaatttatagactcgtattttaagcactatccaagagtgaagctttttatagataagactattcatgaggcaagagaaaaactgtacgttaaaaccttatttggcagaaaaagatatattcctgagattaagagcataaataaacaggaaaggaatgcctatgaaaggatagcaataaatgcgccaattcagggaacagctgctgatattataaaacttgccatgatagaaatttacaaggagattgaaaataaaaatctcaagtcaagaatactccttcaaattcatgatgagcttattcttgaagtgccagaggaggagatggaatttactcctttaatggcaaaggaaaaaatggaaaaggtggtagaactttcggttcctcttgtagttgaaatctcggtaggtaaaaatcttgctgaattaaaatgagctataagattggtcgac

SEQ ID NO: 2144 - DNA, 2673 bp, Artificial Sequence
  Description of Artificial Sequence: Synthetic DNA sequence of Dictyoglomus thermophilum DNA V791Q
atgaaatacctgctgccgaccgctgctgctggtctgctgctcctcgctgcccagccggcgatggccatggatatcggaattaattcggatccgaaatctctgtgggatctttttcaagaaaataccgagaaagagtccaaaaggaagattctgattattgatggctcaagcctcatatacagggtttattacgcccttccccctttaaagacaaaaaatggtgaattaactaatgctctttatggcttcataagaatacttttaaaggccgtagaagattttaatcctgatcttgtaggcgttgcctttgatagacctgaacctacttttaggcatgtgatttataaagagtataaggctaagagaccacctatgaaggatgatttgaaagcgcagataccatggataagagaatttctaaggttaaatgatatacctctattggaagagcctggctatgaagcggatgatataatagctactatagtgaataaatataaggatgatttaaaatatattctctctggagatttagatcttttgcaattagtctcggacaaaacctttctaatacatcctcaaaagggaattactgagtttactatttatgatccaaaagctgtaaaggataggtttggagtagagccctataagattcccttatacaaagtattagtaggggacgaatctgataatattccaggagtaaatggaataggtcctaaaaaggcctcaaagattcttgagaaaatttcaagtgtagatgaatttaaaagtaaaataaaagttttggatagtgatttaagggagcttattgagaaaaattggaatattattgaaagaaatttagaacttgttactttaaaaaatatagataaggatcttattcttaaacccttcgagattaaaagagatgaaaaagtaatagattttttgaagagatatgaacttaagagtattcttcaaaagttatttcctgatcttcaagaggaagaaaatatagagattaaagatgtcgaagagatcaattttaatgaggtagaaaaagaaggctactttgcctttaaatgtcttggagatagggcttttgagggtatttctctttccttcaaggagggggaaggatattttatatctccttttgatttcaataatgagataagaaagaagattgaaaatataatttcttcagagaatgttaaaaaaattggctcttatattcaaagagatttacattttttaaactgtaaaataaagggcgatgtatttgatgttagtctcgcatcttatcttttgaaccctgaaagacaaaatcactctcttgatattttgataggagagtatctaaataaaacctcttttattcctcaaaaatacgctggttatctttttccgttaaagtctattcttgaggagaggataaagaatgaagggttagaatttgtactttataacatagagattccattaatccctgtactttactccatggagaagtgggggataaaggtagataaggaatatttaaaacagctttctgatgaattctgcgagagaattaaaaaattggaagaagagatatatgaacttgcaggaaccagatttaatctcaattctccaaaacaactttctgaagttttatttgagaggttaaaacttccttctggtaagaaaggaaaaacaggatattctacgtcgtcttctgtgcttcaaaacttaataaatgctcatcctatagtgagaaaaatcctccaatatagagaactctataaattgaagagtacttatgtggatgctattcctaatctggttaatccacaaacaggtagagttcatacaaaatttaatcctacaggtacagctacaggaagaataagtagtagtgaacctaatcttcagaatattcctataaaaagtgaagaaggtagaaagataagaagagccttcgtgtcagaagatggatattttcttgtatctcttgattattctcagatagagctaaggattatggctcatctttctcaggagcctaaattaatatctgccttccaaaaaggagaggatattcatagaagaacagcatcggagatttttggagtgccagaggaagaagttgatgatcttttaaggtcaagggcaaaggccgttaattttggaattatttatggtatctcttcttttggactttctgagactgtaagtattacaccagaagaggcagagaaatttatagactcgtattttaagcactatccaagagtgaagctttttatagataagactattcatgaggcaagagaaaaactgtacgttaaaaccttatttggcagaaaaagatatattcctgagattaagagcataaataaacagcaaaggaatgcctatgaaaggatagcaataaatgcgccaattcagggaacagctgctgatattataaaacttgccatgatagaaatttacaaggagattgaaaataaaaatctcaagtcaagaatactccttcaaattcatgatgagcttattcttgaagtgccagaggaggagatggaatttactcctttaatggcaaaggaaaaaatggaaaaggtggtagaactttcggttcctcttgtagttgaaatctcggtaggtaaaaatcttgctgaattaaaatgagctataagattggtcgac

SEQ ID NO: 2145 - DNA, 2673 bp, Artificial Sequence
  Description of Artificial Sequence: Synthetic DNA sequence of Dictyoglomus thermophilum DNA V791G
atgaaatacctgctgccgaccgctgctgctggtctgctgctcctcgctgcccagccggcgatggccatggatatcggaattaattcggatccgaaatctctgtgggatctttttcaagaaaataccgagaaagagtccaaaaggaagattctgattattgatggctcaagcctcatatacagggtttattacgcccttccccctttaaagacaaaaaatggtgaattaactaatgctctttatggcttcataagaatacttttaaaggccgtagaagattttaatcctgatcttgtaggcgttgcctttgatagacctgaacctacttttaggcatgtgatttataaagagtataaggctaagagaccacctatgaaggatgatttgaaagcgcagataccatggataagagaatttctaaggttaaatgatatacctctattggaagagcctggctatgaagcggatgatataatagctactatagtgaataaatataaggatgatttaaaatatattctctctggagatttagatcttttgcaattagtctcggacaaaacctttctaatacatcctcaaaagggaattactgagtttactatttatgatccaaaagctgtaaaggataggtttggagtagagccctataagattcccttatacaaagtattagtaggggacgaatctgataatattccaggagtaaatggaataggtcctaaaaaggcctcaaagattcttgagaaaatttcaagtgtagatgaatttaaaagtaaaataaaagttttggatagtgatttaagggagcttattgagaaaaattggaatattattgaaagaaatttagaacttgttactttaaaaaatatagataaggatcttattcttaaacccttcgagattaaaagagatgaaaaagtaatagattttttgaagagatatgaacttaagagtattcttcaaaagttatttcctgatcttcaagaggaagaaaatatagagattaaagatgtcgaagagatcaattttaatgaggtagaaaaagaaggctactttgcctttaaatgtcttggagatagggcttttgagggtatttctctttccttcaaggagggggaaggatattttatatctccttttgatttcaataatgagataagaaagaagattgaaaatataatttcttcagagaatgttaaaaaaattggctcttatattcaaagagatttacattttttaaactgtaaaataaagggcgatgtatttgatgttagtctcgcatcttatcttttgaaccctgaaagacaaaatcactctcttgatattttgataggagagtatctaaataaaacctcttttattcctcaaaaatacgctggttatctttttccgttaaagtctattcttgaggagaggataaagaatgaagggttagaatttgtactttataacatagagattccattaatccctgtactttactccatggagaagtgggggataaaggtagataaggaatatttaaaacagctttctgatgaattctgcgagagaattaaaaaattggaagaagagatatatgaacttgcaggaaccagatttaatctcaattctccaaaacaactttctgaagttttatttgagaggttaaaacttccttctggtaagaaaggaaaaacaggatattctacgtcgtcttctgtgcttcaaaacttaataaatgctcatcctatagtgagaaaaatcctccaatatagagaactctataaattgaagagtacttatgtggatgctattcctaatctggttaatccacaaacaggtagagttcatacaaaatttaatcctacaggtacagctacaggaagaataagtagtagtgaacctaatcttcagaatattcctataaaaagtgaagaaggtagaaagataagaagagccttcgtgtcagaagatggatattttcttgtatctcttgattattctcagatagagctaaggattatggctcatctttctcaggagcctaaattaatatctgccttccaaaaaggagaggatattcatagaagaacagcatcggagatttttggagtgccagaggaagaagttgatgatcttttaaggtcaagggcaaaggccgttaattttggaattatttatggtatctcttcttttggactttctgagactgtaagtattacaccagaagaggcagagaaatttatagactcgtattttaagcactatccaagagtgaagctttttatagataagactattcatgaggcaagagaaaaactgtacgttaaaaccttatttggcagaaaaagatatattcctgagattaagagcataaataaacagggtaggaatgcctatgaaaggatagcaataaatgcgccaattcagggaacagctgctgatattataaaacttgccatgatagaaatttacaaggagattgaaaataaaaatctcaagtcaagaatactccttcaaattcatgatgagcttattcttgaagtgccagaggaggagatggaatttactcctttaatggcaaaggaaaaaatggaaaaggtggtagaactttcggttcctcttgtagttgaaatctcggtaggtaaaaatcttgctgaattaaaatgagctataagattggtcgac

SEQ ID NO: 2146 - DNA, 2673 bp, Artificial Sequence
  Description of Artificial Sequence: Synthetic DNA sequence of Dictyoglomus thermophilum DNA V791H
atgaaatacctgctgccgaccgctgctgctggtctgctgctcctcgctgcccagccggcgatggccatggatatcggaattaattcggatccgaaatctctgtgggatctttttcaagaaaataccgagaaagagtccaaaaggaagattctgattattgatggctcaagcctcatatacagggtttattacgcccttccccctttaaagacaaaaaatggtgaattaactaatgctctttatggcttcataagaatacttttaaaggccgtagaagattttaatcctgatcttgtaggcgttgcctttgatagacctgaacctacttttaggcatgtgatttataaagagtataaggctaagagaccacctatgaaggatgatttgaaagcgcagataccatggataagagaatttctaaggttaaatgatatacctctattggaagagcctggctatgaagcggatgatataatagctactatagtgaataaatataaggatgatttaaaatatattctctctggagatttagatcttttgcaattagtctcggacaaaacctttctaatacatcctcaaaagggaattactgagtttactatttatgatccaaaagctgtaaaggataggtttggagtagagccctataagattcccttatacaaagtattagtaggggacgaatctgataatattccaggagtaaatggaataggtcctaaaaaggcctcaaagattcttgagaaaatttcaagtgtagatgaatttaaaagtaaaataaaagttttggatagtgatttaagggagcttattgagaaaaattggaatattattgaaagaaatttagaacttgttactttaaaaaatatagataaggatcttattcttaaacccttcgagattaaaagagatgaaaaagtaatagattttttgaagagatatgaacttaagagtattcttcaaaagttatttcctgatcttcaagaggaagaaaatatagagattaaagatgtcgaagagatcaattttaatgaggtagaaaaagaaggctactttgcctttaaatgtcttggagatagggcttttgagggtatttctctttccttcaaggagggggaaggatattttatatctccttttgatttcaataatgagataagaaagaagattgaaaatataatttcttcagagaatgttaaaaaaattggctcttatattcaaagagatttacattttttaaactgtaaaataaagggcgatgtatttgatgttagtctcgcatcttatcttttgaaccctgaaagacaaaatcactctcttgatattttgataggagagtatctaaataaaacctcttttattcctcaaaaatacgctggttatctttttccgttaaagtctattcttgaggagaggataaagaatgaagggttagaatttgtactttataacatagagattccattaatccctgtactttactccatggagaagtgggggataaaggtagataaggaatatttaaaacagctttctgatgaattctgcgagagaattaaaaaattggaagaagagatatatgaacttgcaggaaccagatttaatctcaattctccaaaacaactttctgaagttttatttgagaggttaaaacttccttctggtaagaaaggaaaaacaggatattctacgtcgtcttctgtgcttcaaaacttaataaatgctcatcctatagtgagaaaaatcctccaatatagagaactctataaattgaagagtacttatgtggatgctattcctaatctggttaatccacaaacaggtagagttcatacaaaatttaatcctacaggtacagctacaggaagaataagtagtagtgaacctaatcttcagaatattcctataaaaagtgaagaaggtagaaagataagaagagccttcgtgtcagaagatggatattttcttgtatctcttgattattctcagatagagctaaggattatggctcatctttctcaggagcctaaattaatatctgccttccaaaaaggagaggatattcatagaagaacagcatcggagatttttggagtgccagaggaagaagttgatgatcttttaaggtcaagggcaaaggccgttaattttggaattatttatggtatctcttcttttggactttctgagactgtaagtattacaccagaagaggcagagaaatttatagactcgtattttaagcactatccaagagtgaagctttttatagataagactattcatgaggcaagagaaaaactgtacgttaaaaccttatttggcagaaaaagatatattcctgagattaagagcataaataaacagcataggaatgcctatgaaaggatagcaataaatgcgccaattcagggaacagctgctgatattataaaacttgccatgatagaaatttacaaggagattgaaaataaaaatctcaagtcaagaatactccttcaaattcatgatgagcttattcttgaagtgccagaggaggagatggaatttactcctttaatggcaaaggaaaaaatggaaaaggtggtagaactttcggttcctcttgtagttgaaatctcggtaggtaaaaatcttgctgaattaaaatgagctataagattggtcgac

SEQ ID NO: 2147 - DNA, 2673 bp, Artificial Sequence
  Description of Artificial Sequence: Synthetic DNA sequence of Dictyoglomus thermophilum DNA V791I
atgaaatacctgctgccgaccgctgctgctggtctgctgctcctcgctgcccagccggcgatggccatggatatcggaattaattcggatccgaaatctctgtgggatctttttcaagaaaataccgagaaagagtccaaaaggaagattctgattattgatggctcaagcctcatatacagggtttattacgcccttccccctttaaagacaaaaaatggtgaattaactaatgctctttatggcttcataagaatacttttaaaggccgtagaagattttaatcctgatcttgtaggcgttgcctttgatagacctgaacctacttttaggcatgtgatttataaagagtataaggctaagagaccacctatgaaggatgatttgaaagcgcagataccatggataagagaatttctaaggttaaatgatatacctctattggaagagcctggctatgaagcggatgatataatagctactatagtgaataaatataaggatgatttaaaatatattctctctggagatttagatcttttgcaattagtctcggacaaaacctttctaatacatcctcaaaagggaattactgagtttactatttatgatccaaaagctgtaaaggataggtttggagtagagccctataagattcccttatacaaagtattagtaggggacgaatctgataatattccaggagtaaatggaataggtcctaaaaaggcctcaaagattcttgagaaaatttcaagtgtagatgaatttaaaagtaaaataaaagttttggatagtgatttaagggagcttattgagaaaaattggaatattattgaaagaaatttagaacttgttactttaaaaaatatagataaggatcttattcttaaacccttcgagattaaaagagatgaaaaagtaatagattttttgaagagatatgaacttaagagtattcttcaaaagttatttcctgatcttcaagaggaagaaaatatagagattaaagatgtcgaagagatcaattttaatgaggtagaaaaagaaggctactttgcctttaaatgtcttggagatagggcttttgagggtatttctctttccttcaaggagggggaaggatattttatatctccttttgatttcaataatgagataagaaagaagattgaaaatataatttcttcagagaatgttaaaaaaattggctcttatattcaaagagatttacattttttaaactgtaaaataaagggcgatgtatttgatgttagtctcgcatcttatcttttgaaccctgaaagacaaaatcactctcttgatattttgataggagagtatctaaataaaacctcttttattcctcaaaaatacgctggttatctttttccgttaaagtctattcttgaggagaggataaagaatgaagggttagaatttgtactttataacatagagattccattaatccctgtactttactccatggagaagtgggggataaaggtagataaggaatatttaaaacagctttctgatgaattctgcgagagaattaaaaaattggaagaagagatatatgaacttgcaggaaccagatttaatctcaattctccaaaacaactttctgaagttttatttgagaggttaaaacttccttctggtaagaaaggaaaaacaggatattctacgtcgtcttctgtgcttcaaaacttaataaatgctcatcctatagtgagaaaaatcctccaatatagagaactctataaattgaagagtacttatgtggatgctattcctaatctggttaatccacaaacaggtagagttcatacaaaatttaatcctacaggtacagctacaggaagaataagtagtagtgaacctaatcttcagaatattcctataaaaagtgaagaaggtagaaagataagaagagccttcgtgtcagaagatggatattttcttgtatctcttgattattctcagatagagctaaggattatggctcatctttctcaggagcctaaattaatatctgccttccaaaaaggagaggatattcatagaagaacagcatcggagatttttggagtgccagaggaagaagttgatgatcttttaaggtcaagggcaaaggccgttaattttggaattatttatggtatctcttcttttggactttctgagactgtaagtattacaccagaagaggcagagaaatttatagactcgtattttaagcactatccaagagtgaagctttttatagataagactattcatgaggcaagagaaaaactgtacgttaaaaccttatttggcagaaaaagatatattcctgagattaagagcataaataaacagattaggaatgcctatgaaaggatagcaataaatgcgccaattcagggaacagctgctgatattataaaacttgccatgatagaaatttacaaggagattgaaaataaaaatctcaagtcaagaatactccttcaaattcatgatgagcttattcttgaagtgccagaggaggagatggaatttactcctttaatggcaaaggaaaaaatggaaaaggtggtagaactttcggttcctcttgtagttgaaatctcggtaggtaaaaatcttgctgaattaaaatgagctataagattggtcgac

SEQ ID NO: 2148 - DNA, 2673 bp, Artificial Sequence
  Description of Artificial Sequence: Synthetic DNA sequence of Dictyoglomus thermophilum DNA V791L
atgaaatacctgctgccgaccgctgctgctggtctgctgctcctcgctgcccagccggcgatggccatggatatcggaattaattcggatccgaaatctctgtgggatctttttcaagaaaataccgagaaagagtccaaaaggaagattctgattattgatggctcaagcctcatatacagggtttattacgcccttccccctttaaagacaaaaaatggtgaattaactaatgctctttatggcttcataagaatacttttaaaggccgtagaagattttaatcctgatcttgtaggcgttgcctttgatagacctgaacctacttttaggcatgtgatttataaagagtataaggctaagagaccacctatgaaggatgatttgaaagcgcagataccatggataagagaatttctaaggttaaatgatatacctctattggaagagcctggctatgaagcggatgatataatagctactatagtgaataaatataaggatgatttaaaatatattctctctggagatttagatcttttgcaattagtctcggacaaaacctttctaatacatcctcaaaagggaattactgagtttactatttatgatccaaaagctgtaaaggataggtttggagtagagccctataagattcccttatacaaagtattagtaggggacgaatctgataatattccaggagtaaatggaataggtcctaaaaaggcctcaaagattcttgagaaaatttcaagtgtagatgaatttaaaagtaaaataaaagttttggatagtgatttaagggagcttattgagaaaaattggaatattattgaaagaaatttagaacttgttactttaaaaaatatagataaggatcttattcttaaacccttcgagattaaaagagatgaaaaagtaatagattttttgaagagatatgaacttaagagtattcttcaaaagttatttcctgatcttcaagaggaagaaaatatagagattaaagatgtcgaagagatcaattttaatgaggtagaaaaagaaggctactttgcctttaaatgtcttggagatagggcttttgagggtatttctctttccttcaaggagggggaaggatattttatatctccttttgatttcaataatgagataagaaagaagattgaaaatataatttcttcagagaatgttaaaaaaattggctcttatattcaaagagatttacattttttaaactgtaaaataaagggcgatgtatttgatgttagtctcgcatcttatcttttgaaccctgaaagacaaaatcactctcttgatattttgataggagagtatctaaataaaacctcttttattcctcaaaaatacgctggttatctttttccgttaaagtctattcttgaggagaggataaagaatgaagggttagaatttgtactttataacatagagattccattaatccctgtactttactccatggagaagtgggggataaaggtagataaggaatatttaaaacagctttctgatgaattctgcgagagaattaaaaaattggaagaagagatatatgaacttgcaggaaccagatttaatctcaattctccaaaacaactttctgaagttttatttgagaggttaaaacttccttctggtaagaaaggaaaaacaggatattctacgtcgtcttctgtgcttcaaaacttaataaatgctcatcctatagtgagaaaaatcctccaatatagagaactctataaattgaagagtacttatgtggatgctattcctaatctggttaatccacaaacaggtagagttcatacaaaatttaatcctacaggtacagctacaggaagaataagtagtagtgaacctaatcttcagaatattcctataaaaagtgaagaaggtagaaagataagaagagccttcgtgtcagaagatggatattttcttgtatctcttgattattctcagatagagctaaggattatggctcatctttctcaggagcctaaattaatatctgccttccaaaaaggagaggatattcatagaagaacagcatcggagatttttggagtgccagaggaagaagttgatgatcttttaaggtcaagggcaaaggccgttaattttggaattatttatggtatctcttcttttggactttctgagactgtaagtattacaccagaagaggcagagaaatttatagactcgtattttaagcactatccaagagtgaagctttttatagataagactattcatgaggcaagagaaaaactgtacgttaaaaccttatttggcagaaaaagatatattcctgagattaagagcataaataaacagcttaggaatgcctatgaaaggatagcaataaatgcgccaattcagggaacagctgctgatattataaaacttgccatgatagaaatttacaaggagattgaaaataaaaatctcaagtcaagaatactccttcaaattcatgatgagcttattcttgaagtgccagaggaggagatggaatttactcctttaatggcaaaggaaaaaatggaaaaggtggtagaactttcggttcctcttgtagttgaaatctcggtaggtaaaaatcttgctgaattaaaatgagctataagattggtcgac

SEQ ID NO: 2149 - DNA, 2673 bp, Artificial Sequence
  Description of Artificial Sequence: Synthetic DNA sequence of Dictyoglomus thermophilum DNA V791K
atgaaatacctgctgccgaccgctgctgctggtctgctgctcctcgctgcccagccggcgatggccatggatatcggaattaattcggatccgaaatctctgtgggatctttttcaagaaaataccgagaaagagtccaaaaggaagattctgattattgatggctcaagcctcatatacagggtttattacgcccttccccctttaaagacaaaaaatggtgaattaactaatgctctttatggcttcataagaatacttttaaaggccgtagaagattttaatcctgatcttgtaggcgttgcctttgatagacctgaacctacttttaggcatgtgatttataaagagtataaggctaagagaccacctatgaaggatgatttgaaagcgcagataccatggataagagaatttctaaggttaaatgatatacctctattggaagagcctggctatgaagcggatgatataatagctactatagtgaataaatataaggatgatttaaaatatattctctctggagatttagatcttttgcaattagtctcggacaaaacctttctaatacatcctcaaaagggaattactgagtttactatttatgatccaaaagctgtaaaggataggtttggagtagagccctataagattcccttatacaaagtattagtaggggacgaatctgataatattccaggagtaaatggaataggtcctaaaaaggcctcaaagattcttgagaaaatttcaagtgtagatgaatttaaaagtaaaataaaagttttggatagtgatttaagggagcttattgagaaaaattggaatattattgaaagaaatttagaacttgttactttaaaaaatatagataaggatcttattcttaaacccttcgagattaaaagagatgaaaaagtaatagattttttgaagagatatgaacttaagagtattcttcaaaagttatttcctgatcttcaagaggaagaaaatatagagattaaagatgtcgaagagatcaattttaatgaggtagaaaaagaaggctactttgcctttaaatgtcttggagatagggcttttgagggtatttctctttccttcaaggagggggaaggatattttatatctccttttgatttcaataatgagataagaaagaagattgaaaatataatttcttcagagaatgttaaaaaaattggctcttatattcaaagagatttacattttttaaactgtaaaataaagggcgatgtatttgatgttagtctcgcatcttatcttttgaaccctgaaagacaaaatcactctcttgatattttgataggagagtatctaaataaaacctcttttattcctcaaaaatacgctggttatctttttccgttaaagtctattcttgaggagaggataaagaatgaagggttagaatttgtactttataacatagagattccattaatccctgtactttactccatggagaagtgggggataaaggtagataaggaatatttaaaacagctttctgatgaattctgcgagagaattaaaaaattggaagaagagatatatgaacttgcaggaaccagatttaatctcaattctccaaaacaactttctgaagttttatttgagaggttaaaacttccttctggtaagaaaggaaaaacaggatattctacgtcgtcttctgtgcttcaaaacttaataaatgctcatcctatagtgagaaaaatcctccaatatagagaactctataaattgaagagtacttatgtggatgctattcctaatctggttaatccacaaacaggtagagttcatacaaaatttaatcctacaggtacagctacaggaagaataagtagtagtgaacctaatcttcagaatattcctataaaaagtgaagaaggtagaaagataagaagagccttcgtgtcagaagatggatattttcttgtatctcttgattattctcagatagagctaaggattatggctcatctttctcaggagcctaaattaatatctgccttccaaaaaggagaggatattcatagaagaacagcatcggagatttttggagtgccagaggaagaagttgatgatcttttaaggtcaagggcaaaggccgttaattttggaattatttatggtatctcttcttttggactttctgagactgtaagtattacaccagaagaggcagagaaatttatagactcgtattttaagcactatccaagagtgaagctttttatagataagactattcatgaggcaagagaaaaactgtacgttaaaaccttatttggcagaaaaagatatattcctgagattaagagcataaataaacagaaaaggaatgcctatgaaaggatagcaataaatgcgccaattcagggaacagctgctgatattataaaacttgccatgatagaaatttacaaggagattgaaaataaaaatctcaagtcaagaatactccttcaaattcatgatgagcttattcttgaagtgccagaggaggagatggaatttactcctttaatggcaaaggaaaaaatggaaaaggtggtagaactttcggttcctcttgtagttgaaatctcggtaggtaaaaatcttgctgaattaaaatgagctataagattggtcgac

SEQ ID NO: 2150 - DNA, 2673 bp, Artificial Sequence
  Description of Artificial Sequence: Synthetic DNA sequence of Dictyoglomus thermophilum DNA V791M
atgaaatacctgctgccgaccgctgctgctggtctgctgctcctcgctgcccagccggcgatggccatggatatcggaattaattcggatccgaaatctctgtgggatctttttcaagaaaataccgagaaagagtccaaaaggaagattctgattattgatggctcaagcctcatatacagggtttattacgcccttccccctttaaagacaaaaaatggtgaattaactaatgctctttatggcttcataagaatacttttaaaggccgtagaagattttaatcctgatcttgtaggcgttgcctttgatagacctgaacctacttttaggcatgtgatttataaagagtataaggctaagagaccacctatgaaggatgatttgaaagcgcagataccatggataagagaatttctaaggttaaatgatatacctctattggaagagcctggctatgaagcggatgatataatagctactatagtgaataaatataaggatgatttaaaatatattctctctggagatttagatcttttgcaattagtctcggacaaaacctttctaatacatcctcaaaagggaattactgagtttactatttatgatccaaaagctgtaaaggataggtttggagtagagccctataagattcccttatacaaagtattagtaggggacgaatctgataatattccaggagtaaatggaataggtcctaaaaaggcctcaaagattcttgagaaaatttcaagtgtagatgaatttaaaagtaaaataaaagttttggatagtgatttaagggagcttattgagaaaaattggaatattattgaaagaaatttagaacttgttactttaaaaaatatagataaggatcttattcttaaacccttcgagattaaaagagatgaaaaagtaatagattttttgaagagatatgaacttaagagtattcttcaaaagttatttcctgatcttcaagaggaagaaaatatagagattaaagatgtcgaagagatcaattttaatgaggtagaaaaagaaggctactttgcctttaaatgtcttggagatagggcttttgagggtatttctctttccttcaaggagggggaaggatattttatatctccttttgatttcaataatgagataagaaagaagattgaaaatataatttcttcagagaatgttaaaaaaattggctcttatattcaaagagatttacattttttaaactgtaaaataaagggcgatgtatttgatgttagtctcgcatcttatcttttgaaccctgaaagacaaaatcactctcttgatattttgataggagagtatctaaataaaacctcttttattcctcaaaaatacgctggttatctttttccgttaaagtctattcttgaggagaggataaagaatgaagggttagaatttgtactttataacatagagattccattaatccctgtactttactccatggagaagtgggggataaaggtagataaggaatatttaaaacagctttctgatgaattctgcgagagaattaaaaaattggaagaagagatatatgaacttgcaggaaccagatttaatctcaattctccaaaacaactttctgaagttttatttgagaggttaaaacttccttctggtaagaaaggaaaaacaggatattctacgtcgtcttctgtgcttcaaaacttaataaatgctcatcctatagtgagaaaaatcctccaatatagagaactctataaattgaagagtacttatgtggatgctattcctaatctggttaatccacaaacaggtagagttcatacaaaatttaatcctacaggtacagctacaggaagaataagtagtagtgaacctaatcttcagaatattcctataaaaagtgaagaaggtagaaagataagaagagccttcgtgtcagaagatggatattttcttgtatctcttgattattctcagatagagctaaggattatggctcatctttctcaggagcctaaattaatatctgccttccaaaaaggagaggatattcatagaagaacagcatcggagatttttggagtgccagaggaagaagttgatgatcttttaaggtcaagggcaaaggccgttaattttggaattatttatggtatctcttcttttggactttctgagactgtaagtattacaccagaagaggcagagaaatttatagactcgtattttaagcactatccaagagtgaagctttttatagataagactattcatgaggcaagagaaaaactgtacgttaaaaccttatttggcagaaaaagatatattcctgagattaagagcataaataaacagatgaggaatgcctatgaaaggatagcaataaatgcgccaattcagggaacagctgctgatattataaaacttgccatgatagaaatttacaaggagattgaaaataaaaatctcaagtcaagaatactccttcaaattcatgatgagcttattcttgaagtgccagaggaggagatggaatttactcctttaatggcaaaggaaaaaatggaaaaggtggtagaactttcggttcctcttgtagttgaaatctcggtaggtaaaaatcttgctgaattaaaatgagctataagattggtcgac

SEQ ID NO: 2151 - DNA, 2673 bp, Artificial Sequence
  Description of Artificial Sequence: Synthetic DNA sequence of Dictyoglomus thermophilum DNA V791F
atgaaatacctgctgccgaccgctgctgctggtctgctgctcctcgctgcccagccggcgatggccatggatatcggaattaattcggatccgaaatctctgtgggatctttttcaagaaaataccgagaaagagtccaaaaggaagattctgattattgatggctcaagcctcatatacagggtttattacgcccttccccctttaaagacaaaaaatggtgaattaactaatgctctttatggcttcataagaatacttttaaaggccgtagaagattttaatcctgatcttgtaggcgttgcctttgatagacctgaacctacttttaggcatgtgatttataaagagtataaggctaagagaccacctatgaaggatgatttgaaagcgcagataccatggataagagaatttctaaggttaaatgatatacctctattggaagagcctggctatgaagcggatgatataatagctactatagtgaataaatataaggatgatttaaaatatattctctctggagatttagatcttttgcaattagtctcggacaaaacctttctaatacatcctcaaaagggaattactgagtttactatttatgatccaaaagctgtaaaggataggtttggagtagagccctataagattcccttatacaaagtattagtaggggacgaatctgataatattccaggagtaaatggaataggtcctaaaaaggcctcaaagattcttgagaaaatttcaagtgtagatgaatttaaaagtaaaataaaagttttggatagtgatttaagggagcttattgagaaaaattggaatattattgaaagaaatttagaacttgttactttaaaaaatatagataaggatcttattcttaaacccttcgagattaaaagagatgaaaaagtaatagattttttgaagagatatgaacttaagagtattcttcaaaagttatttcctgatcttcaagaggaagaaaatatagagattaaagatgtcgaagagatcaattttaatgaggtagaaaaagaaggctactttgcctttaaatgtcttggagatagggcttttgagggtatttctctttccttcaaggagggggaaggatattttatatctccttttgatttcaataatgagataagaaagaagattgaaaatataatttcttcagagaatgttaaaaaaattggctcttatattcaaagagatttacattttttaaactgtaaaataaagggcgatgtatttgatgttagtctcgcatcttatcttttgaaccctgaaagacaaaatcactctcttgatattttgataggagagtatctaaataaaacctcttttattcctcaaaaatacgctggttatctttttccgttaaagtctattcttgaggagaggataaagaatgaagggttagaatttgtactttataacatagagattccattaatccctgtactttactccatggagaagtgggggataaaggtagataaggaatatttaaaacagctttctgatgaattctgcgagagaattaaaaaattggaagaagagatatatgaacttgcaggaaccagatttaatctcaattctccaaaacaactttctgaagttttatttgagaggttaaaacttccttctggtaagaaaggaaaaacaggatattctacgtcgtcttctgtgcttcaaaacttaataaatgctcatcctatagtgagaaaaatcctccaatatagagaactctataaattgaagagtacttatgtggatgctattcctaatctggttaatccacaaacaggtagagttcatacaaaatttaatcctacaggtacagctacaggaagaataagtagtagtgaacctaatcttcagaatattcctataaaaagtgaagaaggtagaaagataagaagagccttcgtgtcagaagatggatattttcttgtatctcttgattattctcagatagagctaaggattatggctcatctttctcaggagcctaaattaatatctgccttccaaaaaggagaggatattcatagaagaacagcatcggagatttttggagtgccagaggaagaagttgatgatcttttaaggtcaagggcaaaggccgttaattttggaattatttatggtatctcttcttttggactttctgagactgtaagtattacaccagaagaggcagagaaatttatagactcgtattttaagcactatccaagagtgaagctttttatagataagactattcatgaggcaagagaaaaactgtacgttaaaaccttatttggcagaaaaagatatattcctgagattaagagcataaataaacagtttaggaatgcctatgaaaggatagcaataaatgcgccaattcagggaacagctgctgatattataaaacttgccatgatagaaatttacaaggagattgaaaataaaaatctcaagtcaagaatactccttcaaattcatgatgagcttattcttgaagtgccagaggaggagatggaatttactcctttaatggcaaaggaaaaaatggaaaaggtggtagaactttcggttcctcttgtagttgaaatctcggtaggtaaaaatcttgctgaattaaaatgagctataagattggtcgac

SEQ ID NO: 2152 - DNA, 2673 bp, Artificial Sequence
  Description of Artificial Sequence: Synthetic DNA sequence of Dictyoglomus thermophilum DNA V791P
atgaaatacctgctgccgaccgctgctgctggtctgctgctcctcgctgcccagccggcgatggccatggatatcggaattaattcggatccgaaatctctgtgggatctttttcaagaaaataccgagaaagagtccaaaaggaagattctgattattgatggctcaagcctcatatacagggtttattacgcccttccccctttaaagacaaaaaatggtgaattaactaatgctctttatggcttcataagaatacttttaaaggccgtagaagattttaatcctgatcttgtaggcgttgcctttgatagacctgaacctacttttaggcatgtgatttataaagagtataaggctaagagaccacctatgaaggatgatttgaaagcgcagataccatggataagagaatttctaaggttaaatgatatacctctattggaagagcctggctatgaagcggatgatataatagctactatagtgaataaatataaggatgatttaaaatatattctctctggagatttagatcttttgcaattagtctcggacaaaacctttctaatacatcctcaaaagggaattactgagtttactatttatgatccaaaagctgtaaaggataggtttggagtagagccctataagattcccttatacaaagtattagtaggggacgaatctgataatattccaggagtaaatggaataggtcctaaaaaggcctcaaagattcttgagaaaatttcaagtgtagatgaatttaaaagtaaaataaaagttttggatagtgatttaagggagcttattgagaaaaattggaatattattgaaagaaatttagaacttgttactttaaaaaatatagataaggatcttattcttaaacccttcgagattaaaagagatgaaaaagtaatagattttttgaagagatatgaacttaagagtattcttcaaaagttatttcctgatcttcaagaggaagaaaatatagagattaaagatgtcgaagagatcaattttaatgaggtagaaaaagaaggctactttgcctttaaatgtcttggagatagggcttttgagggtatttctctttccttcaaggagggggaaggatattttatatctccttttgatttcaataatgagataagaaagaagattgaaaatataatttcttcagagaatgttaaaaaaattggctcttatattcaaagagatttacattttttaaactgtaaaataaagggcgatgtatttgatgttagtctcgcatcttatcttttgaaccctgaaagacaaaatcactctcttgatattttgataggagagtatctaaataaaacctcttttattcctcaaaaatacgctggttatctttttccgttaaagtctattcttgaggagaggataaagaatgaagggttagaatttgtactttataacatagagattccattaatccctgtactttactccatggagaagtgggggataaaggtagataaggaatatttaaaacagctttctgatgaattctgcgagagaattaaaaaattggaagaagagatatatgaacttgcaggaaccagatttaatctcaattctccaaaacaactttctgaagttttatttgagaggttaaaacttccttctggtaagaaaggaaaaacaggatattctacgtcgtcttctgtgcttcaaaacttaataaatgctcatcctatagtgagaaaaatcctccaatatagagaactctataaattgaagagtacttatgtggatgctattcctaatctggttaatccacaaacaggtagagttcatacaaaatttaatcctacaggtacagctacaggaagaataagtagtagtgaacctaatcttcagaatattcctataaaaagtgaagaaggtagaaagataagaagagccttcgtgtcagaagatggatattttcttgtatctcttgattattctcagatagagctaaggattatggctcatctttctcaggagcctaaattaatatctgccttccaaaaaggagaggatattcatagaagaacagcatcggagatttttggagtgccagaggaagaagttgatgatcttttaaggtcaagggcaaaggccgttaattttggaattatttatggtatctcttcttttggactttctgagactgtaagtattacaccagaagaggcagagaaatttatagactcgtattttaagcactatccaagagtgaagctttttatagataagactattcatgaggcaagagaaaaactgtacgttaaaaccttatttggcagaaaaagatatattcctgagattaagagcataaataaacagcctaggaatgcctatgaaaggatagcaataaatgcgccaattcagggaacagctgctgatattataaaacttgccatgatagaaatttacaaggagattgaaaataaaaatctcaagtcaagaatactccttcaaattcatgatgagcttattcttgaagtgccagaggaggagatggaatttactcctttaatggcaaaggaaaaaatggaaaaggtggtagaactttcggttcctcttgtagttgaaatctcggtaggtaaaaatcttgctgaattaaaatgagctataagattggtcgac

SEQ ID NO: 2153 - DNA, 2673 bp, Artificial Sequence
  Description of Artificial Sequence: Synthetic DNA sequence of Dictyoglomus thermophilum DNA V791S
atgaaatacctgctgccgaccgctgctgctggtctgctgctcctcgctgcccagccggcgatggccatggatatcggaattaattcggatccgaaatctctgtgggatctttttcaagaaaataccgagaaagagtccaaaaggaagattctgattattgatggctcaagcctcatatacagggtttattacgcccttccccctttaaagacaaaaaatggtgaattaactaatgctctttatggcttcataagaatacttttaaaggccgtagaagattttaatcctgatcttgtaggcgttgcctttgatagacctgaacctacttttaggcatgtgatttataaagagtataaggctaagagaccacctatgaaggatgatttgaaagcgcagataccatggataagagaatttctaaggttaaatgatatacctctattggaagagcctggctatgaagcggatgatataatagctactatagtgaataaatataaggatgatttaaaatatattctctctggagatttagatcttttgcaattagtctcggacaaaacctttctaatacatcctcaaaagggaattactgagtttactatttatgatccaaaagctgtaaaggataggtttggagtagagccctataagattcccttatacaaagtattagtaggggacgaatctgataatattccaggagtaaatggaataggtcctaaaaaggcctcaaagattcttgagaaaatttcaagtgtagatgaatttaaaagtaaaataaaagttttggatagtgatttaagggagcttattgagaaaaattggaatattattgaaagaaatttagaacttgttactttaaaaaatatagataaggatcttattcttaaacccttcgagattaaaagagatgaaaaagtaatagattttttgaagagatatgaacttaagagtattcttcaaaagttatttcctgatcttcaagaggaagaaaatatagagattaaagatgtcgaagagatcaattttaatgaggtagaaaaagaaggctactttgcctttaaatgtcttggagatagggcttttgagggtatttctctttccttcaaggagggggaaggatattttatatctccttttgatttcaataatgagataagaaagaagattgaaaatataatttcttcagagaatgttaaaaaaattggctcttatattcaaagagatttacattttttaaactgtaaaataaagggcgatgtatttgatgttagtctcgcatcttatcttttgaaccctgaaagacaaaatcactctcttgatattttgataggagagtatctaaataaaacctcttttattcctcaaaaatacgctggttatctttttccgttaaagtctattcttgaggagaggataaagaatgaagggttagaatttgtactttataacatagagattccattaatccctgtactttactccatggagaagtgggggataaaggtagataaggaatatttaaaacagctttctgatgaattctgcgagagaattaaaaaattggaagaagagatatatgaacttgcaggaaccagatttaatctcaattctccaaaacaactttctgaagttttatttgagaggttaaaacttccttctggtaagaaaggaaaaacaggatattctacgtcgtcttctgtgcttcaaaacttaataaatgctcatcctatagtgagaaaaatcctccaatatagagaactctataaattgaagagtacttatgtggatgctattcctaatctggttaatccacaaacaggtagagttcatacaaaatttaatcctacaggtacagctacaggaagaataagtagtagtgaacctaatcttcagaatattcctataaaaagtgaagaaggtagaaagataagaagagccttcgtgtcagaagatggatattttcttgtatctcttgattattctcagatagagctaaggattatggctcatctttctcaggagcctaaattaatatctgccttccaaaaaggagaggatattcatagaagaacagcatcggagatttttggagtgccagaggaagaagttgatgatcttttaaggtcaagggcaaaggccgttaattttggaattatttatggtatctcttcttttggactttctgagactgtaagtattacaccagaagaggcagagaaatttatagactcgtattttaagcactatccaagagtgaagctttttatagataagactattcatgaggcaagagaaaaactgtacgttaaaaccttatttggcagaaaaagatatattcctgagattaagagcataaataaacagtctaggaatgcctatgaaaggatagcaataaatgcgccaattcagggaacagctgctgatattataaaacttgccatgatagaaatttacaaggagattgaaaataaaaatctcaagtcaagaatactccttcaaattcatgatgagcttattcttgaagtgccagaggaggagatggaatttactcctttaatggcaaaggaaaaaatggaaaaggtggtagaactttcggttcctcttgtagttgaaatctcggtaggtaaaaatcttgctgaattaaaatgagctataagattggtcgac

SEQ ID NO: 2154 - DNA, 2673 bp, Artificial Sequence
  Description of Artificial Sequence: Synthetic DNA sequence of Dictyoglomus thermophilum DNA V791T
atgaaatacctgctgccgaccgctgctgctggtctgctgctcctcgctgcccagccggcgatggccatggatatcggaattaattcggatccgaaatctctgtgggatctttttcaagaaaataccgagaaagagtccaaaaggaagattctgattattgatggctcaagcctcatatacagggtttattacgcccttccccctttaaagacaaaaaatggtgaattaactaatgctctttatggcttcataagaatacttttaaaggccgtagaagattttaatcctgatcttgtaggcgttgcctttgatagacctgaacctacttttaggcatgtgatttataaagagtataaggctaagagaccacctatgaaggatgatttgaaagcgcagataccatggataagagaatttctaaggttaaatgatatacctctattggaagagcctggctatgaagcggatgatataatagctactatagtgaataaatataaggatgatttaaaatatattctctctggagatttagatcttttgcaattagtctcggacaaaacctttctaatacatcctcaaaagggaattactgagtttactatttatgatccaaaagctgtaaaggataggtttggagtagagccctataagattcccttatacaaagtattagtaggggacgaatctgataatattccaggagtaaatggaataggtcctaaaaaggcctcaaagattcttgagaaaatttcaagtgtagatgaatttaaaagtaaaataaaagttttggatagtgatttaagggagcttattgagaaaaattggaatattattgaaagaaatttagaacttgttactttaaaaaatatagataaggatcttattcttaaacccttcgagattaaaagagatgaaaaagtaatagattttttgaagagatatgaacttaagagtattcttcaaaagttatttcctgatcttcaagaggaagaaaatatagagattaaagatgtcgaagagatcaattttaatgaggtagaaaaagaaggctactttgcctttaaatgtcttggagatagggcttttgagggtatttctctttccttcaaggagggggaaggatattttatatctccttttgatttcaataatgagataagaaagaagattgaaaatataatttcttcagagaatgttaaaaaaattggctcttatattcaaagagatttacattttttaaactgtaaaataaagggcgatgtatttgatgttagtctcgcatcttatcttttgaaccctgaaagacaaaatcactctcttgatattttgataggagagtatctaaataaaacctcttttattcctcaaaaatacgctggttatctttttccgttaaagtctattcttgaggagaggataaagaatgaagggttagaatttgtactttataacatagagattccattaatccctgtactttactccatggagaagtgggggataaaggtagataaggaatatttaaaacagctttctgatgaattctgcgagagaattaaaaaattggaagaagagatatatgaacttgcaggaaccagatttaatctcaattctccaaaacaactttctgaagttttatttgagaggttaaaacttccttctggtaagaaaggaaaaacaggatattctacgtcgtcttctgtgcttcaaaacttaataaatgctcatcctatagtgagaaaaatcctccaatatagagaactctataaattgaagagtacttatgtggatgctattcctaatctggttaatccacaaacaggtagagttcatacaaaatttaatcctacaggtacagctacaggaagaataagtagtagtgaacctaatcttcagaatattcctataaaaagtgaagaaggtagaaagataagaagagccttcgtgtcagaagatggatattttcttgtatctcttgattattctcagatagagctaaggattatggctcatctttctcaggagcctaaattaatatctgccttccaaaaaggagaggatattcatagaagaacagcatcggagatttttggagtgccagaggaagaagttgatgatcttttaaggtcaagggcaaaggccgttaattttggaattatttatggtatctcttcttttggactttctgagactgtaagtattacaccagaagaggcagagaaatttatagactcgtattttaagcactatccaagagtgaagctttttatagataagactattcatgaggcaagagaaaaactgtacgttaaaaccttatttggcagaaaaagatatattcctgagattaagagcataaataaacagactaggaatgcctatgaaaggatagcaataaatgcgccaattcagggaacagctgctgatattataaaacttgccatgatagaaatttacaaggagattgaaaataaaaatctcaagtcaagaatactccttcaaattcatgatgagcttattcttgaagtgccagaggaggagatggaatttactcctttaatggcaaaggaaaaaatggaaaaggtggtagaactttcggttcctcttgtagttgaaatctcggtaggtaaaaatcttgctgaattaaaatgagctataagattggtcgac

SEQ ID NO: 2155 - DNA, 2673 bp, Artificial Sequence
  Description of Artificial Sequence: Synthetic DNA sequence of Dictyoglomus thermophilum DNA V791W
atgaaatacctgctgccgaccgctgctgctggtctgctgctcctcgctgcccagccggcgatggccatggatatcggaattaattcggatccgaaatctctgtgggatctttttcaagaaaataccgagaaagagtccaaaaggaagattctgattattgatggctcaagcctcatatacagggtttattacgcccttccccctttaaagacaaaaaatggtgaattaactaatgctctttatggcttcataagaatacttttaaaggccgtagaagattttaatcctgatcttgtaggcgttgcctttgatagacctgaacctacttttaggcatgtgatttataaagagtataaggctaagagaccacctatgaaggatgatttgaaagcgcagataccatggataagagaatttctaaggttaaatgatatacctctattggaagagcctggctatgaagcggatgatataatagctactatagtgaataaatataaggatgatttaaaatatattctctctggagatttagatcttttgcaattagtctcggacaaaacctttctaatacatcctcaaaagggaattactgagtttactatttatgatccaaaagctgtaaaggataggtttggagtagagccctataagattcccttatacaaagtattagtaggggacgaatctgataatattccaggagtaaatggaataggtcctaaaaaggcctcaaagattcttgagaaaatttcaagtgtagatgaatttaaaagtaaaataaaagttttggatagtgatttaagggagcttattgagaaaaattggaatattattgaaagaaatttagaacttgttactttaaaaaatatagataaggatcttattcttaaacccttcgagattaaaagagatgaaaaagtaatagattttttgaagagatatgaacttaagagtattcttcaaaagttatttcctgatcttcaagaggaagaaaatatagagattaaagatgtcgaagagatcaattttaatgaggtagaaaaagaaggctactttgcctttaaatgtcttggagatagggcttttgagggtatttctctttccttcaaggagggggaaggatattttatatctccttttgatttcaataatgagataagaaagaagattgaaaatataatttcttcagagaatgttaaaaaaattggctcttatattcaaagagatttacattttttaaactgtaaaataaagggcgatgtatttgatgttagtctcgcatcttatcttttgaaccctgaaagacaaaatcactctcttgatattttgataggagagtatctaaataaaacctcttttattcctcaaaaatacgctggttatctttttccgttaaagtctattcttgaggagaggataaagaatgaagggttagaatttgtactttataacatagagattccattaatccctgtactttactccatggagaagtgggggataaaggtagataaggaatatttaaaacagctttctgatgaattctgcgagagaattaaaaaattggaagaagagatatatgaacttgcaggaaccagatttaatctcaattctccaaaacaactttctgaagttttatttgagaggttaaaacttccttctggtaagaaaggaaaaacaggatattctacgtcgtcttctgtgcttcaaaacttaataaatgctcatcctatagtgagaaaaatcctccaatatagagaactctataaattgaagagtacttatgtggatgctattcctaatctggttaatccacaaacaggtagagttcatacaaaatttaatcctacaggtacagctacaggaagaataagtagtagtgaacctaatcttcagaatattcctataaaaagtgaagaaggtagaaagataagaagagccttcgtgtcagaagatggatattttcttgtatctcttgattattctcagatagagctaaggattatggctcatctttctcaggagcctaaattaatatctgccttccaaaaaggagaggatattcatagaagaacagcatcggagatttttggagtgccagaggaagaagttgatgatcttttaaggtcaagggcaaaggccgttaattttggaattatttatggtatctcttcttttggactttctgagactgtaagtattacaccagaagaggcagagaaatttatagactcgtattttaagcactatccaagagtgaagctttttatagataagactattcatgaggcaagagaaaaactgtacgttaaaaccttatttggcagaaaaagatatattcctgagattaagagcataaataaacagtggaggaatgcctatgaaaggatagcaataaatgcgccaattcagggaacagctgctgatattataaaacttgccatgatagaaatttacaaggagattgaaaataaaaatctcaagtcaagaatactccttcaaattcatgatgagcttattcttgaagtgccagaggaggagatggaatttactcctttaatggcaaaggaaaaaatggaaaaggtggtagaactttcggttcctcttgtagttgaaatctcggtaggtaaaaatcttgctgaattaaaatgagctataagattggtcgac

SEQ ID NO: 2156 - DNA, 2673 bp, Artificial Sequence
  Description of Artificial Sequence: Synthetic DNA sequence of Dictyoglomus thermophilum DNA V791Y
atgaaatacctgctgccgaccgctgctgctggtctgctgctcctcgctgcccagccggcgatggccatggatatcggaattaattcggatccgaaatctctgtgggatctttttcaagaaaataccgagaaagagtccaaaaggaagattctgattattgatggctcaagcctcatatacagggtttattacgcccttccccctttaaagacaaaaaatggtgaattaactaatgctctttatggcttcataagaatacttttaaaggccgtagaagattttaatcctgatcttgtaggcgttgcctttgatagacctgaacctacttttaggcatgtgatttataaagagtataaggctaagagaccacctatgaaggatgatttgaaagcgcagataccatggataagagaatttctaaggttaaatgatatacctctattggaagagcctggctatgaagcggatgatataatagctactatagtgaataaatataaggatgatttaaaatatattctctctggagatttagatcttttgcaattagtctcggacaaaacctttctaatacatcctcaaaagggaattactgagtttactatttatgatccaaaagctgtaaaggataggtttggagtagagccctataagattcccttatacaaagtattagtaggggacgaatctgataatattccaggagtaaatggaataggtcctaaaaaggcctcaaagattcttgagaaaatttcaagtgtagatgaatttaaaagtaaaataaaagttttggatagtgatttaagggagcttattgagaaaaattggaatattattgaaagaaatttagaacttgttactttaaaaaatatagataaggatcttattcttaaacccttcgagattaaaagagatgaaaaagtaatagattttttgaagagatatgaacttaagagtattcttcaaaagttatttcctgatcttcaagaggaagaaaatatagagattaaagatgtcgaagagatcaattttaatgaggtagaaaaagaaggctactttgcctttaaatgtcttggagatagggcttttgagggtatttctctttccttcaaggagggggaaggatattttatatctccttttgatttcaataatgagataagaaagaagattgaaaatataatttcttcagagaatgttaaaaaaattggctcttatattcaaagagatttacattttttaaactgtaaaataaagggcgatgtatttgatgttagtctcgcatcttatcttttgaaccctgaaagacaaaatcactctcttgatattttgataggagagtatctaaataaaacctcttttattcctcaaaaatacgctggttatctttttccgttaaagtctattcttgaggagaggataaagaatgaagggttagaatttgtactttataacatagagattccattaatccctgtactttactccatggagaagtgggggataaaggtagataaggaatatttaaaacagctttctgatgaattctgcgagagaattaaaaaattggaagaagagatatatgaacttgcaggaaccagatttaatctcaattctccaaaacaactttctgaagttttatttgagaggttaaaacttccttctggtaagaaaggaaaaacaggatattctacgtcgtcttctgtgcttcaaaacttaataaatgctcatcctatagtgagaaaaatcctccaatatagagaactctataaattgaagagtacttatgtggatgctattcctaatctggttaatccacaaacaggtagagttcatacaaaatttaatcctacaggtacagctacaggaagaataagtagtagtgaacctaatcttcagaatattcctataaaaagtgaagaaggtagaaagataagaagagccttcgtgtcagaagatggatattttcttgtatctcttgattattctcagatagagctaaggattatggctcatctttctcaggagcctaaattaatatctgccttccaaaaaggagaggatattcatagaagaacagcatcggagatttttggagtgccagaggaagaagttgatgatcttttaaggtcaagggcaaaggccgttaattttggaattatttatggtatctcttcttttggactttctgagactgtaagtattacaccagaagaggcagagaaatttatagactcgtattttaagcactatccaagagtgaagctttttatagataagactattcatgaggcaagagaaaaactgtacgttaaaaccttatttggcagaaaaagatatattcctgagattaagagcataaataaacagtataggaatgcctatgaaaggatagcaataaatgcgccaattcagggaacagctgctgatattataaaacttgccatgatagaaatttacaaggagattgaaaataaaaatctcaagtcaagaatactccttcaaattcatgatgagcttattcttgaagtgccagaggaggagatggaatttactcctttaatggcaaaggaaaaaatggaaaaggtggtagaactttcggttcctcttgtagttgaaatctcggtaggtaaaaatcttgctgaattaaaatgagctataagattggtcgac

SEQ ID NO: 2157 - DNA, 2673 bp, Artificial Sequence
  Description of Artificial Sequence: Synthetic DNA sequence of Dictyoglomus thermophilum DNA R792A
atgaaatacctgctgccgaccgctgctgctggtctgctgctcctcgctgcccagccggcgatggccatggatatcggaattaattcggatccgaaatctctgtgggatctttttcaagaaaataccgagaaagagtccaaaaggaagattctgattattgatggctcaagcctcatatacagggtttattacgcccttccccctttaaagacaaaaaatggtgaattaactaatgctctttatggcttcataagaatacttttaaaggccgtagaagattttaatcctgatcttgtaggcgttgcctttgatagacctgaacctacttttaggcatgtgatttataaagagtataaggctaagagaccacctatgaaggatgatttgaaagcgcagataccatggataagagaatttctaaggttaaatgatatacctctattggaagagcctggctatgaagcggatgatataatagctactatagtgaataaatataaggatgatttaaaatatattctctctggagatttagatcttttgcaattagtctcggacaaaacctttctaatacatcctcaaaagggaattactgagtttactatttatgatccaaaagctgtaaaggataggtttggagtagagccctataagattcccttatacaaagtattagtaggggacgaatctgataatattccaggagtaaatggaataggtcctaaaaaggcctcaaagattcttgagaaaatttcaagtgtagatgaatttaaaagtaaaataaaagttttggatagtgatttaagggagcttattgagaaaaattggaatattattgaaagaaatttagaacttgttactttaaaaaatatagataaggatcttattcttaaacccttcgagattaaaagagatgaaaaagtaatagattttttgaagagatatgaacttaagagtattcttcaaaagttatttcctgatcttcaagaggaagaaaatatagagattaaagatgtcgaagagatcaattttaatgaggtagaaaaagaaggctactttgcctttaaatgtcttggagatagggcttttgagggtatttctctttccttcaaggagggggaaggatattttatatctccttttgatttcaataatgagataagaaagaagattgaaaatataatttcttcagagaatgttaaaaaaattggctcttatattcaaagagatttacattttttaaactgtaaaataaagggcgatgtatttgatgttagtctcgcatcttatcttttgaaccctgaaagacaaaatcactctcttgatattttgataggagagtatctaaataaaacctcttttattcctcaaaaatacgctggttatctttttccgttaaagtctattcttgaggagaggataaagaatgaagggttagaatttgtactttataacatagagattccattaatccctgtactttactccatggagaagtgggggataaaggtagataaggaatatttaaaacagctttctgatgaattctgcgagagaattaaaaaattggaagaagagatatatgaacttgcaggaaccagatttaatctcaattctccaaaacaactttctgaagttttatttgagaggttaaaacttccttctggtaagaaaggaaaaacaggatattctacgtcgtcttctgtgcttcaaaacttaataaatgctcatcctatagtgagaaaaatcctccaatatagagaactctataaattgaagagtacttatgtggatgctattcctaatctggttaatccacaaacaggtagagttcatacaaaatttaatcctacaggtacagctacaggaagaataagtagtagtgaacctaatcttcagaatattcctataaaaagtgaagaaggtagaaagataagaagagccttcgtgtcagaagatggatattttcttgtatctcttgattattctcagatagagctaaggattatggctcatctttctcaggagcctaaattaatatctgccttccaaaaaggagaggatattcatagaagaacagcatcggagatttttggagtgccagaggaagaagttgatgatcttttaaggtcaagggcaaaggccgttaattttggaattatttatggtatctcttcttttggactttctgagactgtaagtattacaccagaagaggcagagaaatttatagactcgtattttaagcactatccaagagtgaagctttttatagataagactattcatgaggcaagagaaaaactgtacgttaaaaccttatttggcagaaaaagatatattcctgagattaagagcataaataaacaggtagctaatgcctatgaaaggatagcaataaatgcgccaattcagggaacagctgctgatattataaaacttgccatgatagaaatttacaaggagattgaaaataaaaatctcaagtcaagaatactccttcaaattcatgatgagcttattcttgaagtgccagaggaggagatggaatttactcctttaatggcaaaggaaaaaatggaaaaggtggtagaactttcggttcctcttgtagttgaaatctcggtaggtaaaaatcttgctgaattaaaatgagctataagattggtcgac

SEQ ID NO: 2158 - DNA, 2673 bp, Artificial Sequence
  Description of Artificial Sequence: Synthetic DNA sequence of Dictyoglomus thermophilum DNA R792N
atgaaatacctgctgccgaccgctgctgctggtctgctgctcctcgctgcccagccggcgatggccatggatatcggaattaattcggatccgaaatctctgtgggatctttttcaagaaaataccgagaaagagtccaaaaggaagattctgattattgatggctcaagcctcatatacagggtttattacgcccttccccctttaaagacaaaaaatggtgaattaactaatgctctttatggcttcataagaatacttttaaaggccgtagaagattttaatcctgatcttgtaggcgttgcctttgatagacctgaacctacttttaggcatgtgatttataaagagtataaggctaagagaccacctatgaaggatgatttgaaagcgcagataccatggataagagaatttctaaggttaaatgatatacctctattggaagagcctggctatgaagcggatgatataatagctactatagtgaataaatataaggatgatttaaaatatattctctctggagatttagatcttttgcaattagtctcggacaaaacctttctaatacatcctcaaaagggaattactgagtttactatttatgatccaaaagctgtaaaggataggtttggagtagagccctataagattcccttatacaaagtattagtaggggacgaatctgataatattccaggagtaaatggaataggtcctaaaaaggcctcaaagattcttgagaaaatttcaagtgtagatgaatttaaaagtaaaataaaagttttggatagtgatttaagggagcttattgagaaaaattggaatattattgaaagaaatttagaacttgttactttaaaaaatatagataaggatcttattcttaaacccttcgagattaaaagagatgaaaaagtaatagattttttgaagagatatgaacttaagagtattcttcaaaagttatttcctgatcttcaagaggaagaaaatatagagattaaagatgtcgaagagatcaattttaatgaggtagaaaaagaaggctactttgcctttaaatgtcttggagatagggcttttgagggtatttctctttccttcaaggagggggaaggatattttatatctccttttgatttcaataatgagataagaaagaagattgaaaatataatttcttcagagaatgttaaaaaaattggctcttatattcaaagagatttacattttttaaactgtaaaataaagggcgatgtatttgatgttagtctcgcatcttatcttttgaaccctgaaagacaaaatcactctcttgatattttgataggagagtatctaaataaaacctcttttattcctcaaaaatacgctggttatctttttccgttaaagtctattcttgaggagaggataaagaatgaagggttagaatttgtactttataacatagagattccattaatccctgtactttactccatggagaagtgggggataaaggtagataaggaatatttaaaacagctttctgatgaattctgcgagagaattaaaaaattggaagaagagatatatgaacttgcaggaaccagatttaatctcaattctccaaaacaactttctgaagttttatttgagaggttaaaacttccttctggtaagaaaggaaaaacaggatattctacgtcgtcttctgtgcttcaaaacttaataaatgctcatcctatagtgagaaaaatcctccaatatagagaactctataaattgaagagtacttatgtggatgctattcctaatctggttaatccacaaacaggtagagttcatacaaaatttaatcctacaggtacagctacaggaagaataagtagtagtgaacctaatcttcagaatattcctataaaaagtgaagaaggtagaaagataagaagagccttcgtgtcagaagatggatattttcttgtatctcttgattattctcagatagagctaaggattatggctcatctttctcaggagcctaaattaatatctgccttccaaaaaggagaggatattcatagaagaacagcatcggagatttttggagtgccagaggaagaagttgatgatcttttaaggtcaagggcaaaggccgttaattttggaattatttatggtatctcttcttttggactttctgagactgtaagtattacaccagaagaggcagagaaatttatagactcgtattttaagcactatccaagagtgaagctttttatagataagactattcatgaggcaagagaaaaactgtacgttaaaaccttatttggcagaaaaagatatattcctgagattaagagcataaataaacaggtaaataatgcctatgaaaggatagcaataaatgcgccaattcagggaacagctgctgatattataaaacttgccatgatagaaatttacaaggagattgaaaataaaaatctcaagtcaagaatactccttcaaattcatgatgagcttattcttgaagtgccagaggaggagatggaatttactcctttaatggcaaaggaaaaaatggaaaaggtggtagaactttcggttcctcttgtagttgaaatctcggtaggtaaaaatcttgctgaattaaaatgagctataagattggtcgac

SEQ ID NO: 2159 - DNA, 2673 bp, Artificial Sequence
  Description of Artificial Sequence: Synthetic DNA sequence of Dictyoglomus thermophilum DNA R792D
atgaaatacctgctgccgaccgctgctgctggtctgctgctcctcgctgcccagccggcgatggccatggatatcggaattaattcggatccgaaatctctgtgggatctttttcaagaaaataccgagaaagagtccaaaaggaagattctgattattgatggctcaagcctcatatacagggtttattacgcccttccccctttaaagacaaaaaatggtgaattaactaatgctctttatggcttcataagaatacttttaaaggccgtagaagattttaatcctgatcttgtaggcgttgcctttgatagacctgaacctacttttaggcatgtgatttataaagagtataaggctaagagaccacctatgaaggatgatttgaaagcgcagataccatggataagagaatttctaaggttaaatgatatacctctattggaagagcctggctatgaagcggatgatataatagctactatagtgaataaatataaggatgatttaaaatatattctctctggagatttagatcttttgcaattagtctcggacaaaacctttctaatacatcctcaaaagggaattactgagtttactatttatgatccaaaagctgtaaaggataggtttggagtagagccctataagattcccttatacaaagtattagtaggggacgaatctgataatattccaggagtaaatggaataggtcctaaaaaggcctcaaagattcttgagaaaatttcaagtgtagatgaatttaaaagtaaaataaaagttttggatagtgatttaagggagcttattgagaaaaattggaatattattgaaagaaatttagaacttgttactttaaaaaatatagataaggatcttattcttaaacccttcgagattaaaagagatgaaaaagtaatagattttttgaagagatatgaacttaagagtattcttcaaaagttatttcctgatcttcaagaggaagaaaatatagagattaaagatgtcgaagagatcaattttaatgaggtagaaaaagaaggctactttgcctttaaatgtcttggagatagggcttttgagggtatttctctttccttcaaggagggggaaggatattttatatctccttttgatttcaataatgagataagaaagaagattgaaaatataatttcttcagagaatgttaaaaaaattggctcttatattcaaagagatttacattttttaaactgtaaaataaagggcgatgtatttgatgttagtctcgcatcttatcttttgaaccctgaaagacaaaatcactctcttgatattttgataggagagtatctaaataaaacctcttttattcctcaaaaatacgctggttatctttttccgttaaagtctattcttgaggagaggataaagaatgaagggttagaatttgtactttataacatagagattccattaatccctgtactttactccatggagaagtgggggataaaggtagataaggaatatttaaaacagctttctgatgaattctgcgagagaattaaaaaattggaagaagagatatatgaacttgcaggaaccagatttaatctcaattctccaaaacaactttctgaagttttatttgagaggttaaaacttccttctggtaagaaaggaaaaacaggatattctacgtcgtcttctgtgcttcaaaacttaataaatgctcatcctatagtgagaaaaatcctccaatatagagaactctataaattgaagagtacttatgtggatgctattcctaatctggttaatccacaaacaggtagagttcatacaaaatttaatcctacaggtacagctacaggaagaataagtagtagtgaacctaatcttcagaatattcctataaaaagtgaagaaggtagaaagataagaagagccttcgtgtcagaagatggatattttcttgtatctcttgattattctcagatagagctaaggattatggctcatctttctcaggagcctaaattaatatctgccttccaaaaaggagaggatattcatagaagaacagcatcggagatttttggagtgccagaggaagaagttgatgatcttttaaggtcaagggcaaaggccgttaattttggaattatttatggtatctcttcttttggactttctgagactgtaagtattacaccagaagaggcagagaaatttatagactcgtattttaagcactatccaagagtgaagctttttatagataagactattcatgaggcaagagaaaaactgtacgttaaaaccttatttggcagaaaaagatatattcctgagattaagagcataaataaacaggtagataatgcctatgaaaggatagcaataaatgcgccaattcagggaacagctgctgatattataaaacttgccatgatagaaatttacaaggagattgaaaataaaaatctcaagtcaagaatactccttcaaattcatgatgagcttattcttgaagtgccagaggaggagatggaatttactcctttaatggcaaaggaaaaaatggaaaaggtggtagaactttcggttcctcttgtagttgaaatctcggtaggtaaaaatcttgctgaattaaaatgagctataagattggtcgac

SEQ ID NO: 2160 - DNA, 2673 bp, Artificial Sequence
  Description of Artificial Sequence: Synthetic DNA sequence of Dictyoglomus thermophilum DNA R792C
atgaaatacctgctgccgaccgctgctgctggtctgctgctcctcgctgcccagccggcgatggccatggatatcggaattaattcggatccgaaatctctgtgggatctttttcaagaaaataccgagaaagagtccaaaaggaagattctgattattgatggctcaagcctcatatacagggtttattacgcccttccccctttaaagacaaaaaatggtgaattaactaatgctctttatggcttcataagaatacttttaaaggccgtagaagattttaatcctgatcttgtaggcgttgcctttgatagacctgaacctacttttaggcatgtgatttataaagagtataaggctaagagaccacctatgaaggatgatttgaaagcgcagataccatggataagagaatttctaaggttaaatgatatacctctattggaagagcctggctatgaagcggatgatataatagctactatagtgaataaatataaggatgatttaaaatatattctctctggagatttagatcttttgcaattagtctcggacaaaacctttctaatacatcctcaaaagggaattactgagtttactatttatgatccaaaagctgtaaaggataggtttggagtagagccctataagattcccttatacaaagtattagtaggggacgaatctgataatattccaggagtaaatggaataggtcctaaaaaggcctcaaagattcttgagaaaatttcaagtgtagatgaatttaaaagtaaaataaaagttttggatagtgatttaagggagcttattgagaaaaattggaatattattgaaagaaatttagaacttgttactttaaaaaatatagataaggatcttattcttaaacccttcgagattaaaagagatgaaaaagtaatagattttttgaagagatatgaacttaagagtattcttcaaaagttatttcctgatcttcaagaggaagaaaatatagagattaaagatgtcgaagagatcaattttaatgaggtagaaaaagaaggctactttgcctttaaatgtcttggagatagggcttttgagggtatttctctttccttcaaggagggggaaggatattttatatctccttttgatttcaataatgagataagaaagaagattgaaaatataatttcttcagagaatgttaaaaaaattggctcttatattcaaagagatttacattttttaaactgtaaaataaagggcgatgtatttgatgttagtctcgcatcttatcttttgaaccctgaaagacaaaatcactctcttgatattttgataggagagtatctaaataaaacctcttttattcctcaaaaatacgctggttatctttttccgttaaagtctattcttgaggagaggataaagaatgaagggttagaatttgtactttataacatagagattccattaatccctgtactttactccatggagaagtgggggataaaggtagataaggaatatttaaaacagctttctgatgaattctgcgagagaattaaaaaattggaagaagagatatatgaacttgcaggaaccagatttaatctcaattctccaaaacaactttctgaagttttatttgagaggttaaaacttccttctggtaagaaaggaaaaacaggatattctacgtcgtcttctgtgcttcaaaacttaataaatgctcatcctatagtgagaaaaatcctccaatatagagaactctataaattgaagagtacttatgtggatgctattcctaatctggttaatccacaaacaggtagagttcatacaaaatttaatcctacaggtacagctacaggaagaataagtagtagtgaacctaatcttcagaatattcctataaaaagtgaagaaggtagaaagataagaagagccttcgtgtcagaagatggatattttcttgtatctcttgattattctcagatagagctaaggattatggctcatctttctcaggagcctaaattaatatctgccttccaaaaaggagaggatattcatagaagaacagcatcggagatttttggagtgccagaggaagaagttgatgatcttttaaggtcaagggcaaaggccgttaattttggaattatttatggtatctcttcttttggactttctgagactgtaagtattacaccagaagaggcagagaaatttatagactcgtattttaagcactatccaagagtgaagctttttatagataagactattcatgaggcaagagaaaaactgtacgttaaaaccttatttggcagaaaaagatatattcctgagattaagagcataaataaacaggtatgtaatgcctatgaaaggatagcaataaatgcgccaattcagggaacagctgctgatattataaaacttgccatgatagaaatttacaaggagattgaaaataaaaatctcaagtcaagaatactccttcaaattcatgatgagcttattcttgaagtgccagaggaggagatggaatttactcctttaatggcaaaggaaaaaatggaaaaggtggtagaactttcggttcctcttgtagttgaaatctcggtaggtaaaaatcttgctgaattaaaatgagctataagattggtcgac

SEQ ID NO: 2161 - DNA, 2673 bp, Artificial Sequence
  Description of Artificial Sequence: Synthetic DNA sequence of Dictyoglomus thermophilum DNA R792E
atgaaatacctgctgccgaccgctgctgctggtctgctgctcctcgctgcccagccggcgatggccatggatatcggaattaattcggatccgaaatctctgtgggatctttttcaagaaaataccgagaaagagtccaaaaggaagattctgattattgatggctcaagcctcatatacagggtttattacgcccttccccctttaaagacaaaaaatggtgaattaactaatgctctttatggcttcataagaatacttttaaaggccgtagaagattttaatcctgatcttgtaggcgttgcctttgatagacctgaacctacttttaggcatgtgatttataaagagtataaggctaagagaccacctatgaaggatgatttgaaagcgcagataccatggataagagaatttctaaggttaaatgatatacctctattggaagagcctggctatgaagcggatgatataatagctactatagtgaataaatataaggatgatttaaaatatattctctctggagatttagatcttttgcaattagtctcggacaaaacctttctaatacatcctcaaaagggaattactgagtttactatttatgatccaaaagctgtaaaggataggtttggagtagagccctataagattcccttatacaaagtattagtaggggacgaatctgataatattccaggagtaaatggaataggtcctaaaaaggcctcaaagattcttgagaaaatttcaagtgtagatgaatttaaaagtaaaataaaagttttggatagtgatttaagggagcttattgagaaaaattggaatattattgaaagaaatttagaacttgttactttaaaaaatatagataaggatcttattcttaaacccttcgagattaaaagagatgaaaaagtaatagattttttgaagagatatgaacttaagagtattcttcaaaagttatttcctgatcttcaagaggaagaaaatatagagattaaagatgtcgaagagatcaattttaatgaggtagaaaaagaaggctactttgcctttaaatgtcttggagatagggcttttgagggtatttctctttccttcaaggagggggaaggatattttatatctccttttgatttcaataatgagataagaaagaagattgaaaatataatttcttcagagaatgttaaaaaaattggctcttatattcaaagagatttacattttttaaactgtaaaataaagggcgatgtatttgatgttagtctcgcatcttatcttttgaaccctgaaagacaaaatcactctcttgatattttgataggagagtatctaaataaaacctcttttattcctcaaaaatacgctggttatctttttccgttaaagtctattcttgaggagaggataaagaatgaagggttagaatttgtactttataacatagagattccattaatccctgtactttactccatggagaagtgggggataaaggtagataaggaatatttaaaacagctttctgatgaattctgcgagagaattaaaaaattggaagaagagatatatgaacttgcaggaaccagatttaatctcaattctccaaaacaactttctgaagttttatttgagaggttaaaacttccttctggtaagaaaggaaaaacaggatattctacgtcgtcttctgtgcttcaaaacttaataaatgctcatcctatagtgagaaaaatcctccaatatagagaactctataaattgaagagtacttatgtggatgctattcctaatctggttaatccacaaacaggtagagttcatacaaaatttaatcctacaggtacagctacaggaagaataagtagtagtgaacctaatcttcagaatattcctataaaaagtgaagaaggtagaaagataagaagagccttcgtgtcagaagatggatattttcttgtatctcttgattattctcagatagagctaaggattatggctcatctttctcaggagcctaaattaatatctgccttccaaaaaggagaggatattcatagaagaacagcatcggagatttttggagtgccagaggaagaagttgatgatcttttaaggtcaagggcaaaggccgttaattttggaattatttatggtatctcttcttttggactttctgagactgtaagtattacaccagaagaggcagagaaatttatagactcgtattttaagcactatccaagagtgaagctttttatagataagactattcatgaggcaagagaaaaactgtacgttaaaaccttatttggcagaaaaagatatattcctgagattaagagcataaataaacaggtagaaaatgcctatgaaaggatagcaataaatgcgccaattcagggaacagctgctgatattataaaacttgccatgatagaaatttacaaggagattgaaaataaaaatctcaagtcaagaatactccttcaaattcatgatgagcttattcttgaagtgccagaggaggagatggaatttactcctttaatggcaaaggaaaaaatggaaaaggtggtagaactttcggttcctcttgtagttgaaatctcggtaggtaaaaatcttgctgaattaaaatgagctataagattggtcgac

SEQ ID NO: 2162 - DNA, 2673 bp, Artificial Sequence
  Description of Artificial Sequence: Synthetic DNA sequence of Dictyoglomus thermophilum DNA R792Q
atgaaatacctgctgccgaccgctgctgctggtctgctgctcctcgctgcccagccggcgatggccatggatatcggaattaattcggatccgaaatctctgtgggatctttttcaagaaaataccgagaaagagtccaaaaggaagattctgattattgatggctcaagcctcatatacagggtttattacgcccttccccctttaaagacaaaaaatggtgaattaactaatgctctttatggcttcataagaatacttttaaaggccgtagaagattttaatcctgatcttgtaggcgttgcctttgatagacctgaacctacttttaggcatgtgatttataaagagtataaggctaagagaccacctatgaaggatgatttgaaagcgcagataccatggataagagaatttctaaggttaaatgatatacctctattggaagagcctggctatgaagcggatgatataatagctactatagtgaataaatataaggatgatttaaaatatattctctctggagatttagatcttttgcaattagtctcggacaaaacctttctaatacatcctcaaaagggaattactgagtttactatttatgatccaaaagctgtaaaggataggtttggagtagagccctataagattcccttatacaaagtattagtaggggacgaatctgataatattccaggagtaaatggaataggtcctaaaaaggcctcaaagattcttgagaaaatttcaagtgtagatgaatttaaaagtaaaataaaagttttggatagtgatttaagggagcttattgagaaaaattggaatattattgaaagaaatttagaacttgttactttaaaaaatatagataaggatcttattcttaaacccttcgagattaaaagagatgaaaaagtaatagattttttgaagagatatgaacttaagagtattcttcaaaagttatttcctgatcttcaagaggaagaaaatatagagattaaagatgtcgaagagatcaattttaatgaggtagaaaaagaaggctactttgcctttaaatgtcttggagatagggcttttgagggtatttctctttccttcaaggagggggaaggatattttatatctccttttgatttcaataatgagataagaaagaagattgaaaatataatttcttcagagaatgttaaaaaaattggctcttatattcaaagagatttacattttttaaactgtaaaataaagggcgatgtatttgatgttagtctcgcatcttatcttttgaaccctgaaagacaaaatcactctcttgatattttgataggagagtatctaaataaaacctcttttattcctcaaaaatacgctggttatctttttccgttaaagtctattcttgaggagaggataaagaatgaagggttagaatttgtactttataacatagagattccattaatccctgtactttactccatggagaagtgggggataaaggtagataaggaatatttaaaacagctttctgatgaattctgcgagagaattaaaaaattggaagaagagatatatgaacttgcaggaaccagatttaatctcaattctccaaaacaactttctgaagttttatttgagaggttaaaacttccttctggtaagaaaggaaaaacaggatattctacgtcgtcttctgtgcttcaaaacttaataaatgctcatcctatagtgagaaaaatcctccaatatagagaactctataaattgaagagtacttatgtggatgctattcctaatctggttaatccacaaacaggtagagttcatacaaaatttaatcctacaggtacagctacaggaagaataagtagtagtgaacctaatcttcagaatattcctataaaaagtgaagaaggtagaaagataagaagagccttcgtgtcagaagatggatattttcttgtatctcttgattattctcagatagagctaaggattatggctcatctttctcaggagcctaaattaatatctgccttccaaaaaggagaggatattcatagaagaacagcatcggagatttttggagtgccagaggaagaagttgatgatcttttaaggtcaagggcaaaggccgttaattttggaattatttatggtatctcttcttttggactttctgagactgtaagtattacaccagaagaggcagagaaatttatagactcgtattttaagcactatccaagagtgaagctttttatagataagactattcatgaggcaagagaaaaactgtacgttaaaaccttatttggcagaaaaagatatattcctgagattaagagcataaataaacaggtacaaaatgcctatgaaaggatagcaataaatgcgccaattcagggaacagctgctgatattataaaacttgccatgatagaaatttacaaggagattgaaaataaaaatctcaagtcaagaatactccttcaaattcatgatgagcttattcttgaagtgccagaggaggagatggaatttactcctttaatggcaaaggaaaaaatggaaaaggtggtagaactttcggttcctcttgtagttgaaatctcggtaggtaaaaatcttgctgaattaaaatgagctataagattggtcgac

SEQ ID NO: 2163 - DNA, 2673 bp, Artificial Sequence
  Description of Artificial Sequence: Synthetic DNA sequence of Dictyoglomus thermophilum DNA R792G
atgaaatacctgctgccgaccgctgctgctggtctgctgctcctcgctgcccagccggcgatggccatggatatcggaattaattcggatccgaaatctctgtgggatctttttcaagaaaataccgagaaagagtccaaaaggaagattctgattattgatggctcaagcctcatatacagggtttattacgcccttccccctttaaagacaaaaaatggtgaattaactaatgctctttatggcttcataagaatacttttaaaggccgtagaagattttaatcctgatcttgtaggcgttgcctttgatagacctgaacctacttttaggcatgtgatttataaagagtataaggctaagagaccacctatgaaggatgatttgaaagcgcagataccatggataagagaatttctaaggttaaatgatatacctctattggaagagcctggctatgaagcggatgatataatagctactatagtgaataaatataaggatgatttaaaatatattctctctggagatttagatcttttgcaattagtctcggacaaaacctttctaatacatcctcaaaagggaattactgagtttactatttatgatccaaaagctgtaaaggataggtttggagtagagccctataagattcccttatacaaagtattagtaggggacgaatctgataatattccaggagtaaatggaataggtcctaaaaaggcctcaaagattcttgagaaaatttcaagtgtagatgaatttaaaagtaaaataaaagttttggatagtgatttaagggagcttattgagaaaaattggaatattattgaaagaaatttagaacttgttactttaaaaaatatagataaggatcttattcttaaacccttcgagattaaaagagatgaaaaagtaatagattttttgaagagatatgaacttaagagtattcttcaaaagttatttcctgatcttcaagaggaagaaaatatagagattaaagatgtcgaagagatcaattttaatgaggtagaaaaagaaggctactttgcctttaaatgtcttggagatagggcttttgagggtatttctctttccttcaaggagggggaaggatattttatatctccttttgatttcaataatgagataagaaagaagattgaaaatataatttcttcagagaatgttaaaaaaattggctcttatattcaaagagatttacattttttaaactgtaaaataaagggcgatgtatttgatgttagtctcgcatcttatcttttgaaccctgaaagacaaaatcactctcttgatattttgataggagagtatctaaataaaacctcttttattcctcaaaaatacgctggttatctttttccgttaaagtctattcttgaggagaggataaagaatgaagggttagaatttgtactttataacatagagattccattaatccctgtactttactccatggagaagtgggggataaaggtagataaggaatatttaaaacagctttctgatgaattctgcgagagaattaaaaaattggaagaagagatatatgaacttgcaggaaccagatttaatctcaattctccaaaacaactttctgaagttttatttgagaggttaaaacttccttctggtaagaaaggaaaaacaggatattctacgtcgtcttctgtgcttcaaaacttaataaatgctcatcctatagtgagaaaaatcctccaatatagagaactctataaattgaagagtacttatgtggatgctattcctaatctggttaatccacaaacaggtagagttcatacaaaatttaatcctacaggtacagctacaggaagaataagtagtagtgaacctaatcttcagaatattcctataaaaagtgaagaaggtagaaagataagaagagccttcgtgtcagaagatggatattttcttgtatctcttgattattctcagatagagctaaggattatggctcatctttctcaggagcctaaattaatatctgccttccaaaaaggagaggatattcatagaagaacagcatcggagatttttggagtgccagaggaagaagttgatgatcttttaaggtcaagggcaaaggccgttaattttggaattatttatggtatctcttcttttggactttctgagactgtaagtattacaccagaagaggcagagaaatttatagactcgtattttaagcactatccaagagtgaagctttttatagataagactattcatgaggcaagagaaaaactgtacgttaaaaccttatttggcagaaaaagatatattcctgagattaagagcataaataaacaggtaggtaatgcctatgaaaggatagcaataaatgcgccaattcagggaacagctgctgatattataaaacttgccatgatagaaatttacaaggagattgaaaataaaaatctcaagtcaagaatactccttcaaattcatgatgagcttattcttgaagtgccagaggaggagatggaatttactcctttaatggcaaaggaaaaaatggaaaaggtggtagaactttcggttcctcttgtagttgaaatctcggtaggtaaaaatcttgctgaattaaaatgagctataagattggtcgac

SEQ ID NO: 2164 - DNA, 2673 bp, Artificial Sequence
  Description of Artificial Sequence: Synthetic DNA sequence of Dictyoglomus thermophilum DNA R792H
atgaaatacctgctgccgaccgctgctgctggtctgctgctcctcgctgcccagccggcgatggccatggatatcggaattaattcggatccgaaatctctgtgggatctttttcaagaaaataccgagaaagagtccaaaaggaagattctgattattgatggctcaagcctcatatacagggtttattacgcccttccccctttaaagacaaaaaatggtgaattaactaatgctctttatggcttcataagaatacttttaaaggccgtagaagattttaatcctgatcttgtaggcgttgcctttgatagacctgaacctacttttaggcatgtgatttataaagagtataaggctaagagaccacctatgaaggatgatttgaaagcgcagataccatggataagagaatttctaaggttaaatgatatacctctattggaagagcctggctatgaagcggatgatataatagctactatagtgaataaatataaggatgatttaaaatatattctctctggagatttagatcttttgcaattagtctcggacaaaacctttctaatacatcctcaaaagggaattactgagtttactatttatgatccaaaagctgtaaaggataggtttggagtagagccctataagattcccttatacaaagtattagtaggggacgaatctgataatattccaggagtaaatggaataggtcctaaaaaggcctcaaagattcttgagaaaatttcaagtgtagatgaatttaaaagtaaaataaaagttttggatagtgatttaagggagcttattgagaaaaattggaatattattgaaagaaatttagaacttgttactttaaaaaatatagataaggatcttattcttaaacccttcgagattaaaagagatgaaaaagtaatagattttttgaagagatatgaacttaagagtattcttcaaaagttatttcctgatcttcaagaggaagaaaatatagagattaaagatgtcgaagagatcaattttaatgaggtagaaaaagaaggctactttgcctttaaatgtcttggagatagggcttttgagggtatttctctttccttcaaggagggggaaggatattttatatctccttttgatttcaataatgagataagaaagaagattgaaaatataatttcttcagagaatgttaaaaaaattggctcttatattcaaagagatttacattttttaaactgtaaaataaagggcgatgtatttgatgttagtctcgcatcttatcttttgaaccctgaaagacaaaatcactctcttgatattttgataggagagtatctaaataaaacctcttttattcctcaaaaatacgctggttatctttttccgttaaagtctattcttgaggagaggataaagaatgaagggttagaatttgtactttataacatagagattccattaatccctgtactttactccatggagaagtgggggataaaggtagataaggaatatttaaaacagctttctgatgaattctgcgagagaattaaaaaattggaagaagagatatatgaacttgcaggaaccagatttaatctcaattctccaaaacaactttctgaagttttatttgagaggttaaaacttccttctggtaagaaaggaaaaacaggatattctacgtcgtcttctgtgcttcaaaacttaataaatgctcatcctatagtgagaaaaatcctccaatatagagaactctataaattgaagagtacttatgtggatgctattcctaatctggttaatccacaaacaggtagagttcatacaaaatttaatcctacaggtacagctacaggaagaataagtagtagtgaacctaatcttcagaatattcctataaaaagtgaagaaggtagaaagataagaagagccttcgtgtcagaagatggatattttcttgtatctcttgattattctcagatagagctaaggattatggctcatctttctcaggagcctaaattaatatctgccttccaaaaaggagaggatattcatagaagaacagcatcggagatttttggagtgccagaggaagaagttgatgatcttttaaggtcaagggcaaaggccgttaattttggaattatttatggtatctcttcttttggactttctgagactgtaagtattacaccagaagaggcagagaaatttatagactcgtattttaagcactatccaagagtgaagctttttatagataagactattcatgaggcaagagaaaaactgtacgttaaaaccttatttggcagaaaaagatatattcctgagattaagagcataaataaacaggtacataatgcctatgaaaggatagcaataaatgcgccaattcagggaacagctgctgatattataaaacttgccatgatagaaatttacaaggagattgaaaataaaaatctcaagtcaagaatactccttcaaattcatgatgagcttattcttgaagtgccagaggaggagatggaatttactcctttaatggcaaaggaaaaaatggaaaaggtggtagaactttcggttcctcttgtagttgaaatctcggtaggtaaaaatcttgctgaattaaaatgagctataagattggtcgac

SEQ ID NO: 2165 - DNA, 2673 bp, Artificial Sequence
  Description of Artificial Sequence: Synthetic DNA sequence of Dictyoglomus thermophilum DNA R792I
atgaaatacctgctgccgaccgctgctgctggtctgctgctcctcgctgcccagccggcgatggccatggatatcggaattaattcggatccgaaatctctgtgggatctttttcaagaaaataccgagaaagagtccaaaaggaagattctgattattgatggctcaagcctcatatacagggtttattacgcccttccccctttaaagacaaaaaatggtgaattaactaatgctctttatggcttcataagaatacttttaaaggccgtagaagattttaatcctgatcttgtaggcgttgcctttgatagacctgaacctacttttaggcatgtgatttataaagagtataaggctaagagaccacctatgaaggatgatttgaaagcgcagataccatggataagagaatttctaaggttaaatgatatacctctattggaagagcctggctatgaagcggatgatataatagctactatagtgaataaatataaggatgatttaaaatatattctctctggagatttagatcttttgcaattagtctcggacaaaacctttctaatacatcctcaaaagggaattactgagtttactatttatgatccaaaagctgtaaaggataggtttggagtagagccctataagattcccttatacaaagtattagtaggggacgaatctgataatattccaggagtaaatggaataggtcctaaaaaggcctcaaagattcttgagaaaatttcaagtgtagatgaatttaaaagtaaaataaaagttttggatagtgatttaagggagcttattgagaaaaattggaatattattgaaagaaatttagaacttgttactttaaaaaatatagataaggatcttattcttaaacccttcgagattaaaagagatgaaaaagtaatagattttttgaagagatatgaacttaagagtattcttcaaaagttatttcctgatcttcaagaggaagaaaatatagagattaaagatgtcgaagagatcaattttaatgaggtagaaaaagaaggctactttgcctttaaatgtcttggagatagggcttttgagggtatttctctttccttcaaggagggggaaggatattttatatctccttttgatttcaataatgagataagaaagaagattgaaaatataatttcttcagagaatgttaaaaaaattggctcttatattcaaagagatttacattttttaaactgtaaaataaagggcgatgtatttgatgttagtctcgcatcttatcttttgaaccctgaaagacaaaatcactctcttgatattttgataggagagtatctaaataaaacctcttttattcctcaaaaatacgctggttatctttttccgttaaagtctattcttgaggagaggataaagaatgaagggttagaatttgtactttataacatagagattccattaatccctgtactttactccatggagaagtgggggataaaggtagataaggaatatttaaaacagctttctgatgaattctgcgagagaattaaaaaattggaagaagagatatatgaacttgcaggaaccagatttaatctcaattctccaaaacaactttctgaagttttatttgagaggttaaaacttccttctggtaagaaaggaaaaacaggatattctacgtcgtcttctgtgcttcaaaacttaataaatgctcatcctatagtgagaaaaatcctccaatatagagaactctataaattgaagagtacttatgtggatgctattcctaatctggttaatccacaaacaggtagagttcatacaaaatttaatcctacaggtacagctacaggaagaataagtagtagtgaacctaatcttcagaatattcctataaaaagtgaagaaggtagaaagataagaagagccttcgtgtcagaagatggatattttcttgtatctcttgattattctcagatagagctaaggattatggctcatctttctcaggagcctaaattaatatctgccttccaaaaaggagaggatattcatagaagaacagcatcggagatttttggagtgccagaggaagaagttgatgatcttttaaggtcaagggcaaaggccgttaattttggaattatttatggtatctcttcttttggactttctgagactgtaagtattacaccagaagaggcagagaaatttatagactcgtattttaagcactatccaagagtgaagctttttatagataagactattcatgaggcaagagaaaaactgtacgttaaaaccttatttggcagaaaaagatatattcctgagattaagagcataaataaacaggtaattaatgcctatgaaaggatagcaataaatgcgccaattcagggaacagctgctgatattataaaacttgccatgatagaaatttacaaggagattgaaaataaaaatctcaagtcaagaatactccttcaaattcatgatgagcttattcttgaagtgccagaggaggagatggaatttactcctttaatggcaaaggaaaaaatggaaaaggtggtagaactttcggttcctcttgtagttgaaatctcggtaggtaaaaatcttgctgaattaaaatgagctataagattggtcgac

SEQ ID NO: 2166 - DNA, 2673 bp, Artificial Sequence
  Description of Artificial Sequence: Synthetic DNA sequence of Dictyoglomus thermophilum DNA R792L
atgaaatacctgctgccgaccgctgctgctggtctgctgctcctcgctgcccagccggcgatggccatggatatcggaattaattcggatccgaaatctctgtgggatctttttcaagaaaataccgagaaagagtccaaaaggaagattctgattattgatggctcaagcctcatatacagggtttattacgcccttccccctttaaagacaaaaaatggtgaattaactaatgctctttatggcttcataagaatacttttaaaggccgtagaagattttaatcctgatcttgtaggcgttgcctttgatagacctgaacctacttttaggcatgtgatttataaagagtataaggctaagagaccacctatgaaggatgatttgaaagcgcagataccatggataagagaatttctaaggttaaatgatatacctctattggaagagcctggctatgaagcggatgatataatagctactatagtgaataaatataaggatgatttaaaatatattctctctggagatttagatcttttgcaattagtctcggacaaaacctttctaatacatcctcaaaagggaattactgagtttactatttatgatccaaaagctgtaaaggataggtttggagtagagccctataagattcccttatacaaagtattagtaggggacgaatctgataatattccaggagtaaatggaataggtcctaaaaaggcctcaaagattcttgagaaaatttcaagtgtagatgaatttaaaagtaaaataaaagttttggatagtgatttaagggagcttattgagaaaaattggaatattattgaaagaaatttagaacttgttactttaaaaaatatagataaggatcttattcttaaacccttcgagattaaaagagatgaaaaagtaatagattttttgaagagatatgaacttaagagtattcttcaaaagttatttcctgatcttcaagaggaagaaaatatagagattaaagatgtcgaagagatcaattttaatgaggtagaaaaagaaggctactttgcctttaaatgtcttggagatagggcttttgagggtatttctctttccttcaaggagggggaaggatattttatatctccttttgatttcaataatgagataagaaagaagattgaaaatataatttcttcagagaatgttaaaaaaattggctcttatattcaaagagatttacattttttaaactgtaaaataaagggcgatgtatttgatgttagtctcgcatcttatcttttgaaccctgaaagacaaaatcactctcttgatattttgataggagagtatctaaataaaacctcttttattcctcaaaaatacgctggttatctttttccgttaaagtctattcttgaggagaggataaagaatgaagggttagaatttgtactttataacatagagattccattaatccctgtactttactccatggagaagtgggggataaaggtagataaggaatatttaaaacagctttctgatgaattctgcgagagaattaaaaaattggaagaagagatatatgaacttgcaggaaccagatttaatctcaattctccaaaacaactttctgaagttttatttgagaggttaaaacttccttctggtaagaaaggaaaaacaggatattctacgtcgtcttctgtgcttcaaaacttaataaatgctcatcctatagtgagaaaaatcctccaatatagagaactctataaattgaagagtacttatgtggatgctattcctaatctggttaatccacaaacaggtagagttcatacaaaatttaatcctacaggtacagctacaggaagaataagtagtagtgaacctaatcttcagaatattcctataaaaagtgaagaaggtagaaagataagaagagccttcgtgtcagaagatggatattttcttgtatctcttgattattctcagatagagctaaggattatggctcatctttctcaggagcctaaattaatatctgccttccaaaaaggagaggatattcatagaagaacagcatcggagatttttggagtgccagaggaagaagttgatgatcttttaaggtcaagggcaaaggccgttaattttggaattatttatggtatctcttcttttggactttctgagactgtaagtattacaccagaagaggcagagaaatttatagactcgtattttaagcactatccaagagtgaagctttttatagataagactattcatgaggcaagagaaaaactgtacgttaaaaccttatttggcagaaaaagatatattcctgagattaagagcataaataaacaggtacttaatgcctatgaaaggatagcaataaatgcgccaattcagggaacagctgctgatattataaaacttgccatgatagaaatttacaaggagattgaaaataaaaatctcaagtcaagaatactccttcaaattcatgatgagcttattcttgaagtgccagaggaggagatggaatttactcctttaatggcaaaggaaaaaatggaaaaggtggtagaactttcggttcctcttgtagttgaaatctcggtaggtaaaaatcttgctgaattaaaatgagctataagattggtcgac

SEQ ID NO: 2167 - DNA, 2673 bp, Artificial Sequence
  Description of Artificial Sequence: Synthetic DNA sequence of Dictyoglomus thermophilum DNA R792K
atgaaatacctgctgccgaccgctgctgctggtctgctgctcctcgctgcccagccggcgatggccatggatatcggaattaattcggatccgaaatctctgtgggatctttttcaagaaaataccgagaaagagtccaaaaggaagattctgattattgatggctcaagcctcatatacagggtttattacgcccttccccctttaaagacaaaaaatggtgaattaactaatgctctttatggcttcataagaatacttttaaaggccgtagaagattttaatcctgatcttgtaggcgttgcctttgatagacctgaacctacttttaggcatgtgatttataaagagtataaggctaagagaccacctatgaaggatgatttgaaagcgcagataccatggataagagaatttctaaggttaaatgatatacctctattggaagagcctggctatgaagcggatgatataatagctactatagtgaataaatataaggatgatttaaaatatattctctctggagatttagatcttttgcaattagtctcggacaaaacctttctaatacatcctcaaaagggaattactgagtttactatttatgatccaaaagctgtaaaggataggtttggagtagagccctataagattcccttatacaaagtattagtaggggacgaatctgataatattccaggagtaaatggaataggtcctaaaaaggcctcaaagattcttgagaaaatttcaagtgtagatgaatttaaaagtaaaataaaagttttggatagtgatttaagggagcttattgagaaaaattggaatattattgaaagaaatttagaacttgttactttaaaaaatatagataaggatcttattcttaaacccttcgagattaaaagagatgaaaaagtaatagattttttgaagagatatgaacttaagagtattcttcaaaagttatttcctgatcttcaagaggaagaaaatatagagattaaagatgtcgaagagatcaattttaatgaggtagaaaaagaaggctactttgcctttaaatgtcttggagatagggcttttgagggtatttctctttccttcaaggagggggaaggatattttatatctccttttgatttcaataatgagataagaaagaagattgaaaatataatttcttcagagaatgttaaaaaaattggctcttatattcaaagagatttacattttttaaactgtaaaataaagggcgatgtatttgatgttagtctcgcatcttatcttttgaaccctgaaagacaaaatcactctcttgatattttgataggagagtatctaaataaaacctcttttattcctcaaaaatacgctggttatctttttccgttaaagtctattcttgaggagaggataaagaatgaagggttagaatttgtactttataacatagagattccattaatccctgtactttactccatggagaagtgggggataaaggtagataaggaatatttaaaacagctttctgatgaattctgcgagagaattaaaaaattggaagaagagatatatgaacttgcaggaaccagatttaatctcaattctccaaaacaactttctgaagttttatttgagaggttaaaacttccttctggtaagaaaggaaaaacaggatattctacgtcgtcttctgtgcttcaaaacttaataaatgctcatcctatagtgagaaaaatcctccaatatagagaactctataaattgaagagtacttatgtggatgctattcctaatctggttaatccacaaacaggtagagttcatacaaaatttaatcctacaggtacagctacaggaagaataagtagtagtgaacctaatcttcagaatattcctataaaaagtgaagaaggtagaaagataagaagagccttcgtgtcagaagatggatattttcttgtatctcttgattattctcagatagagctaaggattatggctcatctttctcaggagcctaaattaatatctgccttccaaaaaggagaggatattcatagaagaacagcatcggagatttttggagtgccagaggaagaagttgatgatcttttaaggtcaagggcaaaggccgttaattttggaattatttatggtatctcttcttttggactttctgagactgtaagtattacaccagaagaggcagagaaatttatagactcgtattttaagcactatccaagagtgaagctttttatagataagactattcatgaggcaagagaaaaactgtacgttaaaaccttatttggcagaaaaagatatattcctgagattaagagcataaataaacaggtaaaaaatgcctatgaaaggatagcaataaatgcgccaattcagggaacagctgctgatattataaaacttgccatgatagaaatttacaaggagattgaaaataaaaatctcaagtcaagaatactccttcaaattcatgatgagcttattcttgaagtgccagaggaggagatggaatttactcctttaatggcaaaggaaaaaatggaaaaggtggtagaactttcggttcctcttgtagttgaaatctcggtaggtaaaaatcttgctgaattaaaatgagctataagattggtcgac

SEQ ID NO: 2168 - DNA, 2673 bp, Artificial Sequence
  Description of Artificial Sequence: Synthetic DNA sequence of Dictyoglomus thermophilum DNA R792M
atgaaatacctgctgccgaccgctgctgctggtctgctgctcctcgctgcccagccggcgatggccatggatatcggaattaattcggatccgaaatctctgtgggatctttttcaagaaaataccgagaaagagtccaaaaggaagattctgattattgatggctcaagcctcatatacagggtttattacgcccttccccctttaaagacaaaaaatggtgaattaactaatgctctttatggcttcataagaatacttttaaaggccgtagaagattttaatcctgatcttgtaggcgttgcctttgatagacctgaacctacttttaggcatgtgatttataaagagtataaggctaagagaccacctatgaaggatgatttgaaagcgcagataccatggataagagaatttctaaggttaaatgatatacctctattggaagagcctggctatgaagcggatgatataatagctactatagtgaataaatataaggatgatttaaaatatattctctctggagatttagatcttttgcaattagtctcggacaaaacctttctaatacatcctcaaaagggaattactgagtttactatttatgatccaaaagctgtaaaggataggtttggagtagagccctataagattcccttatacaaagtattagtaggggacgaatctgataatattccaggagtaaatggaataggtcctaaaaaggcctcaaagattcttgagaaaatttcaagtgtagatgaatttaaaagtaaaataaaagttttggatagtgatttaagggagcttattgagaaaaattggaatattattgaaagaaatttagaacttgttactttaaaaaatatagataaggatcttattcttaaacccttcgagattaaaagagatgaaaaagtaatagattttttgaagagatatgaacttaagagtattcttcaaaagttatttcctgatcttcaagaggaagaaaatatagagattaaagatgtcgaagagatcaattttaatgaggtagaaaaagaaggctactttgcctttaaatgtcttggagatagggcttttgagggtatttctctttccttcaaggagggggaaggatattttatatctccttttgatttcaataatgagataagaaagaagattgaaaatataatttcttcagagaatgttaaaaaaattggctcttatattcaaagagatttacattttttaaactgtaaaataaagggcgatgtatttgatgttagtctcgcatcttatcttttgaaccctgaaagacaaaatcactctcttgatattttgataggagagtatctaaataaaacctcttttattcctcaaaaatacgctggttatctttttccgttaaagtctattcttgaggagaggataaagaatgaagggttagaatttgtactttataacatagagattccattaatccctgtactttactccatggagaagtgggggataaaggtagataaggaatatttaaaacagctttctgatgaattctgcgagagaattaaaaaattggaagaagagatatatgaacttgcaggaaccagatttaatctcaattctccaaaacaactttctgaagttttatttgagaggttaaaacttccttctggtaagaaaggaaaaacaggatattctacgtcgtcttctgtgcttcaaaacttaataaatgctcatcctatagtgagaaaaatcctccaatatagagaactctataaattgaagagtacttatgtggatgctattcctaatctggttaatccacaaacaggtagagttcatacaaaatttaatcctacaggtacagctacaggaagaataagtagtagtgaacctaatcttcagaatattcctataaaaagtgaagaaggtagaaagataagaagagccttcgtgtcagaagatggatattttcttgtatctcttgattattctcagatagagctaaggattatggctcatctttctcaggagcctaaattaatatctgccttccaaaaaggagaggatattcatagaagaacagcatcggagatttttggagtgccagaggaagaagttgatgatcttttaaggtcaagggcaaaggccgttaattttggaattatttatggtatctcttcttttggactttctgagactgtaagtattacaccagaagaggcagagaaatttatagactcgtattttaagcactatccaagagtgaagctttttatagataagactattcatgaggcaagagaaaaactgtacgttaaaaccttatttggcagaaaaagatatattcctgagattaagagcataaataaacaggtaatgaatgcctatgaaaggatagcaataaatgcgccaattcagggaacagctgctgatattataaaacttgccatgatagaaatttacaaggagattgaaaataaaaatctcaagtcaagaatactccttcaaattcatgatgagcttattcttgaagtgccagaggaggagatggaatttactcctttaatggcaaaggaaaaaatggaaaaggtggtagaactttcggttcctcttgtagttgaaatctcggtaggtaaaaatcttgctgaattaaaatgagctataagattggtcgac

SEQ ID NO: 2169 - DNA, 2673 bp, Artificial Sequence
  Description of Artificial Sequence: Synthetic DNA sequence of Dictyoglomus thermophilum DNA R792F
atgaaatacctgctgccgaccgctgctgctggtctgctgctcctcgctgcccagccggcgatggccatggatatcggaattaattcggatccgaaatctctgtgggatctttttcaagaaaataccgagaaagagtccaaaaggaagattctgattattgatggctcaagcctcatatacagggtttattacgcccttccccctttaaagacaaaaaatggtgaattaactaatgctctttatggcttcataagaatacttttaaaggccgtagaagattttaatcctgatcttgtaggcgttgcctttgatagacctgaacctacttttaggcatgtgatttataaagagtataaggctaagagaccacctatgaaggatgatttgaaagcgcagataccatggataagagaatttctaaggttaaatgatatacctctattggaagagcctggctatgaagcggatgatataatagctactatagtgaataaatataaggatgatttaaaatatattctctctggagatttagatcttttgcaattagtctcggacaaaacctttctaatacatcctcaaaagggaattactgagtttactatttatgatccaaaagctgtaaaggataggtttggagtagagccctataagattcccttatacaaagtattagtaggggacgaatctgataatattccaggagtaaatggaataggtcctaaaaaggcctcaaagattcttgagaaaatttcaagtgtagatgaatttaaaagtaaaataaaagttttggatagtgatttaagggagcttattgagaaaaattggaatattattgaaagaaatttagaacttgttactttaaaaaatatagataaggatcttattcttaaacccttcgagattaaaagagatgaaaaagtaatagattttttgaagagatatgaacttaagagtattcttcaaaagttatttcctgatcttcaagaggaagaaaatatagagattaaagatgtcgaagagatcaattttaatgaggtagaaaaagaaggctactttgcctttaaatgtcttggagatagggcttttgagggtatttctctttccttcaaggagggggaaggatattttatatctccttttgatttcaataatgagataagaaagaagattgaaaatataatttcttcagagaatgttaaaaaaattggctcttatattcaaagagatttacattttttaaactgtaaaataaagggcgatgtatttgatgttagtctcgcatcttatcttttgaaccctgaaagacaaaatcactctcttgatattttgataggagagtatctaaataaaacctcttttattcctcaaaaatacgctggttatctttttccgttaaagtctattcttgaggagaggataaagaatgaagggttagaatttgtactttataacatagagattccattaatccctgtactttactccatggagaagtgggggataaaggtagataaggaatatttaaaacagctttctgatgaattctgcgagagaattaaaaaattggaagaagagatatatgaacttgcaggaaccagatttaatctcaattctccaaaacaactttctgaagttttatttgagaggttaaaacttccttctggtaagaaaggaaaaacaggatattctacgtcgtcttctgtgcttcaaaacttaataaatgctcatcctatagtgagaaaaatcctccaatatagagaactctataaattgaagagtacttatgtggatgctattcctaatctggttaatccacaaacaggtagagttcatacaaaatttaatcctacaggtacagctacaggaagaataagtagtagtgaacctaatcttcagaatattcctataaaaagtgaagaaggtagaaagataagaagagccttcgtgtcagaagatggatattttcttgtatctcttgattattctcagatagagctaaggattatggctcatctttctcaggagcctaaattaatatctgccttccaaaaaggagaggatattcatagaagaacagcatcggagatttttggagtgccagaggaagaagttgatgatcttttaaggtcaagggcaaaggccgttaattttggaattatttatggtatctcttcttttggactttctgagactgtaagtattacaccagaagaggcagagaaatttatagactcgtattttaagcactatccaagagtgaagctttttatagataagactattcatgaggcaagagaaaaactgtacgttaaaaccttatttggcagaaaaagatatattcctgagattaagagcataaataaacaggtatttaatgcctatgaaaggatagcaataaatgcgccaattcagggaacagctgctgatattataaaacttgccatgatagaaatttacaaggagattgaaaataaaaatctcaagtcaagaatactccttcaaattcatgatgagcttattcttgaagtgccagaggaggagatggaatttactcctttaatggcaaaggaaaaaatggaaaaggtggtagaactttcggttcctcttgtagttgaaatctcggtaggtaaaaatcttgctgaattaaaatgagctataagattggtcgac

SEQ ID NO: 2170 - DNA, 2673 bp, Artificial Sequence
  Description of Artificial Sequence: Synthetic DNA sequence of Dictyoglomus thermophilum DNA R792P
atgaaatacctgctgccgaccgctgctgctggtctgctgctcctcgctgcccagccggcgatggccatggatatcggaattaattcggatccgaaatctctgtgggatctttttcaagaaaataccgagaaagagtccaaaaggaagattctgattattgatggctcaagcctcatatacagggtttattacgcccttccccctttaaagacaaaaaatggtgaattaactaatgctctttatggcttcataagaatacttttaaaggccgtagaagattttaatcctgatcttgtaggcgttgcctttgatagacctgaacctacttttaggcatgtgatttataaagagtataaggctaagagaccacctatgaaggatgatttgaaagcgcagataccatggataagagaatttctaaggttaaatgatatacctctattggaagagcctggctatgaagcggatgatataatagctactatagtgaataaatataaggatgatttaaaatatattctctctggagatttagatcttttgcaattagtctcggacaaaacctttctaatacatcctcaaaagggaattactgagtttactatttatgatccaaaagctgtaaaggataggtttggagtagagccctataagattcccttatacaaagtattagtaggggacgaatctgataatattccaggagtaaatggaataggtcctaaaaaggcctcaaagattcttgagaaaatttcaagtgtagatgaatttaaaagtaaaataaaagttttggatagtgatttaagggagcttattgagaaaaattggaatattattgaaagaaatttagaacttgttactttaaaaaatatagataaggatcttattcttaaacccttcgagattaaaagagatgaaaaagtaatagattttttgaagagatatgaacttaagagtattcttcaaaagttatttcctgatcttcaagaggaagaaaatatagagattaaagatgtcgaagagatcaattttaatgaggtagaaaaagaaggctactttgcctttaaatgtcttggagatagggcttttgagggtatttctctttccttcaaggagggggaaggatattttatatctccttttgatttcaataatgagataagaaagaagattgaaaatataatttcttcagagaatgttaaaaaaattggctcttatattcaaagagatttacattttttaaactgtaaaataaagggcgatgtatttgatgttagtctcgcatcttatcttttgaaccctgaaagacaaaatcactctcttgatattttgataggagagtatctaaataaaacctcttttattcctcaaaaatacgctggttatctttttccgttaaagtctattcttgaggagaggataaagaatgaagggttagaatttgtactttataacatagagattccattaatccctgtactttactccatggagaagtgggggataaaggtagataaggaatatttaaaacagctttctgatgaattctgcgagagaattaaaaaattggaagaagagatatatgaacttgcaggaaccagatttaatctcaattctccaaaacaactttctgaagttttatttgagaggttaaaacttccttctggtaagaaaggaaaaacaggatattctacgtcgtcttctgtgcttcaaaacttaataaatgctcatcctatagtgagaaaaatcctccaatatagagaactctataaattgaagagtacttatgtggatgctattcctaatctggttaatccacaaacaggtagagttcatacaaaatttaatcctacaggtacagctacaggaagaataagtagtagtgaacctaatcttcagaatattcctataaaaagtgaagaaggtagaaagataagaagagccttcgtgtcagaagatggatattttcttgtatctcttgattattctcagatagagctaaggattatggctcatctttctcaggagcctaaattaatatctgccttccaaaaaggagaggatattcatagaagaacagcatcggagatttttggagtgccagaggaagaagttgatgatcttttaaggtcaagggcaaaggccgttaattttggaattatttatggtatctcttcttttggactttctgagactgtaagtattacaccagaagaggcagagaaatttatagactcgtattttaagcactatccaagagtgaagctttttatagataagactattcatgaggcaagagaaaaactgtacgttaaaaccttatttggcagaaaaagatatattcctgagattaagagcataaataaacaggtacctaatgcctatgaaaggatagcaataaatgcgccaattcagggaacagctgctgatattataaaacttgccatgatagaaatttacaaggagattgaaaataaaaatctcaagtcaagaatactccttcaaattcatgatgagcttattcttgaagtgccagaggaggagatggaatttactcctttaatggcaaaggaaaaaatggaaaaggtggtagaactttcggttcctcttgtagttgaaatctcggtaggtaaaaatcttgctgaattaaaatgagctataagattggtcgac

SEQ ID NO: 2171 - DNA, 2673 bp, Artificial Sequence
  Description of Artificial Sequence: Synthetic DNA sequence of Dictyoglomus thermophilum DNA R792S
atgaaatacctgctgccgaccgctgctgctggtctgctgctcctcgctgcccagccggcgatggccatggatatcggaattaattcggatccgaaatctctgtgggatctttttcaagaaaataccgagaaagagtccaaaaggaagattctgattattgatggctcaagcctcatatacagggtttattacgcccttccccctttaaagacaaaaaatggtgaattaactaatgctctttatggcttcataagaatacttttaaaggccgtagaagattttaatcctgatcttgtaggcgttgcctttgatagacctgaacctacttttaggcatgtgatttataaagagtataaggctaagagaccacctatgaaggatgatttgaaagcgcagataccatggataagagaatttctaaggttaaatgatatacctctattggaagagcctggctatgaagcggatgatataatagctactatagtgaataaatataaggatgatttaaaatatattctctctggagatttagatcttttgcaattagtctcggacaaaacctttctaatacatcctcaaaagggaattactgagtttactatttatgatccaaaagctgtaaaggataggtttggagtagagccctataagattcccttatacaaagtattagtaggggacgaatctgataatattccaggagtaaatggaataggtcctaaaaaggcctcaaagattcttgagaaaatttcaagtgtagatgaatttaaaagtaaaataaaagttttggatagtgatttaagggagcttattgagaaaaattggaatattattgaaagaaatttagaacttgttactttaaaaaatatagataaggatcttattcttaaacccttcgagattaaaagagatgaaaaagtaatagattttttgaagagatatgaacttaagagtattcttcaaaagttatttcctgatcttcaagaggaagaaaatatagagattaaagatgtcgaagagatcaattttaatgaggtagaaaaagaaggctactttgcctttaaatgtcttggagatagggcttttgagggtatttctctttccttcaaggagggggaaggatattttatatctccttttgatttcaataatgagataagaaagaagattgaaaatataatttcttcagagaatgttaaaaaaattggctcttatattcaaagagatttacattttttaaactgtaaaataaagggcgatgtatttgatgttagtctcgcatcttatcttttgaaccctgaaagacaaaatcactctcttgatattttgataggagagtatctaaataaaacctcttttattcctcaaaaatacgctggttatctttttccgttaaagtctattcttgaggagaggataaagaatgaagggttagaatttgtactttataacatagagattccattaatccctgtactttactccatggagaagtgggggataaaggtagataaggaatatttaaaacagctttctgatgaattctgcgagagaattaaaaaattggaagaagagatatatgaacttgcaggaaccagatttaatctcaattctccaaaacaactttctgaagttttatttgagaggttaaaacttccttctggtaagaaaggaaaaacaggatattctacgtcgtcttctgtgcttcaaaacttaataaatgctcatcctatagtgagaaaaatcctccaatatagagaactctataaattgaagagtacttatgtggatgctattcctaatctggttaatccacaaacaggtagagttcatacaaaatttaatcctacaggtacagctacaggaagaataagtagtagtgaacctaatcttcagaatattcctataaaaagtgaagaaggtagaaagataagaagagccttcgtgtcagaagatggatattttcttgtatctcttgattattctcagatagagctaaggattatggctcatctttctcaggagcctaaattaatatctgccttccaaaaaggagaggatattcatagaagaacagcatcggagatttttggagtgccagaggaagaagttgatgatcttttaaggtcaagggcaaaggccgttaattttggaattatttatggtatctcttcttttggactttctgagactgtaagtattacaccagaagaggcagagaaatttatagactcgtattttaagcactatccaagagtgaagctttttatagataagactattcatgaggcaagagaaaaactgtacgttaaaaccttatttggcagaaaaagatatattcctgagattaagagcataaataaacaggtatctaatgcctatgaaaggatagcaataaatgcgccaattcagggaacagctgctgatattataaaacttgccatgatagaaatttacaaggagattgaaaataaaaatctcaagtcaagaatactccttcaaattcatgatgagcttattcttgaagtgccagaggaggagatggaatttactcctttaatggcaaaggaaaaaatggaaaaggtggtagaactttcggttcctcttgtagttgaaatctcggtaggtaaaaatcttgctgaattaaaatgagctataagattggtcgac

SEQ ID NO: 2172 - DNA, 2673 bp, Artificial Sequence
  Description of Artificial Sequence: Synthetic DNA sequence of Dictyoglomus thermophilum DNA R792T
atgaaatacctgctgccgaccgctgctgctggtctgctgctcctcgctgcccagccggcgatggccatggatatcggaattaattcggatccgaaatctctgtgggatctttttcaagaaaataccgagaaagagtccaaaaggaagattctgattattgatggctcaagcctcatatacagggtttattacgcccttccccctttaaagacaaaaaatggtgaattaactaatgctctttatggcttcataagaatacttttaaaggccgtagaagattttaatcctgatcttgtaggcgttgcctttgatagacctgaacctacttttaggcatgtgatttataaagagtataaggctaagagaccacctatgaaggatgatttgaaagcgcagataccatggataagagaatttctaaggttaaatgatatacctctattggaagagcctggctatgaagcggatgatataatagctactatagtgaataaatataaggatgatttaaaatatattctctctggagatttagatcttttgcaattagtctcggacaaaacctttctaatacatcctcaaaagggaattactgagtttactatttatgatccaaaagctgtaaaggataggtttggagtagagccctataagattcccttatacaaagtattagtaggggacgaatctgataatattccaggagtaaatggaataggtcctaaaaaggcctcaaagattcttgagaaaatttcaagtgtagatgaatttaaaagtaaaataaaagttttggatagtgatttaagggagcttattgagaaaaattggaatattattgaaagaaatttagaacttgttactttaaaaaatatagataaggatcttattcttaaacccttcgagattaaaagagatgaaaaagtaatagattttttgaagagatatgaacttaagagtattcttcaaaagttatttcctgatcttcaagaggaagaaaatatagagattaaagatgtcgaagagatcaattttaatgaggtagaaaaagaaggctactttgcctttaaatgtcttggagatagggcttttgagggtatttctctttccttcaaggagggggaaggatattttatatctccttttgatttcaataatgagataagaaagaagattgaaaatataatttcttcagagaatgttaaaaaaattggctcttatattcaaagagatttacattttttaaactgtaaaataaagggcgatgtatttgatgttagtctcgcatcttatcttttgaaccctgaaagacaaaatcactctcttgatattttgataggagagtatctaaataaaacctcttttattcctcaaaaatacgctggttatctttttccgttaaagtctattcttgaggagaggataaagaatgaagggttagaatttgtactttataacatagagattccattaatccctgtactttactccatggagaagtgggggataaaggtagataaggaatatttaaaacagctttctgatgaattctgcgagagaattaaaaaattggaagaagagatatatgaacttgcaggaaccagatttaatctcaattctccaaaacaactttctgaagttttatttgagaggttaaaacttccttctggtaagaaaggaaaaacaggatattctacgtcgtcttctgtgcttcaaaacttaataaatgctcatcctatagtgagaaaaatcctccaatatagagaactctataaattgaagagtacttatgtggatgctattcctaatctggttaatccacaaacaggtagagttcatacaaaatttaatcctacaggtacagctacaggaagaataagtagtagtgaacctaatcttcagaatattcctataaaaagtgaagaaggtagaaagataagaagagccttcgtgtcagaagatggatattttcttgtatctcttgattattctcagatagagctaaggattatggctcatctttctcaggagcctaaattaatatctgccttccaaaaaggagaggatattcatagaagaacagcatcggagatttttggagtgccagaggaagaagttgatgatcttttaaggtcaagggcaaaggccgttaattttggaattatttatggtatctcttcttttggactttctgagactgtaagtattacaccagaagaggcagagaaatttatagactcgtattttaagcactatccaagagtgaagctttttatagataagactattcatgaggcaagagaaaaactgtacgttaaaaccttatttggcagaaaaagatatattcctgagattaagagcataaataaacaggtaactaatgcctatgaaaggatagcaataaatgcgccaattcagggaacagctgctgatattataaaacttgccatgatagaaatttacaaggagattgaaaataaaaatctcaagtcaagaatactccttcaaattcatgatgagcttattcttgaagtgccagaggaggagatggaatttactcctttaatggcaaaggaaaaaatggaaaaggtggtagaactttcggttcctcttgtagttgaaatctcggtaggtaaaaatcttgctgaattaaaatgagctataagattggtcgac

SEQ ID NO: 2173 - DNA, 2673 bp, Artificial Sequence
  Description of Artificial Sequence: Synthetic DNA sequence of Dictyoglomus thermophilum DNA R792W
atgaaatacctgctgccgaccgctgctgctggtctgctgctcctcgctgcccagccggcgatggccatggatatcggaattaattcggatccgaaatctctgtgggatctttttcaagaaaataccgagaaagagtccaaaaggaagattctgattattgatggctcaagcctcatatacagggtttattacgcccttccccctttaaagacaaaaaatggtgaattaactaatgctctttatggcttcataagaatacttttaaaggccgtagaagattttaatcctgatcttgtaggcgttgcctttgatagacctgaacctacttttaggcatgtgatttataaagagtataaggctaagagaccacctatgaaggatgatttgaaagcgcagataccatggataagagaatttctaaggttaaatgatatacctctattggaagagcctggctatgaagcggatgatataatagctactatagtgaataaatataaggatgatttaaaatatattctctctggagatttagatcttttgcaattagtctcggacaaaacctttctaatacatcctcaaaagggaattactgagtttactatttatgatccaaaagctgtaaaggataggtttggagtagagccctataagattcccttatacaaagtattagtaggggacgaatctgataatattccaggagtaaatggaataggtcctaaaaaggcctcaaagattcttgagaaaatttcaagtgtagatgaatttaaaagtaaaataaaagttttggatagtgatttaagggagcttattgagaaaaattggaatattattgaaagaaatttagaacttgttactttaaaaaatatagataaggatcttattcttaaacccttcgagattaaaagagatgaaaaagtaatagattttttgaagagatatgaacttaagagtattcttcaaaagttatttcctgatcttcaagaggaagaaaatatagagattaaagatgtcgaagagatcaattttaatgaggtagaaaaagaaggctactttgcctttaaatgtcttggagatagggcttttgagggtatttctctttccttcaaggagggggaaggatattttatatctccttttgatttcaataatgagataagaaagaagattgaaaatataatttcttcagagaatgttaaaaaaattggctcttatattcaaagagatttacattttttaaactgtaaaataaagggcgatgtatttgatgttagtctcgcatcttatcttttgaaccctgaaagacaaaatcactctcttgatattttgataggagagtatctaaataaaacctcttttattcctcaaaaatacgctggttatctttttccgttaaagtctattcttgaggagaggataaagaatgaagggttagaatttgtactttataacatagagattccattaatccctgtactttactccatggagaagtgggggataaaggtagataaggaatatttaaaacagctttctgatgaattctgcgagagaattaaaaaattggaagaagagatatatgaacttgcaggaaccagatttaatctcaattctccaaaacaactttctgaagttttatttgagaggttaaaacttccttctggtaagaaaggaaaaacaggatattctacgtcgtcttctgtgcttcaaaacttaataaatgctcatcctatagtgagaaaaatcctccaatatagagaactctataaattgaagagtacttatgtggatgctattcctaatctggttaatccacaaacaggtagagttcatacaaaatttaatcctacaggtacagctacaggaagaataagtagtagtgaacctaatcttcagaatattcctataaaaagtgaagaaggtagaaagataagaagagccttcgtgtcagaagatggatattttcttgtatctcttgattattctcagatagagctaaggattatggctcatctttctcaggagcctaaattaatatctgccttccaaaaaggagaggatattcatagaagaacagcatcggagatttttggagtgccagaggaagaagttgatgatcttttaaggtcaagggcaaaggccgttaattttggaattatttatggtatctcttcttttggactttctgagactgtaagtattacaccagaagaggcagagaaatttatagactcgtattttaagcactatccaagagtgaagctttttatagataagactattcatgaggcaagagaaaaactgtacgttaaaaccttatttggcagaaaaagatatattcctgagattaagagcataaataaacaggtatggaatgcctatgaaaggatagcaataaatgcgccaattcagggaacagctgctgatattataaaacttgccatgatagaaatttacaaggagattgaaaataaaaatctcaagtcaagaatactccttcaaattcatgatgagcttattcttgaagtgccagaggaggagatggaatttactcctttaatggcaaaggaaaaaatggaaaaggtggtagaactttcggttcctcttgtagttgaaatctcggtaggtaaaaatcttgctgaattaaaatgagctataagattggtcgac

SEQ ID NO: 2174 - DNA, 2673 bp, Artificial Sequence
  Description of Artificial Sequence: Synthetic DNA sequence of Dictyoglomus thermophilum DNA R792Y
atgaaatacctgctgccgaccgctgctgctggtctgctgctcctcgctgcccagccggcgatggccatggatatcggaattaattcggatccgaaatctctgtgggatctttttcaagaaaataccgagaaagagtccaaaaggaagattctgattattgatggctcaagcctcatatacagggtttattacgcccttccccctttaaagacaaaaaatggtgaattaactaatgctctttatggcttcataagaatacttttaaaggccgtagaagattttaatcctgatcttgtaggcgttgcctttgatagacctgaacctacttttaggcatgtgatttataaagagtataaggctaagagaccacctatgaaggatgatttgaaagcgcagataccatggataagagaatttctaaggttaaatgatatacctctattggaagagcctggctatgaagcggatgatataatagctactatagtgaataaatataaggatgatttaaaatatattctctctggagatttagatcttttgcaattagtctcggacaaaacctttctaatacatcctcaaaagggaattactgagtttactatttatgatccaaaagctgtaaaggataggtttggagtagagccctataagattcccttatacaaagtattagtaggggacgaatctgataatattccaggagtaaatggaataggtcctaaaaaggcctcaaagattcttgagaaaatttcaagtgtagatgaatttaaaagtaaaataaaagttttggatagtgatttaagggagcttattgagaaaaattggaatattattgaaagaaatttagaacttgttactttaaaaaatatagataaggatcttattcttaaacccttcgagattaaaagagatgaaaaagtaatagattttttgaagagatatgaacttaagagtattcttcaaaagttatttcctgatcttcaagaggaagaaaatatagagattaaagatgtcgaagagatcaattttaatgaggtagaaaaagaaggctactttgcctttaaatgtcttggagatagggcttttgagggtatttctctttccttcaaggagggggaaggatattttatatctccttttgatttcaataatgagataagaaagaagattgaaaatataatttcttcagagaatgttaaaaaaattggctcttatattcaaagagatttacattttttaaactgtaaaataaagggcgatgtatttgatgttagtctcgcatcttatcttttgaaccctgaaagacaaaatcactctcttgatattttgataggagagtatctaaataaaacctcttttattcctcaaaaatacgctggttatctttttccgttaaagtctattcttgaggagaggataaagaatgaagggttagaatttgtactttataacatagagattccattaatccctgtactttactccatggagaagtgggggataaaggtagataaggaatatttaaaacagctttctgatgaattctgcgagagaattaaaaaattggaagaagagatatatgaacttgcaggaaccagatttaatctcaattctccaaaacaactttctgaagttttatttgagaggttaaaacttccttctggtaagaaaggaaaaacaggatattctacgtcgtcttctgtgcttcaaaacttaataaatgctcatcctatagtgagaaaaatcctccaatatagagaactctataaattgaagagtacttatgtggatgctattcctaatctggttaatccacaaacaggtagagttcatacaaaatttaatcctacaggtacagctacaggaagaataagtagtagtgaacctaatcttcagaatattcctataaaaagtgaagaaggtagaaagataagaagagccttcgtgtcagaagatggatattttcttgtatctcttgattattctcagatagagctaaggattatggctcatctttctcaggagcctaaattaatatctgccttccaaaaaggagaggatattcatagaagaacagcatcggagatttttggagtgccagaggaagaagttgatgatcttttaaggtcaagggcaaaggccgttaattttggaattatttatggtatctcttcttttggactttctgagactgtaagtattacaccagaagaggcagagaaatttatagactcgtattttaagcactatccaagagtgaagctttttatagataagactattcatgaggcaagagaaaaactgtacgttaaaaccttatttggcagaaaaagatatattcctgagattaagagcataaataaacaggtatataatgcctatgaaaggatagcaataaatgcgccaattcagggaacagctgctgatattataaaacttgccatgatagaaatttacaaggagattgaaaataaaaatctcaagtcaagaatactccttcaaattcatgatgagcttattcttgaagtgccagaggaggagatggaatttactcctttaatggcaaaggaaaaaatggaaaaggtggtagaactttcggttcctcttgtagttgaaatctcggtaggtaaaaatcttgctgaattaaaatgagctataagattggtcgac

SEQ ID NO: 2175 - DNA, 2673 bp, Artificial Sequence
  Description of Artificial Sequence: Synthetic DNA sequence of Dictyoglomus thermophilum DNA R792V
atgaaatacctgctgccgaccgctgctgctggtctgctgctcctcgctgcccagccggcgatggccatggatatcggaattaattcggatccgaaatctctgtgggatctttttcaagaaaataccgagaaagagtccaaaaggaagattctgattattgatggctcaagcctcatatacagggtttattacgcccttccccctttaaagacaaaaaatggtgaattaactaatgctctttatggcttcataagaatacttttaaaggccgtagaagattttaatcctgatcttgtaggcgttgcctttgatagacctgaacctacttttaggcatgtgatttataaagagtataaggctaagagaccacctatgaaggatgatttgaaagcgcagataccatggataagagaatttctaaggttaaatgatatacctctattggaagagcctggctatgaagcggatgatataatagctactatagtgaataaatataaggatgatttaaaatatattctctctggagatttagatcttttgcaattagtctcggacaaaacctttctaatacatcctcaaaagggaattactgagtttactatttatgatccaaaagctgtaaaggataggtttggagtagagccctataagattcccttatacaaagtattagtaggggacgaatctgataatattccaggagtaaatggaataggtcctaaaaaggcctcaaagattcttgagaaaatttcaagtgtagatgaatttaaaagtaaaataaaagttttggatagtgatttaagggagcttattgagaaaaattggaatattattgaaagaaatttagaacttgttactttaaaaaatatagataaggatcttattcttaaacccttcgagattaaaagagatgaaaaagtaatagattttttgaagagatatgaacttaagagtattcttcaaaagttatttcctgatcttcaagaggaagaaaatatagagattaaagatgtcgaagagatcaattttaatgaggtagaaaaagaaggctactttgcctttaaatgtcttggagatagggcttttgagggtatttctctttccttcaaggagggggaaggatattttatatctccttttgatttcaataatgagataagaaagaagattgaaaatataatttcttcagagaatgttaaaaaaattggctcttatattcaaagagatttacattttttaaactgtaaaataaagggcgatgtatttgatgttagtctcgcatcttatcttttgaaccctgaaagacaaaatcactctcttgatattttgataggagagtatctaaataaaacctcttttattcctcaaaaatacgctggttatctttttccgttaaagtctattcttgaggagaggataaagaatgaagggttagaatttgtactttataacatagagattccattaatccctgtactttactccatggagaagtgggggataaaggtagataaggaatatttaaaacagctttctgatgaattctgcgagagaattaaaaaattggaagaagagatatatgaacttgcaggaaccagatttaatctcaattctccaaaacaactttctgaagttttatttgagaggttaaaacttccttctggtaagaaaggaaaaacaggatattctacgtcgtcttctgtgcttcaaaacttaataaatgctcatcctatagtgagaaaaatcctccaatatagagaactctataaattgaagagtacttatgtggatgctattcctaatctggttaatccacaaacaggtagagttcatacaaaatttaatcctacaggtacagctacaggaagaataagtagtagtgaacctaatcttcagaatattcctataaaaagtgaagaaggtagaaagataagaagagccttcgtgtcagaagatggatattttcttgtatctcttgattattctcagatagagctaaggattatggctcatctttctcaggagcctaaattaatatctgccttccaaaaaggagaggatattcatagaagaacagcatcggagatttttggagtgccagaggaagaagttgatgatcttttaaggtcaagggcaaaggccgttaattttggaattatttatggtatctcttcttttggactttctgagactgtaagtattacaccagaagaggcagagaaatttatagactcgtattttaagcactatccaagagtgaagctttttatagataagactattcatgaggcaagagaaaaactgtacgttaaaaccttatttggcagaaaaagatatattcctgagattaagagcataaataaacaggtagttaatgcctatgaaaggatagcaataaatgcgccaattcagggaacagctgctgatattataaaacttgccatgatagaaatttacaaggagattgaaaataaaaatctcaagtcaagaatactccttcaaattcatgatgagcttattcttgaagtgccagaggaggagatggaatttactcctttaatggcaaaggaaaaaatggaaaaggtggtagaactttcggttcctcttgtagttgaaatctcggtaggtaaaaatcttgctgaattaaaatgagctataagattggtcgac

SEQ ID NO: 2176 - DNA, 2673 bp, Artificial Sequence
  Description of Artificial Sequence: Synthetic DNA sequence of Dictyoglomus thermophilum DNA N793A
atgaaatacctgctgccgaccgctgctgctggtctgctgctcctcgctgcccagccggcgatggccatggatatcggaattaattcggatccgaaatctctgtgggatctttttcaagaaaataccgagaaagagtccaaaaggaagattctgattattgatggctcaagcctcatatacagggtttattacgcccttccccctttaaagacaaaaaatggtgaattaactaatgctctttatggcttcataagaatacttttaaaggccgtagaagattttaatcctgatcttgtaggcgttgcctttgatagacctgaacctacttttaggcatgtgatttataaagagtataaggctaagagaccacctatgaaggatgatttgaaagcgcagataccatggataagagaatttctaaggttaaatgatatacctctattggaagagcctggctatgaagcggatgatataatagctactatagtgaataaatataaggatgatttaaaatatattctctctggagatttagatcttttgcaattagtctcggacaaaacctttctaatacatcctcaaaagggaattactgagtttactatttatgatccaaaagctgtaaaggataggtttggagtagagccctataagattcccttatacaaagtattagtaggggacgaatctgataatattccaggagtaaatggaataggtcctaaaaaggcctcaaagattcttgagaaaatttcaagtgtagatgaatttaaaagtaaaataaaagttttggatagtgatttaagggagcttattgagaaaaattggaatattattgaaagaaatttagaacttgttactttaaaaaatatagataaggatcttattcttaaacccttcgagattaaaagagatgaaaaagtaatagattttttgaagagatatgaacttaagagtattcttcaaaagttatttcctgatcttcaagaggaagaaaatatagagattaaagatgtcgaagagatcaattttaatgaggtagaaaaagaaggctactttgcctttaaatgtcttggagatagggcttttgagggtatttctctttccttcaaggagggggaaggatattttatatctccttttgatttcaataatgagataagaaagaagattgaaaatataatttcttcagagaatgttaaaaaaattggctcttatattcaaagagatttacattttttaaactgtaaaataaagggcgatgtatttgatgttagtctcgcatcttatcttttgaaccctgaaagacaaaatcactctcttgatattttgataggagagtatctaaataaaacctcttttattcctcaaaaatacgctggttatctttttccgttaaagtctattcttgaggagaggataaagaatgaagggttagaatttgtactttataacatagagattccattaatccctgtactttactccatggagaagtgggggataaaggtagataaggaatatttaaaacagctttctgatgaattctgcgagagaattaaaaaattggaagaagagatatatgaacttgcaggaaccagatttaatctcaattctccaaaacaactttctgaagttttatttgagaggttaaaacttccttctggtaagaaaggaaaaacaggatattctacgtcgtcttctgtgcttcaaaacttaataaatgctcatcctatagtgagaaaaatcctccaatatagagaactctataaattgaagagtacttatgtggatgctattcctaatctggttaatccacaaacaggtagagttcatacaaaatttaatcctacaggtacagctacaggaagaataagtagtagtgaacctaatcttcagaatattcctataaaaagtgaagaaggtagaaagataagaagagccttcgtgtcagaagatggatattttcttgtatctcttgattattctcagatagagctaaggattatggctcatctttctcaggagcctaaattaatatctgccttccaaaaaggagaggatattcatagaagaacagcatcggagatttttggagtgccagaggaagaagttgatgatcttttaaggtcaagggcaaaggccgttaattttggaattatttatggtatctcttcttttggactttctgagactgtaagtattacaccagaagaggcagagaaatttatagactcgtattttaagcactatccaagagtgaagctttttatagataagactattcatgaggcaagagaaaaactgtacgttaaaaccttatttggcagaaaaagatatattcctgagattaagagcataaataaacaggtaagggctgcctatgaaaggatagcaataaatgcgccaattcagggaacagctgctgatattataaaacttgccatgatagaaatttacaaggagattgaaaataaaaatctcaagtcaagaatactccttcaaattcatgatgagcttattcttgaagtgccagaggaggagatggaatttactcctttaatggcaaaggaaaaaatggaaaaggtggtagaactttcggttcctcttgtagttgaaatctcggtaggtaaaaatcttgctgaattaaaatgagctataagattggtcgac

SEQ ID NO: 2177 - DNA, 2673 bp, Artificial Sequence
  Description of Artificial Sequence: Synthetic DNA sequence of Dictyoglomus thermophilum DNA N793R
atgaaatacctgctgccgaccgctgctgctggtctgctgctcctcgctgcccagccggcgatggccatggatatcggaattaattcggatccgaaatctctgtgggatctttttcaagaaaataccgagaaagagtccaaaaggaagattctgattattgatggctcaagcctcatatacagggtttattacgcccttccccctttaaagacaaaaaatggtgaattaactaatgctctttatggcttcataagaatacttttaaaggccgtagaagattttaatcctgatcttgtaggcgttgcctttgatagacctgaacctacttttaggcatgtgatttataaagagtataaggctaagagaccacctatgaaggatgatttgaaagcgcagataccatggataagagaatttctaaggttaaatgatatacctctattggaagagcctggctatgaagcggatgatataatagctactatagtgaataaatataaggatgatttaaaatatattctctctggagatttagatcttttgcaattagtctcggacaaaacctttctaatacatcctcaaaagggaattactgagtttactatttatgatccaaaagctgtaaaggataggtttggagtagagccctataagattcccttatacaaagtattagtaggggacgaatctgataatattccaggagtaaatggaataggtcctaaaaaggcctcaaagattcttgagaaaatttcaagtgtagatgaatttaaaagtaaaataaaagttttggatagtgatttaagggagcttattgagaaaaattggaatattattgaaagaaatttagaacttgttactttaaaaaatatagataaggatcttattcttaaacccttcgagattaaaagagatgaaaaagtaatagattttttgaagagatatgaacttaagagtattcttcaaaagttatttcctgatcttcaagaggaagaaaatatagagattaaagatgtcgaagagatcaattttaatgaggtagaaaaagaaggctactttgcctttaaatgtcttggagatagggcttttgagggtatttctctttccttcaaggagggggaaggatattttatatctccttttgatttcaataatgagataagaaagaagattgaaaatataatttcttcagagaatgttaaaaaaattggctcttatattcaaagagatttacattttttaaactgtaaaataaagggcgatgtatttgatgttagtctcgcatcttatcttttgaaccctgaaagacaaaatcactctcttgatattttgataggagagtatctaaataaaacctcttttattcctcaaaaatacgctggttatctttttccgttaaagtctattcttgaggagaggataaagaatgaagggttagaatttgtactttataacatagagattccattaatccctgtactttactccatggagaagtgggggataaaggtagataaggaatatttaaaacagctttctgatgaattctgcgagagaattaaaaaattggaagaagagatatatgaacttgcaggaaccagatttaatctcaattctccaaaacaactttctgaagttttatttgagaggttaaaacttccttctggtaagaaaggaaaaacaggatattctacgtcgtcttctgtgcttcaaaacttaataaatgctcatcctatagtgagaaaaatcctccaatatagagaactctataaattgaagagtacttatgtggatgctattcctaatctggttaatccacaaacaggtagagttcatacaaaatttaatcctacaggtacagctacaggaagaataagtagtagtgaacctaatcttcagaatattcctataaaaagtgaagaaggtagaaagataagaagagccttcgtgtcagaagatggatattttcttgtatctcttgattattctcagatagagctaaggattatggctcatctttctcaggagcctaaattaatatctgccttccaaaaaggagaggatattcatagaagaacagcatcggagatttttggagtgccagaggaagaagttgatgatcttttaaggtcaagggcaaaggccgttaattttggaattatttatggtatctcttcttttggactttctgagactgtaagtattacaccagaagaggcagagaaatttatagactcgtattttaagcactatccaagagtgaagctttttatagataagactattcatgaggcaagagaaaaactgtacgttaaaaccttatttggcagaaaaagatatattcctgagattaagagcataaataaacaggtaaggcgtgcctatgaaaggatagcaataaatgcgccaattcagggaacagctgctgatattataaaacttgccatgatagaaatttacaaggagattgaaaataaaaatctcaagtcaagaatactccttcaaattcatgatgagcttattcttgaagtgccagaggaggagatggaatttactcctttaatggcaaaggaaaaaatggaaaaggtggtagaactttcggttcctcttgtagttgaaatctcggtaggtaaaaatcttgctgaattaaaatgagctataagattggtcgac

SEQ ID NO: 2178 - DNA, 2673 bp, Artificial Sequence
  Description of Artificial Sequence: Synthetic DNA sequence of Dictyoglomus thermophilum DNA N793D
atgaaatacctgctgccgaccgctgctgctggtctgctgctcctcgctgcccagccggcgatggccatggatatcggaattaattcggatccgaaatctctgtgggatctttttcaagaaaataccgagaaagagtccaaaaggaagattctgattattgatggctcaagcctcatatacagggtttattacgcccttccccctttaaagacaaaaaatggtgaattaactaatgctctttatggcttcataagaatacttttaaaggccgtagaagattttaatcctgatcttgtaggcgttgcctttgatagacctgaacctacttttaggcatgtgatttataaagagtataaggctaagagaccacctatgaaggatgatttgaaagcgcagataccatggataagagaatttctaaggttaaatgatatacctctattggaagagcctggctatgaagcggatgatataatagctactatagtgaataaatataaggatgatttaaaatatattctctctggagatttagatcttttgcaattagtctcggacaaaacctttctaatacatcctcaaaagggaattactgagtttactatttatgatccaaaagctgtaaaggataggtttggagtagagccctataagattcccttatacaaagtattagtaggggacgaatctgataatattccaggagtaaatggaataggtcctaaaaaggcctcaaagattcttgagaaaatttcaagtgtagatgaatttaaaagtaaaataaaagttttggatagtgatttaagggagcttattgagaaaaattggaatattattgaaagaaatttagaacttgttactttaaaaaatatagataaggatcttattcttaaacccttcgagattaaaagagatgaaaaagtaatagattttttgaagagatatgaacttaagagtattcttcaaaagttatttcctgatcttcaagaggaagaaaatatagagattaaagatgtcgaagagatcaattttaatgaggtagaaaaagaaggctactttgcctttaaatgtcttggagatagggcttttgagggtatttctctttccttcaaggagggggaaggatattttatatctccttttgatttcaataatgagataagaaagaagattgaaaatataatttcttcagagaatgttaaaaaaattggctcttatattcaaagagatttacattttttaaactgtaaaataaagggcgatgtatttgatgttagtctcgcatcttatcttttgaaccctgaaagacaaaatcactctcttgatattttgataggagagtatctaaataaaacctcttttattcctcaaaaatacgctggttatctttttccgttaaagtctattcttgaggagaggataaagaatgaagggttagaatttgtactttataacatagagattccattaatccctgtactttactccatggagaagtgggggataaaggtagataaggaatatttaaaacagctttctgatgaattctgcgagagaattaaaaaattggaagaagagatatatgaacttgcaggaaccagatttaatctcaattctccaaaacaactttctgaagttttatttgagaggttaaaacttccttctggtaagaaaggaaaaacaggatattctacgtcgtcttctgtgcttcaaaacttaataaatgctcatcctatagtgagaaaaatcctccaatatagagaactctataaattgaagagtacttatgtggatgctattcctaatctggttaatccacaaacaggtagagttcatacaaaatttaatcctacaggtacagctacaggaagaataagtagtagtgaacctaatcttcagaatattcctataaaaagtgaagaaggtagaaagataagaagagccttcgtgtcagaagatggatattttcttgtatctcttgattattctcagatagagctaaggattatggctcatctttctcaggagcctaaattaatatctgccttccaaaaaggagaggatattcatagaagaacagcatcggagatttttggagtgccagaggaagaagttgatgatcttttaaggtcaagggcaaaggccgttaattttggaattatttatggtatctcttcttttggactttctgagactgtaagtattacaccagaagaggcagagaaatttatagactcgtattttaagcactatccaagagtgaagctttttatagataagactattcatgaggcaagagaaaaactgtacgttaaaaccttatttggcagaaaaagatatattcctgagattaagagcataaataaacaggtaagggatgcctatgaaaggatagcaataaatgcgccaattcagggaacagctgctgatattataaaacttgccatgatagaaatttacaaggagattgaaaataaaaatctcaagtcaagaatactccttcaaattcatgatgagcttattcttgaagtgccagaggaggagatggaatttactcctttaatggcaaaggaaaaaatggaaaaggtggtagaactttcggttcctcttgtagttgaaatctcggtaggtaaaaatcttgctgaattaaaatgagctataagattggtcgac

SEQ ID NO: 2179 - DNA, 2673 bp, Artificial Sequence
  Description of Artificial Sequence: Synthetic DNA sequence of Dictyoglomus thermophilum DNA N793C
atgaaatacctgctgccgaccgctgctgctggtctgctgctcctcgctgcccagccggcgatggccatggatatcggaattaattcggatccgaaatctctgtgggatctttttcaagaaaataccgagaaagagtccaaaaggaagattctgattattgatggctcaagcctcatatacagggtttattacgcccttccccctttaaagacaaaaaatggtgaattaactaatgctctttatggcttcataagaatacttttaaaggccgtagaagattttaatcctgatcttgtaggcgttgcctttgatagacctgaacctacttttaggcatgtgatttataaagagtataaggctaagagaccacctatgaaggatgatttgaaagcgcagataccatggataagagaatttctaaggttaaatgatatacctctattggaagagcctggctatgaagcggatgatataatagctactatagtgaataaatataaggatgatttaaaatatattctctctggagatttagatcttttgcaattagtctcggacaaaacctttctaatacatcctcaaaagggaattactgagtttactatttatgatccaaaagctgtaaaggataggtttggagtagagccctataagattcccttatacaaagtattagtaggggacgaatctgataatattccaggagtaaatggaataggtcctaaaaaggcctcaaagattcttgagaaaatttcaagtgtagatgaatttaaaagtaaaataaaagttttggatagtgatttaagggagcttattgagaaaaattggaatattattgaaagaaatttagaacttgttactttaaaaaatatagataaggatcttattcttaaacccttcgagattaaaagagatgaaaaagtaatagattttttgaagagatatgaacttaagagtattcttcaaaagttatttcctgatcttcaagaggaagaaaatatagagattaaagatgtcgaagagatcaattttaatgaggtagaaaaagaaggctactttgcctttaaatgtcttggagatagggcttttgagggtatttctctttccttcaaggagggggaaggatattttatatctccttttgatttcaataatgagataagaaagaagattgaaaatataatttcttcagagaatgttaaaaaaattggctcttatattcaaagagatttacattttttaaactgtaaaataaagggcgatgtatttgatgttagtctcgcatcttatcttttgaaccctgaaagacaaaatcactctcttgatattttgataggagagtatctaaataaaacctcttttattcctcaaaaatacgctggttatctttttccgttaaagtctattcttgaggagaggataaagaatgaagggttagaatttgtactttataacatagagattccattaatccctgtactttactccatggagaagtgggggataaaggtagataaggaatatttaaaacagctttctgatgaattctgcgagagaattaaaaaattggaagaagagatatatgaacttgcaggaaccagatttaatctcaattctccaaaacaactttctgaagttttatttgagaggttaaaacttccttctggtaagaaaggaaaaacaggatattctacgtcgtcttctgtgcttcaaaacttaataaatgctcatcctatagtgagaaaaatcctccaatatagagaactctataaattgaagagtacttatgtggatgctattcctaatctggttaatccacaaacaggtagagttcatacaaaatttaatcctacaggtacagctacaggaagaataagtagtagtgaacctaatcttcagaatattcctataaaaagtgaagaaggtagaaagataagaagagccttcgtgtcagaagatggatattttcttgtatctcttgattattctcagatagagctaaggattatggctcatctttctcaggagcctaaattaatatctgccttccaaaaaggagaggatattcatagaagaacagcatcggagatttttggagtgccagaggaagaagttgatgatcttttaaggtcaagggcaaaggccgttaattttggaattatttatggtatctcttcttttggactttctgagactgtaagtattacaccagaagaggcagagaaatttatagactcgtattttaagcactatccaagagtgaagctttttatagataagactattcatgaggcaagagaaaaactgtacgttaaaaccttatttggcagaaaaagatatattcctgagattaagagcataaataaacaggtaaggtgtgcctatgaaaggatagcaataaatgcgccaattcagggaacagctgctgatattataaaacttgccatgatagaaatttacaaggagattgaaaataaaaatctcaagtcaagaatactccttcaaattcatgatgagcttattcttgaagtgccagaggaggagatggaatttactcctttaatggcaaaggaaaaaatggaaaaggtggtagaactttcggttcctcttgtagttgaaatctcggtaggtaaaaatcttgctgaattaaaatgagctataagattggtcgac

SEQ ID NO: 2180 - DNA, 2673 bp, Artificial Sequence
  Description of Artificial Sequence: Synthetic DNA sequence of Dictyoglomus thermophilum DNA N793E
atgaaatacctgctgccgaccgctgctgctggtctgctgctcctcgctgcccagccggcgatggccatggatatcggaattaattcggatccgaaatctctgtgggatctttttcaagaaaataccgagaaagagtccaaaaggaagattctgattattgatggctcaagcctcatatacagggtttattacgcccttccccctttaaagacaaaaaatggtgaattaactaatgctctttatggcttcataagaatacttttaaaggccgtagaagattttaatcctgatcttgtaggcgttgcctttgatagacctgaacctacttttaggcatgtgatttataaagagtataaggctaagagaccacctatgaaggatgatttgaaagcgcagataccatggataagagaatttctaaggttaaatgatatacctctattggaagagcctggctatgaagcggatgatataatagctactatagtgaataaatataaggatgatttaaaatatattctctctggagatttagatcttttgcaattagtctcggacaaaacctttctaatacatcctcaaaagggaattactgagtttactatttatgatccaaaagctgtaaaggataggtttggagtagagccctataagattcccttatacaaagtattagtaggggacgaatctgataatattccaggagtaaatggaataggtcctaaaaaggcctcaaagattcttgagaaaatttcaagtgtagatgaatttaaaagtaaaataaaagttttggatagtgatttaagggagcttattgagaaaaattggaatattattgaaagaaatttagaacttgttactttaaaaaatatagataaggatcttattcttaaacccttcgagattaaaagagatgaaaaagtaatagattttttgaagagatatgaacttaagagtattcttcaaaagttatttcctgatcttcaagaggaagaaaatatagagattaaagatgtcgaagagatcaattttaatgaggtagaaaaagaaggctactttgcctttaaatgtcttggagatagggcttttgagggtatttctctttccttcaaggagggggaaggatattttatatctccttttgatttcaataatgagataagaaagaagattgaaaatataatttcttcagagaatgttaaaaaaattggctcttatattcaaagagatttacattttttaaactgtaaaataaagggcgatgtatttgatgttagtctcgcatcttatcttttgaaccctgaaagacaaaatcactctcttgatattttgataggagagtatctaaataaaacctcttttattcctcaaaaatacgctggttatctttttccgttaaagtctattcttgaggagaggataaagaatgaagggttagaatttgtactttataacatagagattccattaatccctgtactttactccatggagaagtgggggataaaggtagataaggaatatttaaaacagctttctgatgaattctgcgagagaattaaaaaattggaagaagagatatatgaacttgcaggaaccagatttaatctcaattctccaaaacaactttctgaagttttatttgagaggttaaaacttccttctggtaagaaaggaaaaacaggatattctacgtcgtcttctgtgcttcaaaacttaataaatgctcatcctatagtgagaaaaatcctccaatatagagaactctataaattgaagagtacttatgtggatgctattcctaatctggttaatccacaaacaggtagagttcatacaaaatttaatcctacaggtacagctacaggaagaataagtagtagtgaacctaatcttcagaatattcctataaaaagtgaagaaggtagaaagataagaagagccttcgtgtcagaagatggatattttcttgtatctcttgattattctcagatagagctaaggattatggctcatctttctcaggagcctaaattaatatctgccttccaaaaaggagaggatattcatagaagaacagcatcggagatttttggagtgccagaggaagaagttgatgatcttttaaggtcaagggcaaaggccgttaattttggaattatttatggtatctcttcttttggactttctgagactgtaagtattacaccagaagaggcagagaaatttatagactcgtattttaagcactatccaagagtgaagctttttatagataagactattcatgaggcaagagaaaaactgtacgttaaaaccttatttggcagaaaaagatatattcctgagattaagagcataaataaacaggtaagggaagcctatgaaaggatagcaataaatgcgccaattcagggaacagctgctgatattataaaacttgccatgatagaaatttacaaggagattgaaaataaaaatctcaagtcaagaatactccttcaaattcatgatgagcttattcttgaagtgccagaggaggagatggaatttactcctttaatggcaaaggaaaaaatggaaaaggtggtagaactttcggttcctcttgtagttgaaatctcggtaggtaaaaatcttgctgaattaaaatgagctataagattggtcgac

SEQ ID NO: 2181 - DNA, 2673 bp, Artificial Sequence
  Description of Artificial Sequence: Synthetic DNA sequence of Dictyoglomus thermophilum DNA N793Q
atgaaatacctgctgccgaccgctgctgctggtctgctgctcctcgctgcccagccggcgatggccatggatatcggaattaattcggatccgaaatctctgtgggatctttttcaagaaaataccgagaaagagtccaaaaggaagattctgattattgatggctcaagcctcatatacagggtttattacgcccttccccctttaaagacaaaaaatggtgaattaactaatgctctttatggcttcataagaatacttttaaaggccgtagaagattttaatcctgatcttgtaggcgttgcctttgatagacctgaacctacttttaggcatgtgatttataaagagtataaggctaagagaccacctatgaaggatgatttgaaagcgcagataccatggataagagaatttctaaggttaaatgatatacctctattggaagagcctggctatgaagcggatgatataatagctactatagtgaataaatataaggatgatttaaaatatattctctctggagatttagatcttttgcaattagtctcggacaaaacctttctaatacatcctcaaaagggaattactgagtttactatttatgatccaaaagctgtaaaggataggtttggagtagagccctataagattcccttatacaaagtattagtaggggacgaatctgataatattccaggagtaaatggaataggtcctaaaaaggcctcaaagattcttgagaaaatttcaagtgtagatgaatttaaaagtaaaataaaagttttggatagtgatttaagggagcttattgagaaaaattggaatattattgaaagaaatttagaacttgttactttaaaaaatatagataaggatcttattcttaaacccttcgagattaaaagagatgaaaaagtaatagattttttgaagagatatgaacttaagagtattcttcaaaagttatttcctgatcttcaagaggaagaaaatatagagattaaagatgtcgaagagatcaattttaatgaggtagaaaaagaaggctactttgcctttaaatgtcttggagatagggcttttgagggtatttctctttccttcaaggagggggaaggatattttatatctccttttgatttcaataatgagataagaaagaagattgaaaatataatttcttcagagaatgttaaaaaaattggctcttatattcaaagagatttacattttttaaactgtaaaataaagggcgatgtatttgatgttagtctcgcatcttatcttttgaaccctgaaagacaaaatcactctcttgatattttgataggagagtatctaaataaaacctcttttattcctcaaaaatacgctggttatctttttccgttaaagtctattcttgaggagaggataaagaatgaagggttagaatttgtactttataacatagagattccattaatccctgtactttactccatggagaagtgggggataaaggtagataaggaatatttaaaacagctttctgatgaattctgcgagagaattaaaaaattggaagaagagatatatgaacttgcaggaaccagatttaatctcaattctccaaaacaactttctgaagttttatttgagaggttaaaacttccttctggtaagaaaggaaaaacaggatattctacgtcgtcttctgtgcttcaaaacttaataaatgctcatcctatagtgagaaaaatcctccaatatagagaactctataaattgaagagtacttatgtggatgctattcctaatctggttaatccacaaacaggtagagttcatacaaaatttaatcctacaggtacagctacaggaagaataagtagtagtgaacctaatcttcagaatattcctataaaaagtgaagaaggtagaaagataagaagagccttcgtgtcagaagatggatattttcttgtatctcttgattattctcagatagagctaaggattatggctcatctttctcaggagcctaaattaatatctgccttccaaaaaggagaggatattcatagaagaacagcatcggagatttttggagtgccagaggaagaagttgatgatcttttaaggtcaagggcaaaggccgttaattttggaattatttatggtatctcttcttttggactttctgagactgtaagtattacaccagaagaggcagagaaatttatagactcgtattttaagcactatccaagagtgaagctttttatagataagactattcatgaggcaagagaaaaactgtacgttaaaaccttatttggcagaaaaagatatattcctgagattaagagcataaataaacaggtaaggcaagcctatgaaaggatagcaataaatgcgccaattcagggaacagctgctgatattataaaacttgccatgatagaaatttacaaggagattgaaaataaaaatctcaagtcaagaatactccttcaaattcatgatgagcttattcttgaagtgccagaggaggagatggaatttactcctttaatggcaaaggaaaaaatggaaaaggtggtagaactttcggttcctcttgtagttgaaatctcggtaggtaaaaatcttgctgaattaaaatgagctataagattggtcgac

SEQ ID NO: 2182 - DNA, 2673 bp, Artificial Sequence
  Description of Artificial Sequence: Synthetic DNA sequence of Dictyoglomus thermophilum DNA N793G
atgaaatacctgctgccgaccgctgctgctggtctgctgctcctcgctgcccagccggcgatggccatggatatcggaattaattcggatccgaaatctctgtgggatctttttcaagaaaataccgagaaagagtccaaaaggaagattctgattattgatggctcaagcctcatatacagggtttattacgcccttccccctttaaagacaaaaaatggtgaattaactaatgctctttatggcttcataagaatacttttaaaggccgtagaagattttaatcctgatcttgtaggcgttgcctttgatagacctgaacctacttttaggcatgtgatttataaagagtataaggctaagagaccacctatgaaggatgatttgaaagcgcagataccatggataagagaatttctaaggttaaatgatatacctctattggaagagcctggctatgaagcggatgatataatagctactatagtgaataaatataaggatgatttaaaatatattctctctggagatttagatcttttgcaattagtctcggacaaaacctttctaatacatcctcaaaagggaattactgagtttactatttatgatccaaaagctgtaaaggataggtttggagtagagccctataagattcccttatacaaagtattagtaggggacgaatctgataatattccaggagtaaatggaataggtcctaaaaaggcctcaaagattcttgagaaaatttcaagtgtagatgaatttaaaagtaaaataaaagttttggatagtgatttaagggagcttattgagaaaaattggaatattattgaaagaaatttagaacttgttactttaaaaaatatagataaggatcttattcttaaacccttcgagattaaaagagatgaaaaagtaatagattttttgaagagatatgaacttaagagtattcttcaaaagttatttcctgatcttcaagaggaagaaaatatagagattaaagatgtcgaagagatcaattttaatgaggtagaaaaagaaggctactttgcctttaaatgtcttggagatagggcttttgagggtatttctctttccttcaaggagggggaaggatattttatatctccttttgatttcaataatgagataagaaagaagattgaaaatataatttcttcagagaatgttaaaaaaattggctcttatattcaaagagatttacattttttaaactgtaaaataaagggcgatgtatttgatgttagtctcgcatcttatcttttgaaccctgaaagacaaaatcactctcttgatattttgataggagagtatctaaataaaacctcttttattcctcaaaaatacgctggttatctttttccgttaaagtctattcttgaggagaggataaagaatgaagggttagaatttgtactttataacatagagattccattaatccctgtactttactccatggagaagtgggggataaaggtagataaggaatatttaaaacagctttctgatgaattctgcgagagaattaaaaaattggaagaagagatatatgaacttgcaggaaccagatttaatctcaattctccaaaacaactttctgaagttttatttgagaggttaaaacttccttctggtaagaaaggaaaaacaggatattctacgtcgtcttctgtgcttcaaaacttaataaatgctcatcctatagtgagaaaaatcctccaatatagagaactctataaattgaagagtacttatgtggatgctattcctaatctggttaatccacaaacaggtagagttcatacaaaatttaatcctacaggtacagctacaggaagaataagtagtagtgaacctaatcttcagaatattcctataaaaagtgaagaaggtagaaagataagaagagccttcgtgtcagaagatggatattttcttgtatctcttgattattctcagatagagctaaggattatggctcatctttctcaggagcctaaattaatatctgccttccaaaaaggagaggatattcatagaagaacagcatcggagatttttggagtgccagaggaagaagttgatgatcttttaaggtcaagggcaaaggccgttaattttggaattatttatggtatctcttcttttggactttctgagactgtaagtattacaccagaagaggcagagaaatttatagactcgtattttaagcactatccaagagtgaagctttttatagataagactattcatgaggcaagagaaaaactgtacgttaaaaccttatttggcagaaaaagatatattcctgagattaagagcataaataaacaggtaaggggtgcctatgaaaggatagcaataaatgcgccaattcagggaacagctgctgatattataaaacttgccatgatagaaatttacaaggagattgaaaataaaaatctcaagtcaagaatactccttcaaattcatgatgagcttattcttgaagtgccagaggaggagatggaatttactcctttaatggcaaaggaaaaaatggaaaaggtggtagaactttcggttcctcttgtagttgaaatctcggtaggtaaaaatcttgctgaattaaaatgagctataagattggtcgac

SEQ ID NO: 2183 - DNA, 2673 bp, Artificial Sequence
  Description of Artificial Sequence: Synthetic DNA sequence of Dictyoglomus thermophilum DNA N793H
atgaaatacctgctgccgaccgctgctgctggtctgctgctcctcgctgcccagccggcgatggccatggatatcggaattaattcggatccgaaatctctgtgggatctttttcaagaaaataccgagaaagagtccaaaaggaagattctgattattgatggctcaagcctcatatacagggtttattacgcccttccccctttaaagacaaaaaatggtgaattaactaatgctctttatggcttcataagaatacttttaaaggccgtagaagattttaatcctgatcttgtaggcgttgcctttgatagacctgaacctacttttaggcatgtgatttataaagagtataaggctaagagaccacctatgaaggatgatttgaaagcgcagataccatggataagagaatttctaaggttaaatgatatacctctattggaagagcctggctatgaagcggatgatataatagctactatagtgaataaatataaggatgatttaaaatatattctctctggagatttagatcttttgcaattagtctcggacaaaacctttctaatacatcctcaaaagggaattactgagtttactatttatgatccaaaagctgtaaaggataggtttggagtagagccctataagattcccttatacaaagtattagtaggggacgaatctgataatattccaggagtaaatggaataggtcctaaaaaggcctcaaagattcttgagaaaatttcaagtgtagatgaatttaaaagtaaaataaaagttttggatagtgatttaagggagcttattgagaaaaattggaatattattgaaagaaatttagaacttgttactttaaaaaatatagataaggatcttattcttaaacccttcgagattaaaagagatgaaaaagtaatagattttttgaagagatatgaacttaagagtattcttcaaaagttatttcctgatcttcaagaggaagaaaatatagagattaaagatgtcgaagagatcaattttaatgaggtagaaaaagaaggctactttgcctttaaatgtcttggagatagggcttttgagggtatttctctttccttcaaggagggggaaggatattttatatctccttttgatttcaataatgagataagaaagaagattgaaaatataatttcttcagagaatgttaaaaaaattggctcttatattcaaagagatttacattttttaaactgtaaaataaagggcgatgtatttgatgttagtctcgcatcttatcttttgaaccctgaaagacaaaatcactctcttgatattttgataggagagtatctaaataaaacctcttttattcctcaaaaatacgctggttatctttttccgttaaagtctattcttgaggagaggataaagaatgaagggttagaatttgtactttataacatagagattccattaatccctgtactttactccatggagaagtgggggataaaggtagataaggaatatttaaaacagctttctgatgaattctgcgagagaattaaaaaattggaagaagagatatatgaacttgcaggaaccagatttaatctcaattctccaaaacaactttctgaagttttatttgagaggttaaaacttccttctggtaagaaaggaaaaacaggatattctacgtcgtcttctgtgcttcaaaacttaataaatgctcatcctatagtgagaaaaatcctccaatatagagaactctataaattgaagagtacttatgtggatgctattcctaatctggttaatccacaaacaggtagagttcatacaaaatttaatcctacaggtacagctacaggaagaataagtagtagtgaacctaatcttcagaatattcctataaaaagtgaagaaggtagaaagataagaagagccttcgtgtcagaagatggatattttcttgtatctcttgattattctcagatagagctaaggattatggctcatctttctcaggagcctaaattaatatctgccttccaaaaaggagaggatattcatagaagaacagcatcggagatttttggagtgccagaggaagaagttgatgatcttttaaggtcaagggcaaaggccgttaattttggaattatttatggtatctcttcttttggactttctgagactgtaagtattacaccagaagaggcagagaaatttatagactcgtattttaagcactatccaagagtgaagctttttatagataagactattcatgaggcaagagaaaaactgtacgttaaaaccttatttggcagaaaaagatatattcctgagattaagagcataaataaacaggtaaggcatgcctatgaaaggatagcaataaatgcgccaattcagggaacagctgctgatattataaaacttgccatgatagaaatttacaaggagattgaaaataaaaatctcaagtcaagaatactccttcaaattcatgatgagcttattcttgaagtgccagaggaggagatggaatttactcctttaatggcaaaggaaaaaatggaaaaggtggtagaactttcggttcctcttgtagttgaaatctcggtaggtaaaaatcttgctgaattaaaatgagctataagattggtcgac

SEQ ID NO: 2184 - DNA, 2673 bp, Artificial Sequence
  Description of Artificial Sequence: Synthetic DNA sequence of Dictyoglomus thermophilum DNA N793I
atgaaatacctgctgccgaccgctgctgctggtctgctgctcctcgctgcccagccggcgatggccatggatatcggaattaattcggatccgaaatctctgtgggatctttttcaagaaaataccgagaaagagtccaaaaggaagattctgattattgatggctcaagcctcatatacagggtttattacgcccttccccctttaaagacaaaaaatggtgaattaactaatgctctttatggcttcataagaatacttttaaaggccgtagaagattttaatcctgatcttgtaggcgttgcctttgatagacctgaacctacttttaggcatgtgatttataaagagtataaggctaagagaccacctatgaaggatgatttgaaagcgcagataccatggataagagaatttctaaggttaaatgatatacctctattggaagagcctggctatgaagcggatgatataatagctactatagtgaataaatataaggatgatttaaaatatattctctctggagatttagatcttttgcaattagtctcggacaaaacctttctaatacatcctcaaaagggaattactgagtttactatttatgatccaaaagctgtaaaggataggtttggagtagagccctataagattcccttatacaaagtattagtaggggacgaatctgataatattccaggagtaaatggaataggtcctaaaaaggcctcaaagattcttgagaaaatttcaagtgtagatgaatttaaaagtaaaataaaagttttggatagtgatttaagggagcttattgagaaaaattggaatattattgaaagaaatttagaacttgttactttaaaaaatatagataaggatcttattcttaaacccttcgagattaaaagagatgaaaaagtaatagattttttgaagagatatgaacttaagagtattcttcaaaagttatttcctgatcttcaagaggaagaaaatatagagattaaagatgtcgaagagatcaattttaatgaggtagaaaaagaaggctactttgcctttaaatgtcttggagatagggcttttgagggtatttctctttccttcaaggagggggaaggatattttatatctccttttgatttcaataatgagataagaaagaagattgaaaatataatttcttcagagaatgttaaaaaaattggctcttatattcaaagagatttacattttttaaactgtaaaataaagggcgatgtatttgatgttagtctcgcatcttatcttttgaaccctgaaagacaaaatcactctcttgatattttgataggagagtatctaaataaaacctcttttattcctcaaaaatacgctggttatctttttccgttaaagtctattcttgaggagaggataaagaatgaagggttagaatttgtactttataacatagagattccattaatccctgtactttactccatggagaagtgggggataaaggtagataaggaatatttaaaacagctttctgatgaattctgcgagagaattaaaaaattggaagaagagatatatgaacttgcaggaaccagatttaatctcaattctccaaaacaactttctgaagttttatttgagaggttaaaacttccttctggtaagaaaggaaaaacaggatattctacgtcgtcttctgtgcttcaaaacttaataaatgctcatcctatagtgagaaaaatcctccaatatagagaactctataaattgaagagtacttatgtggatgctattcctaatctggttaatccacaaacaggtagagttcatacaaaatttaatcctacaggtacagctacaggaagaataagtagtagtgaacctaatcttcagaatattcctataaaaagtgaagaaggtagaaagataagaagagccttcgtgtcagaagatggatattttcttgtatctcttgattattctcagatagagctaaggattatggctcatctttctcaggagcctaaattaatatctgccttccaaaaaggagaggatattcatagaagaacagcatcggagatttttggagtgccagaggaagaagttgatgatcttttaaggtcaagggcaaaggccgttaattttggaattatttatggtatctcttcttttggactttctgagactgtaagtattacaccagaagaggcagagaaatttatagactcgtattttaagcactatccaagagtgaagctttttatagataagactattcatgaggcaagagaaaaactgtacgttaaaaccttatttggcagaaaaagatatattcctgagattaagagcataaataaacaggtaaggattgcctatgaaaggatagcaataaatgcgccaattcagggaacagctgctgatattataaaacttgccatgatagaaatttacaaggagattgaaaataaaaatctcaagtcaagaatactccttcaaattcatgatgagcttattcttgaagtgccagaggaggagatggaatttactcctttaatggcaaaggaaaaaatggaaaaggtggtagaactttcggttcctcttgtagttgaaatctcggtaggtaaaaatcttgctgaattaaaatgagctataagattggtcgac

SEQ ID NO: 2185 - DNA, 2673 bp, Artificial Sequence
  Description of Artificial Sequence: Synthetic DNA sequence of Dictyoglomus thermophilum DNA N793L
atgaaatacctgctgccgaccgctgctgctggtctgctgctcctcgctgcccagccggcgatggccatggatatcggaattaattcggatccgaaatctctgtgggatctttttcaagaaaataccgagaaagagtccaaaaggaagattctgattattgatggctcaagcctcatatacagggtttattacgcccttccccctttaaagacaaaaaatggtgaattaactaatgctctttatggcttcataagaatacttttaaaggccgtagaagattttaatcctgatcttgtaggcgttgcctttgatagacctgaacctacttttaggcatgtgatttataaagagtataaggctaagagaccacctatgaaggatgatttgaaagcgcagataccatggataagagaatttctaaggttaaatgatatacctctattggaagagcctggctatgaagcggatgatataatagctactatagtgaataaatataaggatgatttaaaatatattctctctggagatttagatcttttgcaattagtctcggacaaaacctttctaatacatcctcaaaagggaattactgagtttactatttatgatccaaaagctgtaaaggataggtttggagtagagccctataagattcccttatacaaagtattagtaggggacgaatctgataatattccaggagtaaatggaataggtcctaaaaaggcctcaaagattcttgagaaaatttcaagtgtagatgaatttaaaagtaaaataaaagttttggatagtgatttaagggagcttattgagaaaaattggaatattattgaaagaaatttagaacttgttactttaaaaaatatagataaggatcttattcttaaacccttcgagattaaaagagatgaaaaagtaatagattttttgaagagatatgaacttaagagtattcttcaaaagttatttcctgatcttcaagaggaagaaaatatagagattaaagatgtcgaagagatcaattttaatgaggtagaaaaagaaggctactttgcctttaaatgtcttggagatagggcttttgagggtatttctctttccttcaaggagggggaaggatattttatatctccttttgatttcaataatgagataagaaagaagattgaaaatataatttcttcagagaatgttaaaaaaattggctcttatattcaaagagatttacattttttaaactgtaaaataaagggcgatgtatttgatgttagtctcgcatcttatcttttgaaccctgaaagacaaaatcactctcttgatattttgataggagagtatctaaataaaacctcttttattcctcaaaaatacgctggttatctttttccgttaaagtctattcttgaggagaggataaagaatgaagggttagaatttgtactttataacatagagattccattaatccctgtactttactccatggagaagtgggggataaaggtagataaggaatatttaaaacagctttctgatgaattctgcgagagaattaaaaaattggaagaagagatatatgaacttgcaggaaccagatttaatctcaattctccaaaacaactttctgaagttttatttgagaggttaaaacttccttctggtaagaaaggaaaaacaggatattctacgtcgtcttctgtgcttcaaaacttaataaatgctcatcctatagtgagaaaaatcctccaatatagagaactctataaattgaagagtacttatgtggatgctattcctaatctggttaatccacaaacaggtagagttcatacaaaatttaatcctacaggtacagctacaggaagaataagtagtagtgaacctaatcttcagaatattcctataaaaagtgaagaaggtagaaagataagaagagccttcgtgtcagaagatggatattttcttgtatctcttgattattctcagatagagctaaggattatggctcatctttctcaggagcctaaattaatatctgccttccaaaaaggagaggatattcatagaagaacagcatcggagatttttggagtgccagaggaagaagttgatgatcttttaaggtcaagggcaaaggccgttaattttggaattatttatggtatctcttcttttggactttctgagactgtaagtattacaccagaagaggcagagaaatttatagactcgtattttaagcactatccaagagtgaagctttttatagataagactattcatgaggcaagagaaaaactgtacgttaaaaccttatttggcagaaaaagatatattcctgagattaagagcataaataaacaggtaaggcttgcctatgaaaggatagcaataaatgcgccaattcagggaacagctgctgatattataaaacttgccatgatagaaatttacaaggagattgaaaataaaaatctcaagtcaagaatactccttcaaattcatgatgagcttattcttgaagtgccagaggaggagatggaatttactcctttaatggcaaaggaaaaaatggaaaaggtggtagaactttcggttcctcttgtagttgaaatctcggtaggtaaaaatcttgctgaattaaaatgagctataagattggtcgac

SEQ ID NO: 2186 - DNA, 2673 bp, Artificial Sequence
  Description of Artificial Sequence: Synthetic DNA sequence of Dictyoglomus thermophilum DNA N793K
atgaaatacctgctgccgaccgctgctgctggtctgctgctcctcgctgcccagccggcgatggccatggatatcggaattaattcggatccgaaatctctgtgggatctttttcaagaaaataccgagaaagagtccaaaaggaagattctgattattgatggctcaagcctcatatacagggtttattacgcccttccccctttaaagacaaaaaatggtgaattaactaatgctctttatggcttcataagaatacttttaaaggccgtagaagattttaatcctgatcttgtaggcgttgcctttgatagacctgaacctacttttaggcatgtgatttataaagagtataaggctaagagaccacctatgaaggatgatttgaaagcgcagataccatggataagagaatttctaaggttaaatgatatacctctattggaagagcctggctatgaagcggatgatataatagctactatagtgaataaatataaggatgatttaaaatatattctctctggagatttagatcttttgcaattagtctcggacaaaacctttctaatacatcctcaaaagggaattactgagtttactatttatgatccaaaagctgtaaaggataggtttggagtagagccctataagattcccttatacaaagtattagtaggggacgaatctgataatattccaggagtaaatggaataggtcctaaaaaggcctcaaagattcttgagaaaatttcaagtgtagatgaatttaaaagtaaaataaaagttttggatagtgatttaagggagcttattgagaaaaattggaatattattgaaagaaatttagaacttgttactttaaaaaatatagataaggatcttattcttaaacccttcgagattaaaagagatgaaaaagtaatagattttttgaagagatatgaacttaagagtattcttcaaaagttatttcctgatcttcaagaggaagaaaatatagagattaaagatgtcgaagagatcaattttaatgaggtagaaaaagaaggctactttgcctttaaatgtcttggagatagggcttttgagggtatttctctttccttcaaggagggggaaggatattttatatctccttttgatttcaataatgagataagaaagaagattgaaaatataatttcttcagagaatgttaaaaaaattggctcttatattcaaagagatttacattttttaaactgtaaaataaagggcgatgtatttgatgttagtctcgcatcttatcttttgaaccctgaaagacaaaatcactctcttgatattttgataggagagtatctaaataaaacctcttttattcctcaaaaatacgctggttatctttttccgttaaagtctattcttgaggagaggataaagaatgaagggttagaatttgtactttataacatagagattccattaatccctgtactttactccatggagaagtgggggataaaggtagataaggaatatttaaaacagctttctgatgaattctgcgagagaattaaaaaattggaagaagagatatatgaacttgcaggaaccagatttaatctcaattctccaaaacaactttctgaagttttatttgagaggttaaaacttccttctggtaagaaaggaaaaacaggatattctacgtcgtcttctgtgcttcaaaacttaataaatgctcatcctatagtgagaaaaatcctccaatatagagaactctataaattgaagagtacttatgtggatgctattcctaatctggttaatccacaaacaggtagagttcatacaaaatttaatcctacaggtacagctacaggaagaataagtagtagtgaacctaatcttcagaatattcctataaaaagtgaagaaggtagaaagataagaagagccttcgtgtcagaagatggatattttcttgtatctcttgattattctcagatagagctaaggattatggctcatctttctcaggagcctaaattaatatctgccttccaaaaaggagaggatattcatagaagaacagcatcggagatttttggagtgccagaggaagaagttgatgatcttttaaggtcaagggcaaaggccgttaattttggaattatttatggtatctcttcttttggactttctgagactgtaagtattacaccagaagaggcagagaaatttatagactcgtattttaagcactatccaagagtgaagctttttatagataagactattcatgaggcaagagaaaaactgtacgttaaaaccttatttggcagaaaaagatatattcctgagattaagagcataaataaacaggtaaggaaagcctatgaaaggatagcaataaatgcgccaattcagggaacagctgctgatattataaaacttgccatgatagaaatttacaaggagattgaaaataaaaatctcaagtcaagaatactccttcaaattcatgatgagcttattcttgaagtgccagaggaggagatggaatttactcctttaatggcaaaggaaaaaatggaaaaggtggtagaactttcggttcctcttgtagttgaaatctcggtaggtaaaaatcttgctgaattaaaatgagctataagattggtcgac

SEQ ID NO: 2187 - DNA, 2673 bp, Artificial Sequence
  Description of Artificial Sequence: Synthetic DNA sequence of Dictyoglomus thermophilum DNA N793M
atgaaatacctgctgccgaccgctgctgctggtctgctgctcctcgctgcccagccggcgatggccatggatatcggaattaattcggatccgaaatctctgtgggatctttttcaagaaaataccgagaaagagtccaaaaggaagattctgattattgatggctcaagcctcatatacagggtttattacgcccttccccctttaaagacaaaaaatggtgaattaactaatgctctttatggcttcataagaatacttttaaaggccgtagaagattttaatcctgatcttgtaggcgttgcctttgatagacctgaacctacttttaggcatgtgatttataaagagtataaggctaagagaccacctatgaaggatgatttgaaagcgcagataccatggataagagaatttctaaggttaaatgatatacctctattggaagagcctggctatgaagcggatgatataatagctactatagtgaataaatataaggatgatttaaaatatattctctctggagatttagatcttttgcaattagtctcggacaaaacctttctaatacatcctcaaaagggaattactgagtttactatttatgatccaaaagctgtaaaggataggtttggagtagagccctataagattcccttatacaaagtattagtaggggacgaatctgataatattccaggagtaaatggaataggtcctaaaaaggcctcaaagattcttgagaaaatttcaagtgtagatgaatttaaaagtaaaataaaagttttggatagtgatttaagggagcttattgagaaaaattggaatattattgaaagaaatttagaacttgttactttaaaaaatatagataaggatcttattcttaaacccttcgagattaaaagagatgaaaaagtaatagattttttgaagagatatgaacttaagagtattcttcaaaagttatttcctgatcttcaagaggaagaaaatatagagattaaagatgtcgaagagatcaattttaatgaggtagaaaaagaaggctactttgcctttaaatgtcttggagatagggcttttgagggtatttctctttccttcaaggagggggaaggatattttatatctccttttgatttcaataatgagataagaaagaagattgaaaatataatttcttcagagaatgttaaaaaaattggctcttatattcaaagagatttacattttttaaactgtaaaataaagggcgatgtatttgatgttagtctcgcatcttatcttttgaaccctgaaagacaaaatcactctcttgatattttgataggagagtatctaaataaaacctcttttattcctcaaaaatacgctggttatctttttccgttaaagtctattcttgaggagaggataaagaatgaagggttagaatttgtactttataacatagagattccattaatccctgtactttactccatggagaagtgggggataaaggtagataaggaatatttaaaacagctttctgatgaattctgcgagagaattaaaaaattggaagaagagatatatgaacttgcaggaaccagatttaatctcaattctccaaaacaactttctgaagttttatttgagaggttaaaacttccttctggtaagaaaggaaaaacaggatattctacgtcgtcttctgtgcttcaaaacttaataaatgctcatcctatagtgagaaaaatcctccaatatagagaactctataaattgaagagtacttatgtggatgctattcctaatctggttaatccacaaacaggtagagttcatacaaaatttaatcctacaggtacagctacaggaagaataagtagtagtgaacctaatcttcagaatattcctataaaaagtgaagaaggtagaaagataagaagagccttcgtgtcagaagatggatattttcttgtatctcttgattattctcagatagagctaaggattatggctcatctttctcaggagcctaaattaatatctgccttccaaaaaggagaggatattcatagaagaacagcatcggagatttttggagtgccagaggaagaagttgatgatcttttaaggtcaagggcaaaggccgttaattttggaattatttatggtatctcttcttttggactttctgagactgtaagtattacaccagaagaggcagagaaatttatagactcgtattttaagcactatccaagagtgaagctttttatagataagactattcatgaggcaagagaaaaactgtacgttaaaaccttatttggcagaaaaagatatattcctgagattaagagcataaataaacaggtaaggatggcctatgaaaggatagcaataaatgcgccaattcagggaacagctgctgatattataaaacttgccatgatagaaatttacaaggagattgaaaataaaaatctcaagtcaagaatactccttcaaattcatgatgagcttattcttgaagtgccagaggaggagatggaatttactcctttaatggcaaaggaaaaaatggaaaaggtggtagaactttcggttcctcttgtagttgaaatctcggtaggtaaaaatcttgctgaattaaaatgagctataagattggtcgac

SEQ ID NO: 2188 - DNA, 2673 bp, Artificial Sequence
  Description of Artificial Sequence: Synthetic DNA sequence of Dictyoglomus thermophilum DNA N793F
atgaaatacctgctgccgaccgctgctgctggtctgctgctcctcgctgcccagccggcgatggccatggatatcggaattaattcggatccgaaatctctgtgggatctttttcaagaaaataccgagaaagagtccaaaaggaagattctgattattgatggctcaagcctcatatacagggtttattacgcccttccccctttaaagacaaaaaatggtgaattaactaatgctctttatggcttcataagaatacttttaaaggccgtagaagattttaatcctgatcttgtaggcgttgcctttgatagacctgaacctacttttaggcatgtgatttataaagagtataaggctaagagaccacctatgaaggatgatttgaaagcgcagataccatggataagagaatttctaaggttaaatgatatacctctattggaagagcctggctatgaagcggatgatataatagctactatagtgaataaatataaggatgatttaaaatatattctctctggagatttagatcttttgcaattagtctcggacaaaacctttctaatacatcctcaaaagggaattactgagtttactatttatgatccaaaagctgtaaaggataggtttggagtagagccctataagattcccttatacaaagtattagtaggggacgaatctgataatattccaggagtaaatggaataggtcctaaaaaggcctcaaagattcttgagaaaatttcaagtgtagatgaatttaaaagtaaaataaaagttttggatagtgatttaagggagcttattgagaaaaattggaatattattgaaagaaatttagaacttgttactttaaaaaatatagataaggatcttattcttaaacccttcgagattaaaagagatgaaaaagtaatagattttttgaagagatatgaacttaagagtattcttcaaaagttatttcctgatcttcaagaggaagaaaatatagagattaaagatgtcgaagagatcaattttaatgaggtagaaaaagaaggctactttgcctttaaatgtcttggagatagggcttttgagggtatttctctttccttcaaggagggggaaggatattttatatctccttttgatttcaataatgagataagaaagaagattgaaaatataatttcttcagagaatgttaaaaaaattggctcttatattcaaagagatttacattttttaaactgtaaaataaagggcgatgtatttgatgttagtctcgcatcttatcttttgaaccctgaaagacaaaatcactctcttgatattttgataggagagtatctaaataaaacctcttttattcctcaaaaatacgctggttatctttttccgttaaagtctattcttgaggagaggataaagaatgaagggttagaatttgtactttataacatagagattccattaatccctgtactttactccatggagaagtgggggataaaggtagataaggaatatttaaaacagctttctgatgaattctgcgagagaattaaaaaattggaagaagagatatatgaacttgcaggaaccagatttaatctcaattctccaaaacaactttctgaagttttatttgagaggttaaaacttccttctggtaagaaaggaaaaacaggatattctacgtcgtcttctgtgcttcaaaacttaataaatgctcatcctatagtgagaaaaatcctccaatatagagaactctataaattgaagagtacttatgtggatgctattcctaatctggttaatccacaaacaggtagagttcatacaaaatttaatcctacaggtacagctacaggaagaataagtagtagtgaacctaatcttcagaatattcctataaaaagtgaagaaggtagaaagataagaagagccttcgtgtcagaagatggatattttcttgtatctcttgattattctcagatagagctaaggattatggctcatctttctcaggagcctaaattaatatctgccttccaaaaaggagaggatattcatagaagaacagcatcggagatttttggagtgccagaggaagaagttgatgatcttttaaggtcaagggcaaaggccgttaattttggaattatttatggtatctcttcttttggactttctgagactgtaagtattacaccagaagaggcagagaaatttatagactcgtattttaagcactatccaagagtgaagctttttatagataagactattcatgaggcaagagaaaaactgtacgttaaaaccttatttggcagaaaaagatatattcctgagattaagagcataaataaacaggtaaggtttgcctatgaaaggatagcaataaatgcgccaattcagggaacagctgctgatattataaaacttgccatgatagaaatttacaaggagattgaaaataaaaatctcaagtcaagaatactccttcaaattcatgatgagcttattcttgaagtgccagaggaggagatggaatttactcctttaatggcaaaggaaaaaatggaaaaggtggtagaactttcggttcctcttgtagttgaaatctcggtaggtaaaaatcttgctgaattaaaatgagctataagattggtcgac

SEQ ID NO: 2189 - DNA, 2673 bp, Artificial Sequence
  Description of Artificial Sequence: Synthetic DNA sequence of Dictyoglomus thermophilum DNA N793P
atgaaatacctgctgccgaccgctgctgctggtctgctgctcctcgctgcccagccggcgatggccatggatatcggaattaattcggatccgaaatctctgtgggatctttttcaagaaaataccgagaaagagtccaaaaggaagattctgattattgatggctcaagcctcatatacagggtttattacgcccttccccctttaaagacaaaaaatggtgaattaactaatgctctttatggcttcataagaatacttttaaaggccgtagaagattttaatcctgatcttgtaggcgttgcctttgatagacctgaacctacttttaggcatgtgatttataaagagtataaggctaagagaccacctatgaaggatgatttgaaagcgcagataccatggataagagaatttctaaggttaaatgatatacctctattggaagagcctggctatgaagcggatgatataatagctactatagtgaataaatataaggatgatttaaaatatattctctctggagatttagatcttttgcaattagtctcggacaaaacctttctaatacatcctcaaaagggaattactgagtttactatttatgatccaaaagctgtaaaggataggtttggagtagagccctataagattcccttatacaaagtattagtaggggacgaatctgataatattccaggagtaaatggaataggtcctaaaaaggcctcaaagattcttgagaaaatttcaagtgtagatgaatttaaaagtaaaataaaagttttggatagtgatttaagggagcttattgagaaaaattggaatattattgaaagaaatttagaacttgttactttaaaaaatatagataaggatcttattcttaaacccttcgagattaaaagagatgaaaaagtaatagattttttgaagagatatgaacttaagagtattcttcaaaagttatttcctgatcttcaagaggaagaaaatatagagattaaagatgtcgaagagatcaattttaatgaggtagaaaaagaaggctactttgcctttaaatgtcttggagatagggcttttgagggtatttctctttccttcaaggagggggaaggatattttatatctccttttgatttcaataatgagataagaaagaagattgaaaatataatttcttcagagaatgttaaaaaaattggctcttatattcaaagagatttacattttttaaactgtaaaataaagggcgatgtatttgatgttagtctcgcatcttatcttttgaaccctgaaagacaaaatcactctcttgatattttgataggagagtatctaaataaaacctcttttattcctcaaaaatacgctggttatctttttccgttaaagtctattcttgaggagaggataaagaatgaagggttagaatttgtactttataacatagagattccattaatccctgtactttactccatggagaagtgggggataaaggtagataaggaatatttaaaacagctttctgatgaattctgcgagagaattaaaaaattggaagaagagatatatgaacttgcaggaaccagatttaatctcaattctccaaaacaactttctgaagttttatttgagaggttaaaacttccttctggtaagaaaggaaaaacaggatattctacgtcgtcttctgtgcttcaaaacttaataaatgctcatcctatagtgagaaaaatcctccaatatagagaactctataaattgaagagtacttatgtggatgctattcctaatctggttaatccacaaacaggtagagttcatacaaaatttaatcctacaggtacagctacaggaagaataagtagtagtgaacctaatcttcagaatattcctataaaaagtgaagaaggtagaaagataagaagagccttcgtgtcagaagatggatattttcttgtatctcttgattattctcagatagagctaaggattatggctcatctttctcaggagcctaaattaatatctgccttccaaaaaggagaggatattcatagaagaacagcatcggagatttttggagtgccagaggaagaagttgatgatcttttaaggtcaagggcaaaggccgttaattttggaattatttatggtatctcttcttttggactttctgagactgtaagtattacaccagaagaggcagagaaatttatagactcgtattttaagcactatccaagagtgaagctttttatagataagactattcatgaggcaagagaaaaactgtacgttaaaaccttatttggcagaaaaagatatattcctgagattaagagcataaataaacaggtaaggcctgcctatgaaaggatagcaataaatgcgccaattcagggaacagctgctgatattataaaacttgccatgatagaaatttacaaggagattgaaaataaaaatctcaagtcaagaatactccttcaaattcatgatgagcttattcttgaagtgccagaggaggagatggaatttactcctttaatggcaaaggaaaaaatggaaaaggtggtagaactttcggttcctcttgtagttgaaatctcggtaggtaaaaatcttgctgaattaaaatgagctataagattggtcgac

SEQ ID NO: 2190 - DNA, 2673 bp, Artificial Sequence
  Description of Artificial Sequence: Synthetic DNA sequence of Dictyoglomus thermophilum DNA N793S
atgaaatacctgctgccgaccgctgctgctggtctgctgctcctcgctgcccagccggcgatggccatggatatcggaattaattcggatccgaaatctctgtgggatctttttcaagaaaataccgagaaagagtccaaaaggaagattctgattattgatggctcaagcctcatatacagggtttattacgcccttccccctttaaagacaaaaaatggtgaattaactaatgctctttatggcttcataagaatacttttaaaggccgtagaagattttaatcctgatcttgtaggcgttgcctttgatagacctgaacctacttttaggcatgtgatttataaagagtataaggctaagagaccacctatgaaggatgatttgaaagcgcagataccatggataagagaatttctaaggttaaatgatatacctctattggaagagcctggctatgaagcggatgatataatagctactatagtgaataaatataaggatgatttaaaatatattctctctggagatttagatcttttgcaattagtctcggacaaaacctttctaatacatcctcaaaagggaattactgagtttactatttatgatccaaaagctgtaaaggataggtttggagtagagccctataagattcccttatacaaagtattagtaggggacgaatctgataatattccaggagtaaatggaataggtcctaaaaaggcctcaaagattcttgagaaaatttcaagtgtagatgaatttaaaagtaaaataaaagttttggatagtgatttaagggagcttattgagaaaaattggaatattattgaaagaaatttagaacttgttactttaaaaaatatagataaggatcttattcttaaacccttcgagattaaaagagatgaaaaagtaatagattttttgaagagatatgaacttaagagtattcttcaaaagttatttcctgatcttcaagaggaagaaaatatagagattaaagatgtcgaagagatcaattttaatgaggtagaaaaagaaggctactttgcctttaaatgtcttggagatagggcttttgagggtatttctctttccttcaaggagggggaaggatattttatatctccttttgatttcaataatgagataagaaagaagattgaaaatataatttcttcagagaatgttaaaaaaattggctcttatattcaaagagatttacattttttaaactgtaaaataaagggcgatgtatttgatgttagtctcgcatcttatcttttgaaccctgaaagacaaaatcactctcttgatattttgataggagagtatctaaataaaacctcttttattcctcaaaaatacgctggttatctttttccgttaaagtctattcttgaggagaggataaagaatgaagggttagaatttgtactttataacatagagattccattaatccctgtactttactccatggagaagtgggggataaaggtagataaggaatatttaaaacagctttctgatgaattctgcgagagaattaaaaaattggaagaagagatatatgaacttgcaggaaccagatttaatctcaattctccaaaacaactttctgaagttttatttgagaggttaaaacttccttctggtaagaaaggaaaaacaggatattctacgtcgtcttctgtgcttcaaaacttaataaatgctcatcctatagtgagaaaaatcctccaatatagagaactctataaattgaagagtacttatgtggatgctattcctaatctggttaatccacaaacaggtagagttcatacaaaatttaatcctacaggtacagctacaggaagaataagtagtagtgaacctaatcttcagaatattcctataaaaagtgaagaaggtagaaagataagaagagccttcgtgtcagaagatggatattttcttgtatctcttgattattctcagatagagctaaggattatggctcatctttctcaggagcctaaattaatatctgccttccaaaaaggagaggatattcatagaagaacagcatcggagatttttggagtgccagaggaagaagttgatgatcttttaaggtcaagggcaaaggccgttaattttggaattatttatggtatctcttcttttggactttctgagactgtaagtattacaccagaagaggcagagaaatttatagactcgtattttaagcactatccaagagtgaagctttttatagataagactattcatgaggcaagagaaaaactgtacgttaaaaccttatttggcagaaaaagatatattcctgagattaagagcataaataaacaggtaaggtctgcctatgaaaggatagcaataaatgcgccaattcagggaacagctgctgatattataaaacttgccatgatagaaatttacaaggagattgaaaataaaaatctcaagtcaagaatactccttcaaattcatgatgagcttattcttgaagtgccagaggaggagatggaatttactcctttaatggcaaaggaaaaaatggaaaaggtggtagaactttcggttcctcttgtagttgaaatctcggtaggtaaaaatcttgctgaattaaaatgagctataagattggtcgac

SEQ ID NO: 2191 - DNA, 2673 bp, Artificial Sequence
  Description of Artificial Sequence: Synthetic DNA sequence of Dictyoglomus thermophilum DNA N793T
atgaaatacctgctgccgaccgctgctgctggtctgctgctcctcgctgcccagccggcgatggccatggatatcggaattaattcggatccgaaatctctgtgggatctttttcaagaaaataccgagaaagagtccaaaaggaagattctgattattgatggctcaagcctcatatacagggtttattacgcccttccccctttaaagacaaaaaatggtgaattaactaatgctctttatggcttcataagaatacttttaaaggccgtagaagattttaatcctgatcttgtaggcgttgcctttgatagacctgaacctacttttaggcatgtgatttataaagagtataaggctaagagaccacctatgaaggatgatttgaaagcgcagataccatggataagagaatttctaaggttaaatgatatacctctattggaagagcctggctatgaagcggatgatataatagctactatagtgaataaatataaggatgatttaaaatatattctctctggagatttagatcttttgcaattagtctcggacaaaacctttctaatacatcctcaaaagggaattactgagtttactatttatgatccaaaagctgtaaaggataggtttggagtagagccctataagattcccttatacaaagtattagtaggggacgaatctgataatattccaggagtaaatggaataggtcctaaaaaggcctcaaagattcttgagaaaatttcaagtgtagatgaatttaaaagtaaaataaaagttttggatagtgatttaagggagcttattgagaaaaattggaatattattgaaagaaatttagaacttgttactttaaaaaatatagataaggatcttattcttaaacccttcgagattaaaagagatgaaaaagtaatagattttttgaagagatatgaacttaagagtattcttcaaaagttatttcctgatcttcaagaggaagaaaatatagagattaaagatgtcgaagagatcaattttaatgaggtagaaaaagaaggctactttgcctttaaatgtcttggagatagggcttttgagggtatttctctttccttcaaggagggggaaggatattttatatctccttttgatttcaataatgagataagaaagaagattgaaaatataatttcttcagagaatgttaaaaaaattggctcttatattcaaagagatttacattttttaaactgtaaaataaagggcgatgtatttgatgttagtctcgcatcttatcttttgaaccctgaaagacaaaatcactctcttgatattttgataggagagtatctaaataaaacctcttttattcctcaaaaatacgctggttatctttttccgttaaagtctattcttgaggagaggataaagaatgaagggttagaatttgtactttataacatagagattccattaatccctgtactttactccatggagaagtgggggataaaggtagataaggaatatttaaaacagctttctgatgaattctgcgagagaattaaaaaattggaagaagagatatatgaacttgcaggaaccagatttaatctcaattctccaaaacaactttctgaagttttatttgagaggttaaaacttccttctggtaagaaaggaaaaacaggatattctacgtcgtcttctgtgcttcaaaacttaataaatgctcatcctatagtgagaaaaatcctccaatatagagaactctataaattgaagagtacttatgtggatgctattcctaatctggttaatccacaaacaggtagagttcatacaaaatttaatcctacaggtacagctacaggaagaataagtagtagtgaacctaatcttcagaatattcctataaaaagtgaagaaggtagaaagataagaagagccttcgtgtcagaagatggatattttcttgtatctcttgattattctcagatagagctaaggattatggctcatctttctcaggagcctaaattaatatctgccttccaaaaaggagaggatattcatagaagaacagcatcggagatttttggagtgccagaggaagaagttgatgatcttttaaggtcaagggcaaaggccgttaattttggaattatttatggtatctcttcttttggactttctgagactgtaagtattacaccagaagaggcagagaaatttatagactcgtattttaagcactatccaagagtgaagctttttatagataagactattcatgaggcaagagaaaaactgtacgttaaaaccttatttggcagaaaaagatatattcctgagattaagagcataaataaacaggtaaggactgcctatgaaaggatagcaataaatgcgccaattcagggaacagctgctgatattataaaacttgccatgatagaaatttacaaggagattgaaaataaaaatctcaagtcaagaatactccttcaaattcatgatgagcttattcttgaagtgccagaggaggagatggaatttactcctttaatggcaaaggaaaaaatggaaaaggtggtagaactttcggttcctcttgtagttgaaatctcggtaggtaaaaatcttgctgaattaaaatgagctataagattggtcgac

SEQ ID NO: 2192 - DNA, 2673 bp, Artificial Sequence
  Description of Artificial Sequence: Synthetic DNA sequence of Dictyoglomus thermophilum DNA N793W
atgaaatacctgctgccgaccgctgctgctggtctgctgctcctcgctgcccagccggcgatggccatggatatcggaattaattcggatccgaaatctctgtgggatctttttcaagaaaataccgagaaagagtccaaaaggaagattctgattattgatggctcaagcctcatatacagggtttattacgcccttccccctttaaagacaaaaaatggtgaattaactaatgctctttatggcttcataagaatacttttaaaggccgtagaagattttaatcctgatcttgtaggcgttgcctttgatagacctgaacctacttttaggcatgtgatttataaagagtataaggctaagagaccacctatgaaggatgatttgaaagcgcagataccatggataagagaatttctaaggttaaatgatatacctctattggaagagcctggctatgaagcggatgatataatagctactatagtgaataaatataaggatgatttaaaatatattctctctggagatttagatcttttgcaattagtctcggacaaaacctttctaatacatcctcaaaagggaattactgagtttactatttatgatccaaaagctgtaaaggataggtttggagtagagccctataagattcccttatacaaagtattagtaggggacgaatctgataatattccaggagtaaatggaataggtcctaaaaaggcctcaaagattcttgagaaaatttcaagtgtagatgaatttaaaagtaaaataaaagttttggatagtgatttaagggagcttattgagaaaaattggaatattattgaaagaaatttagaacttgttactttaaaaaatatagataaggatcttattcttaaacccttcgagattaaaagagatgaaaaagtaatagattttttgaagagatatgaacttaagagtattcttcaaaagttatttcctgatcttcaagaggaagaaaatatagagattaaagatgtcgaagagatcaattttaatgaggtagaaaaagaaggctactttgcctttaaatgtcttggagatagggcttttgagggtatttctctttccttcaaggagggggaaggatattttatatctccttttgatttcaataatgagataagaaagaagattgaaaatataatttcttcagagaatgttaaaaaaattggctcttatattcaaagagatttacattttttaaactgtaaaataaagggcgatgtatttgatgttagtctcgcatcttatcttttgaaccctgaaagacaaaatcactctcttgatattttgataggagagtatctaaataaaacctcttttattcctcaaaaatacgctggttatctttttccgttaaagtctattcttgaggagaggataaagaatgaagggttagaatttgtactttataacatagagattccattaatccctgtactttactccatggagaagtgggggataaaggtagataaggaatatttaaaacagctttctgatgaattctgcgagagaattaaaaaattggaagaagagatatatgaacttgcaggaaccagatttaatctcaattctccaaaacaactttctgaagttttatttgagaggttaaaacttccttctggtaagaaaggaaaaacaggatattctacgtcgtcttctgtgcttcaaaacttaataaatgctcatcctatagtgagaaaaatcctccaatatagagaactctataaattgaagagtacttatgtggatgctattcctaatctggttaatccacaaacaggtagagttcatacaaaatttaatcctacaggtacagctacaggaagaataagtagtagtgaacctaatcttcagaatattcctataaaaagtgaagaaggtagaaagataagaagagccttcgtgtcagaagatggatattttcttgtatctcttgattattctcagatagagctaaggattatggctcatctttctcaggagcctaaattaatatctgccttccaaaaaggagaggatattcatagaagaacagcatcggagatttttggagtgccagaggaagaagttgatgatcttttaaggtcaagggcaaaggccgttaattttggaattatttatggtatctcttcttttggactttctgagactgtaagtattacaccagaagaggcagagaaatttatagactcgtattttaagcactatccaagagtgaagctttttatagataagactattcatgaggcaagagaaaaactgtacgttaaaaccttatttggcagaaaaagatatattcctgagattaagagcataaataaacaggtaaggtgggcctatgaaaggatagcaataaatgcgccaattcagggaacagctgctgatattataaaacttgccatgatagaaatttacaaggagattgaaaataaaaatctcaagtcaagaatactccttcaaattcatgatgagcttattcttgaagtgccagaggaggagatggaatttactcctttaatggcaaaggaaaaaatggaaaaggtggtagaactttcggttcctcttgtagttgaaatctcggtaggtaaaaatcttgctgaattaaaatgagctataagattggtcgac

SEQ ID NO: 2193 - DNA, 2673 bp, Artificial Sequence
  Description of Artificial Sequence: Synthetic DNA sequence of Dictyoglomus thermophilum DNA N793Y
atgaaatacctgctgccgaccgctgctgctggtctgctgctcctcgctgcccagccggcgatggccatggatatcggaattaattcggatccgaaatctctgtgggatctttttcaagaaaataccgagaaagagtccaaaaggaagattctgattattgatggctcaagcctcatatacagggtttattacgcccttccccctttaaagacaaaaaatggtgaattaactaatgctctttatggcttcataagaatacttttaaaggccgtagaagattttaatcctgatcttgtaggcgttgcctttgatagacctgaacctacttttaggcatgtgatttataaagagtataaggctaagagaccacctatgaaggatgatttgaaagcgcagataccatggataagagaatttctaaggttaaatgatatacctctattggaagagcctggctatgaagcggatgatataatagctactatagtgaataaatataaggatgatttaaaatatattctctctggagatttagatcttttgcaattagtctcggacaaaacctttctaatacatcctcaaaagggaattactgagtttactatttatgatccaaaagctgtaaaggataggtttggagtagagccctataagattcccttatacaaagtattagtaggggacgaatctgataatattccaggagtaaatggaataggtcctaaaaaggcctcaaagattcttgagaaaatttcaagtgtagatgaatttaaaagtaaaataaaagttttggatagtgatttaagggagcttattgagaaaaattggaatattattgaaagaaatttagaacttgttactttaaaaaatatagataaggatcttattcttaaacccttcgagattaaaagagatgaaaaagtaatagattttttgaagagatatgaacttaagagtattcttcaaaagttatttcctgatcttcaagaggaagaaaatatagagattaaagatgtcgaagagatcaattttaatgaggtagaaaaagaaggctactttgcctttaaatgtcttggagatagggcttttgagggtatttctctttccttcaaggagggggaaggatattttatatctccttttgatttcaataatgagataagaaagaagattgaaaatataatttcttcagagaatgttaaaaaaattggctcttatattcaaagagatttacattttttaaactgtaaaataaagggcgatgtatttgatgttagtctcgcatcttatcttttgaaccctgaaagacaaaatcactctcttgatattttgataggagagtatctaaataaaacctcttttattcctcaaaaatacgctggttatctttttccgttaaagtctattcttgaggagaggataaagaatgaagggttagaatttgtactttataacatagagattccattaatccctgtactttactccatggagaagtgggggataaaggtagataaggaatatttaaaacagctttctgatgaattctgcgagagaattaaaaaattggaagaagagatatatgaacttgcaggaaccagatttaatctcaattctccaaaacaactttctgaagttttatttgagaggttaaaacttccttctggtaagaaaggaaaaacaggatattctacgtcgtcttctgtgcttcaaaacttaataaatgctcatcctatagtgagaaaaatcctccaatatagagaactctataaattgaagagtacttatgtggatgctattcctaatctggttaatccacaaacaggtagagttcatacaaaatttaatcctacaggtacagctacaggaagaataagtagtagtgaacctaatcttcagaatattcctataaaaagtgaagaaggtagaaagataagaagagccttcgtgtcagaagatggatattttcttgtatctcttgattattctcagatagagctaaggattatggctcatctttctcaggagcctaaattaatatctgccttccaaaaaggagaggatattcatagaagaacagcatcggagatttttggagtgccagaggaagaagttgatgatcttttaaggtcaagggcaaaggccgttaattttggaattatttatggtatctcttcttttggactttctgagactgtaagtattacaccagaagaggcagagaaatttatagactcgtattttaagcactatccaagagtgaagctttttatagataagactattcatgaggcaagagaaaaactgtacgttaaaaccttatttggcagaaaaagatatattcctgagattaagagcataaataaacaggtaaggtatgcctatgaaaggatagcaataaatgcgccaattcagggaacagctgctgatattataaaacttgccatgatagaaatttacaaggagattgaaaataaaaatctcaagtcaagaatactccttcaaattcatgatgagcttattcttgaagtgccagaggaggagatggaatttactcctttaatggcaaaggaaaaaatggaaaaggtggtagaactttcggttcctcttgtagttgaaatctcggtaggtaaaaatcttgctgaattaaaatgagctataagattggtcgac

SEQ ID NO: 2194 - DNA, 2673 bp, Artificial Sequence
  Description of Artificial Sequence: Synthetic DNA sequence of Dictyoglomus thermophilum DNA N793V
atgaaatacctgctgccgaccgctgctgctggtctgctgctcctcgctgcccagccggcgatggccatggatatcggaattaattcggatccgaaatctctgtgggatctttttcaagaaaataccgagaaagagtccaaaaggaagattctgattattgatggctcaagcctcatatacagggtttattacgcccttccccctttaaagacaaaaaatggtgaattaactaatgctctttatggcttcataagaatacttttaaaggccgtagaagattttaatcctgatcttgtaggcgttgcctttgatagacctgaacctacttttaggcatgtgatttataaagagtataaggctaagagaccacctatgaaggatgatttgaaagcgcagataccatggataagagaatttctaaggttaaatgatatacctctattggaagagcctggctatgaagcggatgatataatagctactatagtgaataaatataaggatgatttaaaatatattctctctggagatttagatcttttgcaattagtctcggacaaaacctttctaatacatcctcaaaagggaattactgagtttactatttatgatccaaaagctgtaaaggataggtttggagtagagccctataagattcccttatacaaagtattagtaggggacgaatctgataatattccaggagtaaatggaataggtcctaaaaaggcctcaaagattcttgagaaaatttcaagtgtagatgaatttaaaagtaaaataaaagttttggatagtgatttaagggagcttattgagaaaaattggaatattattgaaagaaatttagaacttgttactttaaaaaatatagataaggatcttattcttaaacccttcgagattaaaagagatgaaaaagtaatagattttttgaagagatatgaacttaagagtattcttcaaaagttatttcctgatcttcaagaggaagaaaatatagagattaaagatgtcgaagagatcaattttaatgaggtagaaaaagaaggctactttgcctttaaatgtcttggagatagggcttttgagggtatttctctttccttcaaggagggggaaggatattttatatctccttttgatttcaataatgagataagaaagaagattgaaaatataatttcttcagagaatgttaaaaaaattggctcttatattcaaagagatttacattttttaaactgtaaaataaagggcgatgtatttgatgttagtctcgcatcttatcttttgaaccctgaaagacaaaatcactctcttgatattttgataggagagtatctaaataaaacctcttttattcctcaaaaatacgctggttatctttttccgttaaagtctattcttgaggagaggataaagaatgaagggttagaatttgtactttataacatagagattccattaatccctgtactttactccatggagaagtgggggataaaggtagataaggaatatttaaaacagctttctgatgaattctgcgagagaattaaaaaattggaagaagagatatatgaacttgcaggaaccagatttaatctcaattctccaaaacaactttctgaagttttatttgagaggttaaaacttccttctggtaagaaaggaaaaacaggatattctacgtcgtcttctgtgcttcaaaacttaataaatgctcatcctatagtgagaaaaatcctccaatatagagaactctataaattgaagagtacttatgtggatgctattcctaatctggttaatccacaaacaggtagagttcatacaaaatttaatcctacaggtacagctacaggaagaataagtagtagtgaacctaatcttcagaatattcctataaaaagtgaagaaggtagaaagataagaagagccttcgtgtcagaagatggatattttcttgtatctcttgattattctcagatagagctaaggattatggctcatctttctcaggagcctaaattaatatctgccttccaaaaaggagaggatattcatagaagaacagcatcggagatttttggagtgccagaggaagaagttgatgatcttttaaggtcaagggcaaaggccgttaattttggaattatttatggtatctcttcttttggactttctgagactgtaagtattacaccagaagaggcagagaaatttatagactcgtattttaagcactatccaagagtgaagctttttatagataagactattcatgaggcaagagaaaaactgtacgttaaaaccttatttggcagaaaaagatatattcctgagattaagagcataaataaacaggtaagggttgcctatgaaaggatagcaataaatgcgccaattcagggaacagctgctgatattataaaacttgccatgatagaaatttacaaggagattgaaaataaaaatctcaagtcaagaatactccttcaaattcatgatgagcttattcttgaagtgccagaggaggagatggaatttactcctttaatggcaaaggaaaaaatggaaaaggtggtagaactttcggttcctcttgtagttgaaatctcggtaggtaaaaatcttgctgaattaaaatgagctataagattggtcgac

SEQ ID NO: 2195 - DNA, 2673 bp, Artificial Sequence
  Description of Artificial Sequence: Synthetic DNA sequence of Dictyoglomus thermophilum DNA A794R
atgaaatacctgctgccgaccgctgctgctggtctgctgctcctcgctgcccagccggcgatggccatggatatcggaattaattcggatccgaaatctctgtgggatctttttcaagaaaataccgagaaagagtccaaaaggaagattctgattattgatggctcaagcctcatatacagggtttattacgcccttccccctttaaagacaaaaaatggtgaattaactaatgctctttatggcttcataagaatacttttaaaggccgtagaagattttaatcctgatcttgtaggcgttgcctttgatagacctgaacctacttttaggcatgtgatttataaagagtataaggctaagagaccacctatgaaggatgatttgaaagcgcagataccatggataagagaatttctaaggttaaatgatatacctctattggaagagcctggctatgaagcggatgatataatagctactatagtgaataaatataaggatgatttaaaatatattctctctggagatttagatcttttgcaattagtctcggacaaaacctttctaatacatcctcaaaagggaattactgagtttactatttatgatccaaaagctgtaaaggataggtttggagtagagccctataagattcccttatacaaagtattagtaggggacgaatctgataatattccaggagtaaatggaataggtcctaaaaaggcctcaaagattcttgagaaaatttcaagtgtagatgaatttaaaagtaaaataaaagttttggatagtgatttaagggagcttattgagaaaaattggaatattattgaaagaaatttagaacttgttactttaaaaaatatagataaggatcttattcttaaacccttcgagattaaaagagatgaaaaagtaatagattttttgaagagatatgaacttaagagtattcttcaaaagttatttcctgatcttcaagaggaagaaaatatagagattaaagatgtcgaagagatcaattttaatgaggtagaaaaagaaggctactttgcctttaaatgtcttggagatagggcttttgagggtatttctctttccttcaaggagggggaaggatattttatatctccttttgatttcaataatgagataagaaagaagattgaaaatataatttcttcagagaatgttaaaaaaattggctcttatattcaaagagatttacattttttaaactgtaaaataaagggcgatgtatttgatgttagtctcgcatcttatcttttgaaccctgaaagacaaaatcactctcttgatattttgataggagagtatctaaataaaacctcttttattcctcaaaaatacgctggttatctttttccgttaaagtctattcttgaggagaggataaagaatgaagggttagaatttgtactttataacatagagattccattaatccctgtactttactccatggagaagtgggggataaaggtagataaggaatatttaaaacagctttctgatgaattctgcgagagaattaaaaaattggaagaagagatatatgaacttgcaggaaccagatttaatctcaattctccaaaacaactttctgaagttttatttgagaggttaaaacttccttctggtaagaaaggaaaaacaggatattctacgtcgtcttctgtgcttcaaaacttaataaatgctcatcctatagtgagaaaaatcctccaatatagagaactctataaattgaagagtacttatgtggatgctattcctaatctggttaatccacaaacaggtagagttcatacaaaatttaatcctacaggtacagctacaggaagaataagtagtagtgaacctaatcttcagaatattcctataaaaagtgaagaaggtagaaagataagaagagccttcgtgtcagaagatggatattttcttgtatctcttgattattctcagatagagctaaggattatggctcatctttctcaggagcctaaattaatatctgccttccaaaaaggagaggatattcatagaagaacagcatcggagatttttggagtgccagaggaagaagttgatgatcttttaaggtcaagggcaaaggccgttaattttggaattatttatggtatctcttcttttggactttctgagactgtaagtattacaccagaagaggcagagaaatttatagactcgtattttaagcactatccaagagtgaagctttttatagataagactattcatgaggcaagagaaaaactgtacgttaaaaccttatttggcagaaaaagatatattcctgagattaagagcataaataaacaggtaaggaatcgttatgaaaggatagcaataaatgcgccaattcagggaacagctgctgatattataaaacttgccatgatagaaatttacaaggagattgaaaataaaaatctcaagtcaagaatactccttcaaattcatgatgagcttattcttgaagtgccagaggaggagatggaatttactcctttaatggcaaaggaaaaaatggaaaaggtggtagaactttcggttcctcttgtagttgaaatctcggtaggtaaaaatcttgctgaattaaaatgagctataagattggtcgac

SEQ ID NO: 2196 - DNA, 2673 bp, Artificial Sequence
  Description of Artificial Sequence: Synthetic DNA sequence of Dictyoglomus thermophilum DNA A794N
atgaaatacctgctgccgaccgctgctgctggtctgctgctcctcgctgcccagccggcgatggccatggatatcggaattaattcggatccgaaatctctgtgggatctttttcaagaaaataccgagaaagagtccaaaaggaagattctgattattgatggctcaagcctcatatacagggtttattacgcccttccccctttaaagacaaaaaatggtgaattaactaatgctctttatggcttcataagaatacttttaaaggccgtagaagattttaatcctgatcttgtaggcgttgcctttgatagacctgaacctacttttaggcatgtgatttataaagagtataaggctaagagaccacctatgaaggatgatttgaaagcgcagataccatggataagagaatttctaaggttaaatgatatacctctattggaagagcctggctatgaagcggatgatataatagctactatagtgaataaatataaggatgatttaaaatatattctctctggagatttagatcttttgcaattagtctcggacaaaacctttctaatacatcctcaaaagggaattactgagtttactatttatgatccaaaagctgtaaaggataggtttggagtagagccctataagattcccttatacaaagtattagtaggggacgaatctgataatattccaggagtaaatggaataggtcctaaaaaggcctcaaagattcttgagaaaatttcaagtgtagatgaatttaaaagtaaaataaaagttttggatagtgatttaagggagcttattgagaaaaattggaatattattgaaagaaatttagaacttgttactttaaaaaatatagataaggatcttattcttaaacccttcgagattaaaagagatgaaaaagtaatagattttttgaagagatatgaacttaagagtattcttcaaaagttatttcctgatcttcaagaggaagaaaatatagagattaaagatgtcgaagagatcaattttaatgaggtagaaaaagaaggctactttgcctttaaatgtcttggagatagggcttttgagggtatttctctttccttcaaggagggggaaggatattttatatctccttttgatttcaataatgagataagaaagaagattgaaaatataatttcttcagagaatgttaaaaaaattggctcttatattcaaagagatttacattttttaaactgtaaaataaagggcgatgtatttgatgttagtctcgcatcttatcttttgaaccctgaaagacaaaatcactctcttgatattttgataggagagtatctaaataaaacctcttttattcctcaaaaatacgctggttatctttttccgttaaagtctattcttgaggagaggataaagaatgaagggttagaatttgtactttataacatagagattccattaatccctgtactttactccatggagaagtgggggataaaggtagataaggaatatttaaaacagctttctgatgaattctgcgagagaattaaaaaattggaagaagagatatatgaacttgcaggaaccagatttaatctcaattctccaaaacaactttctgaagttttatttgagaggttaaaacttccttctggtaagaaaggaaaaacaggatattctacgtcgtcttctgtgcttcaaaacttaataaatgctcatcctatagtgagaaaaatcctccaatatagagaactctataaattgaagagtacttatgtggatgctattcctaatctggttaatccacaaacaggtagagttcatacaaaatttaatcctacaggtacagctacaggaagaataagtagtagtgaacctaatcttcagaatattcctataaaaagtgaagaaggtagaaagataagaagagccttcgtgtcagaagatggatattttcttgtatctcttgattattctcagatagagctaaggattatggctcatctttctcaggagcctaaattaatatctgccttccaaaaaggagaggatattcatagaagaacagcatcggagatttttggagtgccagaggaagaagttgatgatcttttaaggtcaagggcaaaggccgttaattttggaattatttatggtatctcttcttttggactttctgagactgtaagtattacaccagaagaggcagagaaatttatagactcgtattttaagcactatccaagagtgaagctttttatagataagactattcatgaggcaagagaaaaactgtacgttaaaaccttatttggcagaaaaagatatattcctgagattaagagcataaataaacaggtaaggaataattatgaaaggatagcaataaatgcgccaattcagggaacagctgctgatattataaaacttgccatgatagaaatttacaaggagattgaaaataaaaatctcaagtcaagaatactccttcaaattcatgatgagcttattcttgaagtgccagaggaggagatggaatttactcctttaatggcaaaggaaaaaatggaaaaggtggtagaactttcggttcctcttgtagttgaaatctcggtaggtaaaaatcttgctgaattaaaatgagctataagattggtcgac

SEQ ID NO: 2197 - DNA, 2673 bp, Artificial Sequence
  Description of Artificial Sequence: Synthetic DNA sequence of Dictyoglomus thermophilum DNA A794D
atgaaatacctgctgccgaccgctgctgctggtctgctgctcctcgctgcccagccggcgatggccatggatatcggaattaattcggatccgaaatctctgtgggatctttttcaagaaaataccgagaaagagtccaaaaggaagattctgattattgatggctcaagcctcatatacagggtttattacgcccttccccctttaaagacaaaaaatggtgaattaactaatgctctttatggcttcataagaatacttttaaaggccgtagaagattttaatcctgatcttgtaggcgttgcctttgatagacctgaacctacttttaggcatgtgatttataaagagtataaggctaagagaccacctatgaaggatgatttgaaagcgcagataccatggataagagaatttctaaggttaaatgatatacctctattggaagagcctggctatgaagcggatgatataatagctactatagtgaataaatataaggatgatttaaaatatattctctctggagatttagatcttttgcaattagtctcggacaaaacctttctaatacatcctcaaaagggaattactgagtttactatttatgatccaaaagctgtaaaggataggtttggagtagagccctataagattcccttatacaaagtattagtaggggacgaatctgataatattccaggagtaaatggaataggtcctaaaaaggcctcaaagattcttgagaaaatttcaagtgtagatgaatttaaaagtaaaataaaagttttggatagtgatttaagggagcttattgagaaaaattggaatattattgaaagaaatttagaacttgttactttaaaaaatatagataaggatcttattcttaaacccttcgagattaaaagagatgaaaaagtaatagattttttgaagagatatgaacttaagagtattcttcaaaagttatttcctgatcttcaagaggaagaaaatatagagattaaagatgtcgaagagatcaattttaatgaggtagaaaaagaaggctactttgcctttaaatgtcttggagatagggcttttgagggtatttctctttccttcaaggagggggaaggatattttatatctccttttgatttcaataatgagataagaaagaagattgaaaatataatttcttcagagaatgttaaaaaaattggctcttatattcaaagagatttacattttttaaactgtaaaataaagggcgatgtatttgatgttagtctcgcatcttatcttttgaaccctgaaagacaaaatcactctcttgatattttgataggagagtatctaaataaaacctcttttattcctcaaaaatacgctggttatctttttccgttaaagtctattcttgaggagaggataaagaatgaagggttagaatttgtactttataacatagagattccattaatccctgtactttactccatggagaagtgggggataaaggtagataaggaatatttaaaacagctttctgatgaattctgcgagagaattaaaaaattggaagaagagatatatgaacttgcaggaaccagatttaatctcaattctccaaaacaactttctgaagttttatttgagaggttaaaacttccttctggtaagaaaggaaaaacaggatattctacgtcgtcttctgtgcttcaaaacttaataaatgctcatcctatagtgagaaaaatcctccaatatagagaactctataaattgaagagtacttatgtggatgctattcctaatctggttaatccacaaacaggtagagttcatacaaaatttaatcctacaggtacagctacaggaagaataagtagtagtgaacctaatcttcagaatattcctataaaaagtgaagaaggtagaaagataagaagagccttcgtgtcagaagatggatattttcttgtatctcttgattattctcagatagagctaaggattatggctcatctttctcaggagcctaaattaatatctgccttccaaaaaggagaggatattcatagaagaacagcatcggagatttttggagtgccagaggaagaagttgatgatcttttaaggtcaagggcaaaggccgttaattttggaattatttatggtatctcttcttttggactttctgagactgtaagtattacaccagaagaggcagagaaatttatagactcgtattttaagcactatccaagagtgaagctttttatagataagactattcatgaggcaagagaaaaactgtacgttaaaaccttatttggcagaaaaagatatattcctgagattaagagcataaataaacaggtaaggaatgattatgaaaggatagcaataaatgcgccaattcagggaacagctgctgatattataaaacttgccatgatagaaatttacaaggagattgaaaataaaaatctcaagtcaagaatactccttcaaattcatgatgagcttattcttgaagtgccagaggaggagatggaatttactcctttaatggcaaaggaaaaaatggaaaaggtggtagaactttcggttcctcttgtagttgaaatctcggtaggtaaaaatcttgctgaattaaaatgagctataagattggtcgac

SEQ ID NO: 2198 - DNA, 2673 bp, Artificial Sequence
  Description of Artificial Sequence: Synthetic DNA sequence of Dictyoglomus thermophilum DNA A794C
atgaaatacctgctgccgaccgctgctgctggtctgctgctcctcgctgcccagccggcgatggccatggatatcggaattaattcggatccgaaatctctgtgggatctttttcaagaaaataccgagaaagagtccaaaaggaagattctgattattgatggctcaagcctcatatacagggtttattacgcccttccccctttaaagacaaaaaatggtgaattaactaatgctctttatggcttcataagaatacttttaaaggccgtagaagattttaatcctgatcttgtaggcgttgcctttgatagacctgaacctacttttaggcatgtgatttataaagagtataaggctaagagaccacctatgaaggatgatttgaaagcgcagataccatggataagagaatttctaaggttaaatgatatacctctattggaagagcctggctatgaagcggatgatataatagctactatagtgaataaatataaggatgatttaaaatatattctctctggagatttagatcttttgcaattagtctcggacaaaacctttctaatacatcctcaaaagggaattactgagtttactatttatgatccaaaagctgtaaaggataggtttggagtagagccctataagattcccttatacaaagtattagtaggggacgaatctgataatattccaggagtaaatggaataggtcctaaaaaggcctcaaagattcttgagaaaatttcaagtgtagatgaatttaaaagtaaaataaaagttttggatagtgatttaagggagcttattgagaaaaattggaatattattgaaagaaatttagaacttgttactttaaaaaatatagataaggatcttattcttaaacccttcgagattaaaagagatgaaaaagtaatagattttttgaagagatatgaacttaagagtattcttcaaaagttatttcctgatcttcaagaggaagaaaatatagagattaaagatgtcgaagagatcaattttaatgaggtagaaaaagaaggctactttgcctttaaatgtcttggagatagggcttttgagggtatttctctttccttcaaggagggggaaggatattttatatctccttttgatttcaataatgagataagaaagaagattgaaaatataatttcttcagagaatgttaaaaaaattggctcttatattcaaagagatttacattttttaaactgtaaaataaagggcgatgtatttgatgttagtctcgcatcttatcttttgaaccctgaaagacaaaatcactctcttgatattttgataggagagtatctaaataaaacctcttttattcctcaaaaatacgctggttatctttttccgttaaagtctattcttgaggagaggataaagaatgaagggttagaatttgtactttataacatagagattccattaatccctgtactttactccatggagaagtgggggataaaggtagataaggaatatttaaaacagctttctgatgaattctgcgagagaattaaaaaattggaagaagagatatatgaacttgcaggaaccagatttaatctcaattctccaaaacaactttctgaagttttatttgagaggttaaaacttccttctggtaagaaaggaaaaacaggatattctacgtcgtcttctgtgcttcaaaacttaataaatgctcatcctatagtgagaaaaatcctccaatatagagaactctataaattgaagagtacttatgtggatgctattcctaatctggttaatccacaaacaggtagagttcatacaaaatttaatcctacaggtacagctacaggaagaataagtagtagtgaacctaatcttcagaatattcctataaaaagtgaagaaggtagaaagataagaagagccttcgtgtcagaagatggatattttcttgtatctcttgattattctcagatagagctaaggattatggctcatctttctcaggagcctaaattaatatctgccttccaaaaaggagaggatattcatagaagaacagcatcggagatttttggagtgccagaggaagaagttgatgatcttttaaggtcaagggcaaaggccgttaattttggaattatttatggtatctcttcttttggactttctgagactgtaagtattacaccagaagaggcagagaaatttatagactcgtattttaagcactatccaagagtgaagctttttatagataagactattcatgaggcaagagaaaaactgtacgttaaaaccttatttggcagaaaaagatatattcctgagattaagagcataaataaacaggtaaggaattgttatgaaaggatagcaataaatgcgccaattcagggaacagctgctgatattataaaacttgccatgatagaaatttacaaggagattgaaaataaaaatctcaagtcaagaatactccttcaaattcatgatgagcttattcttgaagtgccagaggaggagatggaatttactcctttaatggcaaaggaaaaaatggaaaaggtggtagaactttcggttcctcttgtagttgaaatctcggtaggtaaaaatcttgctgaattaaaatgagctataagattggtcgac

SEQ ID NO: 2199 - DNA, 2673 bp, Artificial Sequence
  Description of Artificial Sequence: Synthetic DNA sequence of Dictyoglomus thermophilum DNA A794E
atgaaatacctgctgccgaccgctgctgctggtctgctgctcctcgctgcccagccggcgatggccatggatatcggaattaattcggatccgaaatctctgtgggatctttttcaagaaaataccgagaaagagtccaaaaggaagattctgattattgatggctcaagcctcatatacagggtttattacgcccttccccctttaaagacaaaaaatggtgaattaactaatgctctttatggcttcataagaatacttttaaaggccgtagaagattttaatcctgatcttgtaggcgttgcctttgatagacctgaacctacttttaggcatgtgatttataaagagtataaggctaagagaccacctatgaaggatgatttgaaagcgcagataccatggataagagaatttctaaggttaaatgatatacctctattggaagagcctggctatgaagcggatgatataatagctactatagtgaataaatataaggatgatttaaaatatattctctctggagatttagatcttttgcaattagtctcggacaaaacctttctaatacatcctcaaaagggaattactgagtttactatttatgatccaaaagctgtaaaggataggtttggagtagagccctataagattcccttatacaaagtattagtaggggacgaatctgataatattccaggagtaaatggaataggtcctaaaaaggcctcaaagattcttgagaaaatttcaagtgtagatgaatttaaaagtaaaataaaagttttggatagtgatttaagggagcttattgagaaaaattggaatattattgaaagaaatttagaacttgttactttaaaaaatatagataaggatcttattcttaaacccttcgagattaaaagagatgaaaaagtaatagattttttgaagagatatgaacttaagagtattcttcaaaagttatttcctgatcttcaagaggaagaaaatatagagattaaagatgtcgaagagatcaattttaatgaggtagaaaaagaaggctactttgcctttaaatgtcttggagatagggcttttgagggtatttctctttccttcaaggagggggaaggatattttatatctccttttgatttcaataatgagataagaaagaagattgaaaatataatttcttcagagaatgttaaaaaaattggctcttatattcaaagagatttacattttttaaactgtaaaataaagggcgatgtatttgatgttagtctcgcatcttatcttttgaaccctgaaagacaaaatcactctcttgatattttgataggagagtatctaaataaaacctcttttattcctcaaaaatacgctggttatctttttccgttaaagtctattcttgaggagaggataaagaatgaagggttagaatttgtactttataacatagagattccattaatccctgtactttactccatggagaagtgggggataaaggtagataaggaatatttaaaacagctttctgatgaattctgcgagagaattaaaaaattggaagaagagatatatgaacttgcaggaaccagatttaatctcaattctccaaaacaactttctgaagttttatttgagaggttaaaacttccttctggtaagaaaggaaaaacaggatattctacgtcgtcttctgtgcttcaaaacttaataaatgctcatcctatagtgagaaaaatcctccaatatagagaactctataaattgaagagtacttatgtggatgctattcctaatctggttaatccacaaacaggtagagttcatacaaaatttaatcctacaggtacagctacaggaagaataagtagtagtgaacctaatcttcagaatattcctataaaaagtgaagaaggtagaaagataagaagagccttcgtgtcagaagatggatattttcttgtatctcttgattattctcagatagagctaaggattatggctcatctttctcaggagcctaaattaatatctgccttccaaaaaggagaggatattcatagaagaacagcatcggagatttttggagtgccagaggaagaagttgatgatcttttaaggtcaagggcaaaggccgttaattttggaattatttatggtatctcttcttttggactttctgagactgtaagtattacaccagaagaggcagagaaatttatagactcgtattttaagcactatccaagagtgaagctttttatagataagactattcatgaggcaagagaaaaactgtacgttaaaaccttatttggcagaaaaagatatattcctgagattaagagcataaataaacaggtaaggaatgaatatgaaaggatagcaataaatgcgccaattcagggaacagctgctgatattataaaacttgccatgatagaaatttacaaggagattgaaaataaaaatctcaagtcaagaatactccttcaaattcatgatgagcttattcttgaagtgccagaggaggagatggaatttactcctttaatggcaaaggaaaaaatggaaaaggtggtagaactttcggttcctcttgtagttgaaatctcggtaggtaaaaatcttgctgaattaaaatgagctataagattggtcgac

SEQ ID NO: 2200 - DNA, 2673 bp, Artificial Sequence
  Description of Artificial Sequence: Synthetic DNA sequence of Dictyoglomus thermophilum DNA A794Q
atgaaatacctgctgccgaccgctgctgctggtctgctgctcctcgctgcccagccggcgatggccatggatatcggaattaattcggatccgaaatctctgtgggatctttttcaagaaaataccgagaaagagtccaaaaggaagattctgattattgatggctcaagcctcatatacagggtttattacgcccttccccctttaaagacaaaaaatggtgaattaactaatgctctttatggcttcataagaatacttttaaaggccgtagaagattttaatcctgatcttgtaggcgttgcctttgatagacctgaacctacttttaggcatgtgatttataaagagtataaggctaagagaccacctatgaaggatgatttgaaagcgcagataccatggataagagaatttctaaggttaaatgatatacctctattggaagagcctggctatgaagcggatgatataatagctactatagtgaataaatataaggatgatttaaaatatattctctctggagatttagatcttttgcaattagtctcggacaaaacctttctaatacatcctcaaaagggaattactgagtttactatttatgatccaaaagctgtaaaggataggtttggagtagagccctataagattcccttatacaaagtattagtaggggacgaatctgataatattccaggagtaaatggaataggtcctaaaaaggcctcaaagattcttgagaaaatttcaagtgtagatgaatttaaaagtaaaataaaagttttggatagtgatttaagggagcttattgagaaaaattggaatattattgaaagaaatttagaacttgttactttaaaaaatatagataaggatcttattcttaaacccttcgagattaaaagagatgaaaaagtaatagattttttgaagagatatgaacttaagagtattcttcaaaagttatttcctgatcttcaagaggaagaaaatatagagattaaagatgtcgaagagatcaattttaatgaggtagaaaaagaaggctactttgcctttaaatgtcttggagatagggcttttgagggtatttctctttccttcaaggagggggaaggatattttatatctccttttgatttcaataatgagataagaaagaagattgaaaatataatttcttcagagaatgttaaaaaaattggctcttatattcaaagagatttacattttttaaactgtaaaataaagggcgatgtatttgatgttagtctcgcatcttatcttttgaaccctgaaagacaaaatcactctcttgatattttgataggagagtatctaaataaaacctcttttattcctcaaaaatacgctggttatctttttccgttaaagtctattcttgaggagaggataaagaatgaagggttagaatttgtactttataacatagagattccattaatccctgtactttactccatggagaagtgggggataaaggtagataaggaatatttaaaacagctttctgatgaattctgcgagagaattaaaaaattggaagaagagatatatgaacttgcaggaaccagatttaatctcaattctccaaaacaactttctgaagttttatttgagaggttaaaacttccttctggtaagaaaggaaaaacaggatattctacgtcgtcttctgtgcttcaaaacttaataaatgctcatcctatagtgagaaaaatcctccaatatagagaactctataaattgaagagtacttatgtggatgctattcctaatctggttaatccacaaacaggtagagttcatacaaaatttaatcctacaggtacagctacaggaagaataagtagtagtgaacctaatcttcagaatattcctataaaaagtgaagaaggtagaaagataagaagagccttcgtgtcagaagatggatattttcttgtatctcttgattattctcagatagagctaaggattatggctcatctttctcaggagcctaaattaatatctgccttccaaaaaggagaggatattcatagaagaacagcatcggagatttttggagtgccagaggaagaagttgatgatcttttaaggtcaagggcaaaggccgttaattttggaattatttatggtatctcttcttttggactttctgagactgtaagtattacaccagaagaggcagagaaatttatagactcgtattttaagcactatccaagagtgaagctttttatagataagactattcatgaggcaagagaaaaactgtacgttaaaaccttatttggcagaaaaagatatattcctgagattaagagcataaataaacaggtaaggaatcaatatgaaaggatagcaataaatgcgccaattcagggaacagctgctgatattataaaacttgccatgatagaaatttacaaggagattgaaaataaaaatctcaagtcaagaatactccttcaaattcatgatgagcttattcttgaagtgccagaggaggagatggaatttactcctttaatggcaaaggaaaaaatggaaaaggtggtagaactttcggttcctcttgtagttgaaatctcggtaggtaaaaatcttgctgaattaaaatgagctataagattggtcgac

SEQ ID NO: 2201 - DNA, 2673 bp, Artificial Sequence
  Description of Artificial Sequence: Synthetic DNA sequence of Dictyoglomus thermophilum DNA A794G
atgaaatacctgctgccgaccgctgctgctggtctgctgctcctcgctgcccagccggcgatggccatggatatcggaattaattcggatccgaaatctctgtgggatctttttcaagaaaataccgagaaagagtccaaaaggaagattctgattattgatggctcaagcctcatatacagggtttattacgcccttccccctttaaagacaaaaaatggtgaattaactaatgctctttatggcttcataagaatacttttaaaggccgtagaagattttaatcctgatcttgtaggcgttgcctttgatagacctgaacctacttttaggcatgtgatttataaagagtataaggctaagagaccacctatgaaggatgatttgaaagcgcagataccatggataagagaatttctaaggttaaatgatatacctctattggaagagcctggctatgaagcggatgatataatagctactatagtgaataaatataaggatgatttaaaatatattctctctggagatttagatcttttgcaattagtctcggacaaaacctttctaatacatcctcaaaagggaattactgagtttactatttatgatccaaaagctgtaaaggataggtttggagtagagccctataagattcccttatacaaagtattagtaggggacgaatctgataatattccaggagtaaatggaataggtcctaaaaaggcctcaaagattcttgagaaaatttcaagtgtagatgaatttaaaagtaaaataaaagttttggatagtgatttaagggagcttattgagaaaaattggaatattattgaaagaaatttagaacttgttactttaaaaaatatagataaggatcttattcttaaacccttcgagattaaaagagatgaaaaagtaatagattttttgaagagatatgaacttaagagtattcttcaaaagttatttcctgatcttcaagaggaagaaaatatagagattaaagatgtcgaagagatcaattttaatgaggtagaaaaagaaggctactttgcctttaaatgtcttggagatagggcttttgagggtatttctctttccttcaaggagggggaaggatattttatatctccttttgatttcaataatgagataagaaagaagattgaaaatataatttcttcagagaatgttaaaaaaattggctcttatattcaaagagatttacattttttaaactgtaaaataaagggcgatgtatttgatgttagtctcgcatcttatcttttgaaccctgaaagacaaaatcactctcttgatattttgataggagagtatctaaataaaacctcttttattcctcaaaaatacgctggttatctttttccgttaaagtctattcttgaggagaggataaagaatgaagggttagaatttgtactttataacatagagattccattaatccctgtactttactccatggagaagtgggggataaaggtagataaggaatatttaaaacagctttctgatgaattctgcgagagaattaaaaaattggaagaagagatatatgaacttgcaggaaccagatttaatctcaattctccaaaacaactttctgaagttttatttgagaggttaaaacttccttctggtaagaaaggaaaaacaggatattctacgtcgtcttctgtgcttcaaaacttaataaatgctcatcctatagtgagaaaaatcctccaatatagagaactctataaattgaagagtacttatgtggatgctattcctaatctggttaatccacaaacaggtagagttcatacaaaatttaatcctacaggtacagctacaggaagaataagtagtagtgaacctaatcttcagaatattcctataaaaagtgaagaaggtagaaagataagaagagccttcgtgtcagaagatggatattttcttgtatctcttgattattctcagatagagctaaggattatggctcatctttctcaggagcctaaattaatatctgccttccaaaaaggagaggatattcatagaagaacagcatcggagatttttggagtgccagaggaagaagttgatgatcttttaaggtcaagggcaaaggccgttaattttggaattatttatggtatctcttcttttggactttctgagactgtaagtattacaccagaagaggcagagaaatttatagactcgtattttaagcactatccaagagtgaagctttttatagataagactattcatgaggcaagagaaaaactgtacgttaaaaccttatttggcagaaaaagatatattcctgagattaagagcataaataaacaggtaaggaatggttatgaaaggatagcaataaatgcgccaattcagggaacagctgctgatattataaaacttgccatgatagaaatttacaaggagattgaaaataaaaatctcaagtcaagaatactccttcaaattcatgatgagcttattcttgaagtgccagaggaggagatggaatttactcctttaatggcaaaggaaaaaatggaaaaggtggtagaactttcggttcctcttgtagttgaaatctcggtaggtaaaaatcttgctgaattaaaatgagctataagattggtcgac

SEQ ID NO: 2202 - DNA, 2673 bp, Artificial Sequence
  Description of Artificial Sequence: Synthetic DNA sequence of Dictyoglomus thermophilum DNA A794H
atgaaatacctgctgccgaccgctgctgctggtctgctgctcctcgctgcccagccggcgatggccatggatatcggaattaattcggatccgaaatctctgtgggatctttttcaagaaaataccgagaaagagtccaaaaggaagattctgattattgatggctcaagcctcatatacagggtttattacgcccttccccctttaaagacaaaaaatggtgaattaactaatgctctttatggcttcataagaatacttttaaaggccgtagaagattttaatcctgatcttgtaggcgttgcctttgatagacctgaacctacttttaggcatgtgatttataaagagtataaggctaagagaccacctatgaaggatgatttgaaagcgcagataccatggataagagaatttctaaggttaaatgatatacctctattggaagagcctggctatgaagcggatgatataatagctactatagtgaataaatataaggatgatttaaaatatattctctctggagatttagatcttttgcaattagtctcggacaaaacctttctaatacatcctcaaaagggaattactgagtttactatttatgatccaaaagctgtaaaggataggtttggagtagagccctataagattcccttatacaaagtattagtaggggacgaatctgataatattccaggagtaaatggaataggtcctaaaaaggcctcaaagattcttgagaaaatttcaagtgtagatgaatttaaaagtaaaataaaagttttggatagtgatttaagggagcttattgagaaaaattggaatattattgaaagaaatttagaacttgttactttaaaaaatatagataaggatcttattcttaaacccttcgagattaaaagagatgaaaaagtaatagattttttgaagagatatgaacttaagagtattcttcaaaagttatttcctgatcttcaagaggaagaaaatatagagattaaagatgtcgaagagatcaattttaatgaggtagaaaaagaaggctactttgcctttaaatgtcttggagatagggcttttgagggtatttctctttccttcaaggagggggaaggatattttatatctccttttgatttcaataatgagataagaaagaagattgaaaatataatttcttcagagaatgttaaaaaaattggctcttatattcaaagagatttacattttttaaactgtaaaataaagggcgatgtatttgatgttagtctcgcatcttatcttttgaaccctgaaagacaaaatcactctcttgatattttgataggagagtatctaaataaaacctcttttattcctcaaaaatacgctggttatctttttccgttaaagtctattcttgaggagaggataaagaatgaagggttagaatttgtactttataacatagagattccattaatccctgtactttactccatggagaagtgggggataaaggtagataaggaatatttaaaacagctttctgatgaattctgcgagagaattaaaaaattggaagaagagatatatgaacttgcaggaaccagatttaatctcaattctccaaaacaactttctgaagttttatttgagaggttaaaacttccttctggtaagaaaggaaaaacaggatattctacgtcgtcttctgtgcttcaaaacttaataaatgctcatcctatagtgagaaaaatcctccaatatagagaactctataaattgaagagtacttatgtggatgctattcctaatctggttaatccacaaacaggtagagttcatacaaaatttaatcctacaggtacagctacaggaagaataagtagtagtgaacctaatcttcagaatattcctataaaaagtgaagaaggtagaaagataagaagagccttcgtgtcagaagatggatattttcttgtatctcttgattattctcagatagagctaaggattatggctcatctttctcaggagcctaaattaatatctgccttccaaaaaggagaggatattcatagaagaacagcatcggagatttttggagtgccagaggaagaagttgatgatcttttaaggtcaagggcaaaggccgttaattttggaattatttatggtatctcttcttttggactttctgagactgtaagtattacaccagaagaggcagagaaatttatagactcgtattttaagcactatccaagagtgaagctttttatagataagactattcatgaggcaagagaaaaactgtacgttaaaaccttatttggcagaaaaagatatattcctgagattaagagcataaataaacaggtaaggaatcattatgaaaggatagcaataaatgcgccaattcagggaacagctgctgatattataaaacttgccatgatagaaatttacaaggagattgaaaataaaaatctcaagtcaagaatactccttcaaattcatgatgagcttattcttgaagtgccagaggaggagatggaatttactcctttaatggcaaaggaaaaaatggaaaaggtggtagaactttcggttcctcttgtagttgaaatctcggtaggtaaaaatcttgctgaattaaaatgagctataagattggtcgac

SEQ ID NO: 2203 - DNA, 2673 bp, Artificial Sequence
  Description of Artificial Sequence: Synthetic DNA sequence of Dictyoglomus thermophilum DNA A794I
atgaaatacctgctgccgaccgctgctgctggtctgctgctcctcgctgcccagccggcgatggccatggatatcggaattaattcggatccgaaatctctgtgggatctttttcaagaaaataccgagaaagagtccaaaaggaagattctgattattgatggctcaagcctcatatacagggtttattacgcccttccccctttaaagacaaaaaatggtgaattaactaatgctctttatggcttcataagaatacttttaaaggccgtagaagattttaatcctgatcttgtaggcgttgcctttgatagacctgaacctacttttaggcatgtgatttataaagagtataaggctaagagaccacctatgaaggatgatttgaaagcgcagataccatggataagagaatttctaaggttaaatgatatacctctattggaagagcctggctatgaagcggatgatataatagctactatagtgaataaatataaggatgatttaaaatatattctctctggagatttagatcttttgcaattagtctcggacaaaacctttctaatacatcctcaaaagggaattactgagtttactatttatgatccaaaagctgtaaaggataggtttggagtagagccctataagattcccttatacaaagtattagtaggggacgaatctgataatattccaggagtaaatggaataggtcctaaaaaggcctcaaagattcttgagaaaatttcaagtgtagatgaatttaaaagtaaaataaaagttttggatagtgatttaagggagcttattgagaaaaattggaatattattgaaagaaatttagaacttgttactttaaaaaatatagataaggatcttattcttaaacccttcgagattaaaagagatgaaaaagtaatagattttttgaagagatatgaacttaagagtattcttcaaaagttatttcctgatcttcaagaggaagaaaatatagagattaaagatgtcgaagagatcaattttaatgaggtagaaaaagaaggctactttgcctttaaatgtcttggagatagggcttttgagggtatttctctttccttcaaggagggggaaggatattttatatctccttttgatttcaataatgagataagaaagaagattgaaaatataatttcttcagagaatgttaaaaaaattggctcttatattcaaagagatttacattttttaaactgtaaaataaagggcgatgtatttgatgttagtctcgcatcttatcttttgaaccctgaaagacaaaatcactctcttgatattttgataggagagtatctaaataaaacctcttttattcctcaaaaatacgctggttatctttttccgttaaagtctattcttgaggagaggataaagaatgaagggttagaatttgtactttataacatagagattccattaatccctgtactttactccatggagaagtgggggataaaggtagataaggaatatttaaaacagctttctgatgaattctgcgagagaattaaaaaattggaagaagagatatatgaacttgcaggaaccagatttaatctcaattctccaaaacaactttctgaagttttatttgagaggttaaaacttccttctggtaagaaaggaaaaacaggatattctacgtcgtcttctgtgcttcaaaacttaataaatgctcatcctatagtgagaaaaatcctccaatatagagaactctataaattgaagagtacttatgtggatgctattcctaatctggttaatccacaaacaggtagagttcatacaaaatttaatcctacaggtacagctacaggaagaataagtagtagtgaacctaatcttcagaatattcctataaaaagtgaagaaggtagaaagataagaagagccttcgtgtcagaagatggatattttcttgtatctcttgattattctcagatagagctaaggattatggctcatctttctcaggagcctaaattaatatctgccttccaaaaaggagaggatattcatagaagaacagcatcggagatttttggagtgccagaggaagaagttgatgatcttttaaggtcaagggcaaaggccgttaattttggaattatttatggtatctcttcttttggactttctgagactgtaagtattacaccagaagaggcagagaaatttatagactcgtattttaagcactatccaagagtgaagctttttatagataagactattcatgaggcaagagaaaaactgtacgttaaaaccttatttggcagaaaaagatatattcctgagattaagagcataaataaacaggtaaggaatatttatgaaaggatagcaataaatgcgccaattcagggaacagctgctgatattataaaacttgccatgatagaaatttacaaggagattgaaaataaaaatctcaagtcaagaatactccttcaaattcatgatgagcttattcttgaagtgccagaggaggagatggaatttactcctttaatggcaaaggaaaaaatggaaaaggtggtagaactttcggttcctcttgtagttgaaatctcggtaggtaaaaatcttgctgaattaaaatgagctataagattggtcgac

SEQ ID NO: 2204 - DNA, 2673 bp, Artificial Sequence
  Description of Artificial Sequence: Synthetic DNA sequence of Dictyoglomus thermophilum DNA A794L
atgaaatacctgctgccgaccgctgctgctggtctgctgctcctcgctgcccagccggcgatggccatggatatcggaattaattcggatccgaaatctctgtgggatctttttcaagaaaataccgagaaagagtccaaaaggaagattctgattattgatggctcaagcctcatatacagggtttattacgcccttccccctttaaagacaaaaaatggtgaattaactaatgctctttatggcttcataagaatacttttaaaggccgtagaagattttaatcctgatcttgtaggcgttgcctttgatagacctgaacctacttttaggcatgtgatttataaagagtataaggctaagagaccacctatgaaggatgatttgaaagcgcagataccatggataagagaatttctaaggttaaatgatatacctctattggaagagcctggctatgaagcggatgatataatagctactatagtgaataaatataaggatgatttaaaatatattctctctggagatttagatcttttgcaattagtctcggacaaaacctttctaatacatcctcaaaagggaattactgagtttactatttatgatccaaaagctgtaaaggataggtttggagtagagccctataagattcccttatacaaagtattagtaggggacgaatctgataatattccaggagtaaatggaataggtcctaaaaaggcctcaaagattcttgagaaaatttcaagtgtagatgaatttaaaagtaaaataaaagttttggatagtgatttaagggagcttattgagaaaaattggaatattattgaaagaaatttagaacttgttactttaaaaaatatagataaggatcttattcttaaacccttcgagattaaaagagatgaaaaagtaatagattttttgaagagatatgaacttaagagtattcttcaaaagttatttcctgatcttcaagaggaagaaaatatagagattaaagatgtcgaagagatcaattttaatgaggtagaaaaagaaggctactttgcctttaaatgtcttggagatagggcttttgagggtatttctctttccttcaaggagggggaaggatattttatatctccttttgatttcaataatgagataagaaagaagattgaaaatataatttcttcagagaatgttaaaaaaattggctcttatattcaaagagatttacattttttaaactgtaaaataaagggcgatgtatttgatgttagtctcgcatcttatcttttgaaccctgaaagacaaaatcactctcttgatattttgataggagagtatctaaataaaacctcttttattcctcaaaaatacgctggttatctttttccgttaaagtctattcttgaggagaggataaagaatgaagggttagaatttgtactttataacatagagattccattaatccctgtactttactccatggagaagtgggggataaaggtagataaggaatatttaaaacagctttctgatgaattctgcgagagaattaaaaaattggaagaagagatatatgaacttgcaggaaccagatttaatctcaattctccaaaacaactttctgaagttttatttgagaggttaaaacttccttctggtaagaaaggaaaaacaggatattctacgtcgtcttctgtgcttcaaaacttaataaatgctcatcctatagtgagaaaaatcctccaatatagagaactctataaattgaagagtacttatgtggatgctattcctaatctggttaatccacaaacaggtagagttcatacaaaatttaatcctacaggtacagctacaggaagaataagtagtagtgaacctaatcttcagaatattcctataaaaagtgaagaaggtagaaagataagaagagccttcgtgtcagaagatggatattttcttgtatctcttgattattctcagatagagctaaggattatggctcatctttctcaggagcctaaattaatatctgccttccaaaaaggagaggatattcatagaagaacagcatcggagatttttggagtgccagaggaagaagttgatgatcttttaaggtcaagggcaaaggccgttaattttggaattatttatggtatctcttcttttggactttctgagactgtaagtattacaccagaagaggcagagaaatttatagactcgtattttaagcactatccaagagtgaagctttttatagataagactattcatgaggcaagagaaaaactgtacgttaaaaccttatttggcagaaaaagatatattcctgagattaagagcataaataaacaggtaaggaatctttatgaaaggatagcaataaatgcgccaattcagggaacagctgctgatattataaaacttgccatgatagaaatttacaaggagattgaaaataaaaatctcaagtcaagaatactccttcaaattcatgatgagcttattcttgaagtgccagaggaggagatggaatttactcctttaatggcaaaggaaaaaatggaaaaggtggtagaactttcggttcctcttgtagttgaaatctcggtaggtaaaaatcttgctgaattaaaatgagctataagattggtcgac

SEQ ID NO: 2205 - DNA, 2673 bp, Artificial Sequence
  Description of Artificial Sequence: Synthetic DNA sequence of Dictyoglomus thermophilum DNA A794K
atgaaatacctgctgccgaccgctgctgctggtctgctgctcctcgctgcccagccggcgatggccatggatatcggaattaattcggatccgaaatctctgtgggatctttttcaagaaaataccgagaaagagtccaaaaggaagattctgattattgatggctcaagcctcatatacagggtttattacgcccttccccctttaaagacaaaaaatggtgaattaactaatgctctttatggcttcataagaatacttttaaaggccgtagaagattttaatcctgatcttgtaggcgttgcctttgatagacctgaacctacttttaggcatgtgatttataaagagtataaggctaagagaccacctatgaaggatgatttgaaagcgcagataccatggataagagaatttctaaggttaaatgatatacctctattggaagagcctggctatgaagcggatgatataatagctactatagtgaataaatataaggatgatttaaaatatattctctctggagatttagatcttttgcaattagtctcggacaaaacctttctaatacatcctcaaaagggaattactgagtttactatttatgatccaaaagctgtaaaggataggtttggagtagagccctataagattcccttatacaaagtattagtaggggacgaatctgataatattccaggagtaaatggaataggtcctaaaaaggcctcaaagattcttgagaaaatttcaagtgtagatgaatttaaaagtaaaataaaagttttggatagtgatttaagggagcttattgagaaaaattggaatattattgaaagaaatttagaacttgttactttaaaaaatatagataaggatcttattcttaaacccttcgagattaaaagagatgaaaaagtaatagattttttgaagagatatgaacttaagagtattcttcaaaagttatttcctgatcttcaagaggaagaaaatatagagattaaagatgtcgaagagatcaattttaatgaggtagaaaaagaaggctactttgcctttaaatgtcttggagatagggcttttgagggtatttctctttccttcaaggagggggaaggatattttatatctccttttgatttcaataatgagataagaaagaagattgaaaatataatttcttcagagaatgttaaaaaaattggctcttatattcaaagagatttacattttttaaactgtaaaataaagggcgatgtatttgatgttagtctcgcatcttatcttttgaaccctgaaagacaaaatcactctcttgatattttgataggagagtatctaaataaaacctcttttattcctcaaaaatacgctggttatctttttccgttaaagtctattcttgaggagaggataaagaatgaagggttagaatttgtactttataacatagagattccattaatccctgtactttactccatggagaagtgggggataaaggtagataaggaatatttaaaacagctttctgatgaattctgcgagagaattaaaaaattggaagaagagatatatgaacttgcaggaaccagatttaatctcaattctccaaaacaactttctgaagttttatttgagaggttaaaacttccttctggtaagaaaggaaaaacaggatattctacgtcgtcttctgtgcttcaaaacttaataaatgctcatcctatagtgagaaaaatcctccaatatagagaactctataaattgaagagtacttatgtggatgctattcctaatctggttaatccacaaacaggtagagttcatacaaaatttaatcctacaggtacagctacaggaagaataagtagtagtgaacctaatcttcagaatattcctataaaaagtgaagaaggtagaaagataagaagagccttcgtgtcagaagatggatattttcttgtatctcttgattattctcagatagagctaaggattatggctcatctttctcaggagcctaaattaatatctgccttccaaaaaggagaggatattcatagaagaacagcatcggagatttttggagtgccagaggaagaagttgatgatcttttaaggtcaagggcaaaggccgttaattttggaattatttatggtatctcttcttttggactttctgagactgtaagtattacaccagaagaggcagagaaatttatagactcgtattttaagcactatccaagagtgaagctttttatagataagactattcatgaggcaagagaaaaactgtacgttaaaaccttatttggcagaaaaagatatattcctgagattaagagcataaataaacaggtaaggaataaatatgaaaggatagcaataaatgcgccaattcagggaacagctgctgatattataaaacttgccatgatagaaatttacaaggagattgaaaataaaaatctcaagtcaagaatactccttcaaattcatgatgagcttattcttgaagtgccagaggaggagatggaatttactcctttaatggcaaaggaaaaaatggaaaaggtggtagaactttcggttcctcttgtagttgaaatctcggtaggtaaaaatcttgctgaattaaaatgagctataagattggtcgac

SEQ ID NO: 2206 - DNA, 2673 bp, Artificial Sequence
  Description of Artificial Sequence: Synthetic DNA sequence of Dictyoglomus thermophilum DNA A794M
atgaaatacctgctgccgaccgctgctgctggtctgctgctcctcgctgcccagccggcgatggccatggatatcggaattaattcggatccgaaatctctgtgggatctttttcaagaaaataccgagaaagagtccaaaaggaagattctgattattgatggctcaagcctcatatacagggtttattacgcccttccccctttaaagacaaaaaatggtgaattaactaatgctctttatggcttcataagaatacttttaaaggccgtagaagattttaatcctgatcttgtaggcgttgcctttgatagacctgaacctacttttaggcatgtgatttataaagagtataaggctaagagaccacctatgaaggatgatttgaaagcgcagataccatggataagagaatttctaaggttaaatgatatacctctattggaagagcctggctatgaagcggatgatataatagctactatagtgaataaatataaggatgatttaaaatatattctctctggagatttagatcttttgcaattagtctcggacaaaacctttctaatacatcctcaaaagggaattactgagtttactatttatgatccaaaagctgtaaaggataggtttggagtagagccctataagattcccttatacaaagtattagtaggggacgaatctgataatattccaggagtaaatggaataggtcctaaaaaggcctcaaagattcttgagaaaatttcaagtgtagatgaatttaaaagtaaaataaaagttttggatagtgatttaagggagcttattgagaaaaattggaatattattgaaagaaatttagaacttgttactttaaaaaatatagataaggatcttattcttaaacccttcgagattaaaagagatgaaaaagtaatagattttttgaagagatatgaacttaagagtattcttcaaaagttatttcctgatcttcaagaggaagaaaatatagagattaaagatgtcgaagagatcaattttaatgaggtagaaaaagaaggctactttgcctttaaatgtcttggagatagggcttttgagggtatttctctttccttcaaggagggggaaggatattttatatctccttttgatttcaataatgagataagaaagaagattgaaaatataatttcttcagagaatgttaaaaaaattggctcttatattcaaagagatttacattttttaaactgtaaaataaagggcgatgtatttgatgttagtctcgcatcttatcttttgaaccctgaaagacaaaatcactctcttgatattttgataggagagtatctaaataaaacctcttttattcctcaaaaatacgctggttatctttttccgttaaagtctattcttgaggagaggataaagaatgaagggttagaatttgtactttataacatagagattccattaatccctgtactttactccatggagaagtgggggataaaggtagataaggaatatttaaaacagctttctgatgaattctgcgagagaattaaaaaattggaagaagagatatatgaacttgcaggaaccagatttaatctcaattctccaaaacaactttctgaagttttatttgagaggttaaaacttccttctggtaagaaaggaaaaacaggatattctacgtcgtcttctgtgcttcaaaacttaataaatgctcatcctatagtgagaaaaatcctccaatatagagaactctataaattgaagagtacttatgtggatgctattcctaatctggttaatccacaaacaggtagagttcatacaaaatttaatcctacaggtacagctacaggaagaataagtagtagtgaacctaatcttcagaatattcctataaaaagtgaagaaggtagaaagataagaagagccttcgtgtcagaagatggatattttcttgtatctcttgattattctcagatagagctaaggattatggctcatctttctcaggagcctaaattaatatctgccttccaaaaaggagaggatattcatagaagaacagcatcggagatttttggagtgccagaggaagaagttgatgatcttttaaggtcaagggcaaaggccgttaattttggaattatttatggtatctcttcttttggactttctgagactgtaagtattacaccagaagaggcagagaaatttatagactcgtattttaagcactatccaagagtgaagctttttatagataagactattcatgaggcaagagaaaaactgtacgttaaaaccttatttggcagaaaaagatatattcctgagattaagagcataaataaacaggtaaggaatatgtatgaaaggatagcaataaatgcgccaattcagggaacagctgctgatattataaaacttgccatgatagaaatttacaaggagattgaaaataaaaatctcaagtcaagaatactccttcaaattcatgatgagcttattcttgaagtgccagaggaggagatggaatttactcctttaatggcaaaggaaaaaatggaaaaggtggtagaactttcggttcctcttgtagttgaaatctcggtaggtaaaaatcttgctgaattaaaatgagctataagattggtcgac

SEQ ID NO: 2207 - DNA, 2673 bp, Artificial Sequence
  Description of Artificial Sequence: Synthetic DNA sequence of Dictyoglomus thermophilum DNA A794F
atgaaatacctgctgccgaccgctgctgctggtctgctgctcctcgctgcccagccggcgatggccatggatatcggaattaattcggatccgaaatctctgtgggatctttttcaagaaaataccgagaaagagtccaaaaggaagattctgattattgatggctcaagcctcatatacagggtttattacgcccttccccctttaaagacaaaaaatggtgaattaactaatgctctttatggcttcataagaatacttttaaaggccgtagaagattttaatcctgatcttgtaggcgttgcctttgatagacctgaacctacttttaggcatgtgatttataaagagtataaggctaagagaccacctatgaaggatgatttgaaagcgcagataccatggataagagaatttctaaggttaaatgatatacctctattggaagagcctggctatgaagcggatgatataatagctactatagtgaataaatataaggatgatttaaaatatattctctctggagatttagatcttttgcaattagtctcggacaaaacctttctaatacatcctcaaaagggaattactgagtttactatttatgatccaaaagctgtaaaggataggtttggagtagagccctataagattcccttatacaaagtattagtaggggacgaatctgataatattccaggagtaaatggaataggtcctaaaaaggcctcaaagattcttgagaaaatttcaagtgtagatgaatttaaaagtaaaataaaagttttggatagtgatttaagggagcttattgagaaaaattggaatattattgaaagaaatttagaacttgttactttaaaaaatatagataaggatcttattcttaaacccttcgagattaaaagagatgaaaaagtaatagattttttgaagagatatgaacttaagagtattcttcaaaagttatttcctgatcttcaagaggaagaaaatatagagattaaagatgtcgaagagatcaattttaatgaggtagaaaaagaaggctactttgcctttaaatgtcttggagatagggcttttgagggtatttctctttccttcaaggagggggaaggatattttatatctccttttgatttcaataatgagataagaaagaagattgaaaatataatttcttcagagaatgttaaaaaaattggctcttatattcaaagagatttacattttttaaactgtaaaataaagggcgatgtatttgatgttagtctcgcatcttatcttttgaaccctgaaagacaaaatcactctcttgatattttgataggagagtatctaaataaaacctcttttattcctcaaaaatacgctggttatctttttccgttaaagtctattcttgaggagaggataaagaatgaagggttagaatttgtactttataacatagagattccattaatccctgtactttactccatggagaagtgggggataaaggtagataaggaatatttaaaacagctttctgatgaattctgcgagagaattaaaaaattggaagaagagatatatgaacttgcaggaaccagatttaatctcaattctccaaaacaactttctgaagttttatttgagaggttaaaacttccttctggtaagaaaggaaaaacaggatattctacgtcgtcttctgtgcttcaaaacttaataaatgctcatcctatagtgagaaaaatcctccaatatagagaactctataaattgaagagtacttatgtggatgctattcctaatctggttaatccacaaacaggtagagttcatacaaaatttaatcctacaggtacagctacaggaagaataagtagtagtgaacctaatcttcagaatattcctataaaaagtgaagaaggtagaaagataagaagagccttcgtgtcagaagatggatattttcttgtatctcttgattattctcagatagagctaaggattatggctcatctttctcaggagcctaaattaatatctgccttccaaaaaggagaggatattcatagaagaacagcatcggagatttttggagtgccagaggaagaagttgatgatcttttaaggtcaagggcaaaggccgttaattttggaattatttatggtatctcttcttttggactttctgagactgtaagtattacaccagaagaggcagagaaatttatagactcgtattttaagcactatccaagagtgaagctttttatagataagactattcatgaggcaagagaaaaactgtacgttaaaaccttatttggcagaaaaagatatattcctgagattaagagcataaataaacaggtaaggaatttttatgaaaggatagcaataaatgcgccaattcagggaacagctgctgatattataaaacttgccatgatagaaatttacaaggagattgaaaataaaaatctcaagtcaagaatactccttcaaattcatgatgagcttattcttgaagtgccagaggaggagatggaatttactcctttaatggcaaaggaaaaaatggaaaaggtggtagaactttcggttcctcttgtagttgaaatctcggtaggtaaaaatcttgctgaattaaaatgagctataagattggtcgac

SEQ ID NO: 2208 - DNA, 2673 bp, Artificial Sequence
  Description of Artificial Sequence: Synthetic DNA sequence of Dictyoglomus thermophilum DNA A794P
atgaaatacctgctgccgaccgctgctgctggtctgctgctcctcgctgcccagccggcgatggccatggatatcggaattaattcggatccgaaatctctgtgggatctttttcaagaaaataccgagaaagagtccaaaaggaagattctgattattgatggctcaagcctcatatacagggtttattacgcccttccccctttaaagacaaaaaatggtgaattaactaatgctctttatggcttcataagaatacttttaaaggccgtagaagattttaatcctgatcttgtaggcgttgcctttgatagacctgaacctacttttaggcatgtgatttataaagagtataaggctaagagaccacctatgaaggatgatttgaaagcgcagataccatggataagagaatttctaaggttaaatgatatacctctattggaagagcctggctatgaagcggatgatataatagctactatagtgaataaatataaggatgatttaaaatatattctctctggagatttagatcttttgcaattagtctcggacaaaacctttctaatacatcctcaaaagggaattactgagtttactatttatgatccaaaagctgtaaaggataggtttggagtagagccctataagattcccttatacaaagtattagtaggggacgaatctgataatattccaggagtaaatggaataggtcctaaaaaggcctcaaagattcttgagaaaatttcaagtgtagatgaatttaaaagtaaaataaaagttttggatagtgatttaagggagcttattgagaaaaattggaatattattgaaagaaatttagaacttgttactttaaaaaatatagataaggatcttattcttaaacccttcgagattaaaagagatgaaaaagtaatagattttttgaagagatatgaacttaagagtattcttcaaaagttatttcctgatcttcaagaggaagaaaatatagagattaaagatgtcgaagagatcaattttaatgaggtagaaaaagaaggctactttgcctttaaatgtcttggagatagggcttttgagggtatttctctttccttcaaggagggggaaggatattttatatctccttttgatttcaataatgagataagaaagaagattgaaaatataatttcttcagagaatgttaaaaaaattggctcttatattcaaagagatttacattttttaaactgtaaaataaagggcgatgtatttgatgttagtctcgcatcttatcttttgaaccctgaaagacaaaatcactctcttgatattttgataggagagtatctaaataaaacctcttttattcctcaaaaatacgctggttatctttttccgttaaagtctattcttgaggagaggataaagaatgaagggttagaatttgtactttataacatagagattccattaatccctgtactttactccatggagaagtgggggataaaggtagataaggaatatttaaaacagctttctgatgaattctgcgagagaattaaaaaattggaagaagagatatatgaacttgcaggaaccagatttaatctcaattctccaaaacaactttctgaagttttatttgagaggttaaaacttccttctggtaagaaaggaaaaacaggatattctacgtcgtcttctgtgcttcaaaacttaataaatgctcatcctatagtgagaaaaatcctccaatatagagaactctataaattgaagagtacttatgtggatgctattcctaatctggttaatccacaaacaggtagagttcatacaaaatttaatcctacaggtacagctacaggaagaataagtagtagtgaacctaatcttcagaatattcctataaaaagtgaagaaggtagaaagataagaagagccttcgtgtcagaagatggatattttcttgtatctcttgattattctcagatagagctaaggattatggctcatctttctcaggagcctaaattaatatctgccttccaaaaaggagaggatattcatagaagaacagcatcggagatttttggagtgccagaggaagaagttgatgatcttttaaggtcaagggcaaaggccgttaattttggaattatttatggtatctcttcttttggactttctgagactgtaagtattacaccagaagaggcagagaaatttatagactcgtattttaagcactatccaagagtgaagctttttatagataagactattcatgaggcaagagaaaaactgtacgttaaaaccttatttggcagaaaaagatatattcctgagattaagagcataaataaacaggtaaggaatccttatgaaaggatagcaataaatgcgccaattcagggaacagctgctgatattataaaacttgccatgatagaaatttacaaggagattgaaaataaaaatctcaagtcaagaatactccttcaaattcatgatgagcttattcttgaagtgccagaggaggagatggaatttactcctttaatggcaaaggaaaaaatggaaaaggtggtagaactttcggttcctcttgtagttgaaatctcggtaggtaaaaatcttgctgaattaaaatgagctataagattggtcgac

SEQ ID NO: 2209 - DNA, 2673 bp, Artificial Sequence
  Description of Artificial Sequence: Synthetic DNA sequence of Dictyoglomus thermophilum DNA A794S
atgaaatacctgctgccgaccgctgctgctggtctgctgctcctcgctgcccagccggcgatggccatggatatcggaattaattcggatccgaaatctctgtgggatctttttcaagaaaataccgagaaagagtccaaaaggaagattctgattattgatggctcaagcctcatatacagggtttattacgcccttccccctttaaagacaaaaaatggtgaattaactaatgctctttatggcttcataagaatacttttaaaggccgtagaagattttaatcctgatcttgtaggcgttgcctttgatagacctgaacctacttttaggcatgtgatttataaagagtataaggctaagagaccacctatgaaggatgatttgaaagcgcagataccatggataagagaatttctaaggttaaatgatatacctctattggaagagcctggctatgaagcggatgatataatagctactatagtgaataaatataaggatgatttaaaatatattctctctggagatttagatcttttgcaattagtctcggacaaaacctttctaatacatcctcaaaagggaattactgagtttactatttatgatccaaaagctgtaaaggataggtttggagtagagccctataagattcccttatacaaagtattagtaggggacgaatctgataatattccaggagtaaatggaataggtcctaaaaaggcctcaaagattcttgagaaaatttcaagtgtagatgaatttaaaagtaaaataaaagttttggatagtgatttaagggagcttattgagaaaaattggaatattattgaaagaaatttagaacttgttactttaaaaaatatagataaggatcttattcttaaacccttcgagattaaaagagatgaaaaagtaatagattttttgaagagatatgaacttaagagtattcttcaaaagttatttcctgatcttcaagaggaagaaaatatagagattaaagatgtcgaagagatcaattttaatgaggtagaaaaagaaggctactttgcctttaaatgtcttggagatagggcttttgagggtatttctctttccttcaaggagggggaaggatattttatatctccttttgatttcaataatgagataagaaagaagattgaaaatataatttcttcagagaatgttaaaaaaattggctcttatattcaaagagatttacattttttaaactgtaaaataaagggcgatgtatttgatgttagtctcgcatcttatcttttgaaccctgaaagacaaaatcactctcttgatattttgataggagagtatctaaataaaacctcttttattcctcaaaaatacgctggttatctttttccgttaaagtctattcttgaggagaggataaagaatgaagggttagaatttgtactttataacatagagattccattaatccctgtactttactccatggagaagtgggggataaaggtagataaggaatatttaaaacagctttctgatgaattctgcgagagaattaaaaaattggaagaagagatatatgaacttgcaggaaccagatttaatctcaattctccaaaacaactttctgaagttttatttgagaggttaaaacttccttctggtaagaaaggaaaaacaggatattctacgtcgtcttctgtgcttcaaaacttaataaatgctcatcctatagtgagaaaaatcctccaatatagagaactctataaattgaagagtacttatgtggatgctattcctaatctggttaatccacaaacaggtagagttcatacaaaatttaatcctacaggtacagctacaggaagaataagtagtagtgaacctaatcttcagaatattcctataaaaagtgaagaaggtagaaagataagaagagccttcgtgtcagaagatggatattttcttgtatctcttgattattctcagatagagctaaggattatggctcatctttctcaggagcctaaattaatatctgccttccaaaaaggagaggatattcatagaagaacagcatcggagatttttggagtgccagaggaagaagttgatgatcttttaaggtcaagggcaaaggccgttaattttggaattatttatggtatctcttcttttggactttctgagactgtaagtattacaccagaagaggcagagaaatttatagactcgtattttaagcactatccaagagtgaagctttttatagataagactattcatgaggcaagagaaaaactgtacgttaaaaccttatttggcagaaaaagatatattcctgagattaagagcataaataaacaggtaaggaattcttatgaaaggatagcaataaatgcgccaattcagggaacagctgctgatattataaaacttgccatgatagaaatttacaaggagattgaaaataaaaatctcaagtcaagaatactccttcaaattcatgatgagcttattcttgaagtgccagaggaggagatggaatttactcctttaatggcaaaggaaaaaatggaaaaggtggtagaactttcggttcctcttgtagttgaaatctcggtaggtaaaaatcttgctgaattaaaatgagctataagattggtcgac

SEQ ID NO: 2210 - DNA, 2673 bp, Artificial Sequence
  Description of Artificial Sequence: Synthetic DNA sequence of Dictyoglomus thermophilum DNA A794T
atgaaatacctgctgccgaccgctgctgctggtctgctgctcctcgctgcccagccggcgatggccatggatatcggaattaattcggatccgaaatctctgtgggatctttttcaagaaaataccgagaaagagtccaaaaggaagattctgattattgatggctcaagcctcatatacagggtttattacgcccttccccctttaaagacaaaaaatggtgaattaactaatgctctttatggcttcataagaatacttttaaaggccgtagaagattttaatcctgatcttgtaggcgttgcctttgatagacctgaacctacttttaggcatgtgatttataaagagtataaggctaagagaccacctatgaaggatgatttgaaagcgcagataccatggataagagaatttctaaggttaaatgatatacctctattggaagagcctggctatgaagcggatgatataatagctactatagtgaataaatataaggatgatttaaaatatattctctctggagatttagatcttttgcaattagtctcggacaaaacctttctaatacatcctcaaaagggaattactgagtttactatttatgatccaaaagctgtaaaggataggtttggagtagagccctataagattcccttatacaaagtattagtaggggacgaatctgataatattccaggagtaaatggaataggtcctaaaaaggcctcaaagattcttgagaaaatttcaagtgtagatgaatttaaaagtaaaataaaagttttggatagtgatttaagggagcttattgagaaaaattggaatattattgaaagaaatttagaacttgttactttaaaaaatatagataaggatcttattcttaaacccttcgagattaaaagagatgaaaaagtaatagattttttgaagagatatgaacttaagagtattcttcaaaagttatttcctgatcttcaagaggaagaaaatatagagattaaagatgtcgaagagatcaattttaatgaggtagaaaaagaaggctactttgcctttaaatgtcttggagatagggcttttgagggtatttctctttccttcaaggagggggaaggatattttatatctccttttgatttcaataatgagataagaaagaagattgaaaatataatttcttcagagaatgttaaaaaaattggctcttatattcaaagagatttacattttttaaactgtaaaataaagggcgatgtatttgatgttagtctcgcatcttatcttttgaaccctgaaagacaaaatcactctcttgatattttgataggagagtatctaaataaaacctcttttattcctcaaaaatacgctggttatctttttccgttaaagtctattcttgaggagaggataaagaatgaagggttagaatttgtactttataacatagagattccattaatccctgtactttactccatggagaagtgggggataaaggtagataaggaatatttaaaacagctttctgatgaattctgcgagagaattaaaaaattggaagaagagatatatgaacttgcaggaaccagatttaatctcaattctccaaaacaactttctgaagttttatttgagaggttaaaacttccttctggtaagaaaggaaaaacaggatattctacgtcgtcttctgtgcttcaaaacttaataaatgctcatcctatagtgagaaaaatcctccaatatagagaactctataaattgaagagtacttatgtggatgctattcctaatctggttaatccacaaacaggtagagttcatacaaaatttaatcctacaggtacagctacaggaagaataagtagtagtgaacctaatcttcagaatattcctataaaaagtgaagaaggtagaaagataagaagagccttcgtgtcagaagatggatattttcttgtatctcttgattattctcagatagagctaaggattatggctcatctttctcaggagcctaaattaatatctgccttccaaaaaggagaggatattcatagaagaacagcatcggagatttttggagtgccagaggaagaagttgatgatcttttaaggtcaagggcaaaggccgttaattttggaattatttatggtatctcttcttttggactttctgagactgtaagtattacaccagaagaggcagagaaatttatagactcgtattttaagcactatccaagagtgaagctttttatagataagactattcatgaggcaagagaaaaactgtacgttaaaaccttatttggcagaaaaagatatattcctgagattaagagcataaataaacaggtaaggaatacttatgaaaggatagcaataaatgcgccaattcagggaacagctgctgatattataaaacttgccatgatagaaatttacaaggagattgaaaataaaaatctcaagtcaagaatactccttcaaattcatgatgagcttattcttgaagtgccagaggaggagatggaatttactcctttaatggcaaaggaaaaaatggaaaaggtggtagaactttcggttcctcttgtagttgaaatctcggtaggtaaaaatcttgctgaattaaaatgagctataagattggtcgac

SEQ ID NO: 2211 - DNA, 2673 bp, Artificial Sequence
  Description of Artificial Sequence: Synthetic DNA sequence of Dictyoglomus thermophilum DNA A794W
atgaaatacctgctgccgaccgctgctgctggtctgctgctcctcgctgcccagccggcgatggccatggatatcggaattaattcggatccgaaatctctgtgggatctttttcaagaaaataccgagaaagagtccaaaaggaagattctgattattgatggctcaagcctcatatacagggtttattacgcccttccccctttaaagacaaaaaatggtgaattaactaatgctctttatggcttcataagaatacttttaaaggccgtagaagattttaatcctgatcttgtaggcgttgcctttgatagacctgaacctacttttaggcatgtgatttataaagagtataaggctaagagaccacctatgaaggatgatttgaaagcgcagataccatggataagagaatttctaaggttaaatgatatacctctattggaagagcctggctatgaagcggatgatataatagctactatagtgaataaatataaggatgatttaaaatatattctctctggagatttagatcttttgcaattagtctcggacaaaacctttctaatacatcctcaaaagggaattactgagtttactatttatgatccaaaagctgtaaaggataggtttggagtagagccctataagattcccttatacaaagtattagtaggggacgaatctgataatattccaggagtaaatggaataggtcctaaaaaggcctcaaagattcttgagaaaatttcaagtgtagatgaatttaaaagtaaaataaaagttttggatagtgatttaagggagcttattgagaaaaattggaatattattgaaagaaatttagaacttgttactttaaaaaatatagataaggatcttattcttaaacccttcgagattaaaagagatgaaaaagtaatagattttttgaagagatatgaacttaagagtattcttcaaaagttatttcctgatcttcaagaggaagaaaatatagagattaaagatgtcgaagagatcaattttaatgaggtagaaaaagaaggctactttgcctttaaatgtcttggagatagggcttttgagggtatttctctttccttcaaggagggggaaggatattttatatctccttttgatttcaataatgagataagaaagaagattgaaaatataatttcttcagagaatgttaaaaaaattggctcttatattcaaagagatttacattttttaaactgtaaaataaagggcgatgtatttgatgttagtctcgcatcttatcttttgaaccctgaaagacaaaatcactctcttgatattttgataggagagtatctaaataaaacctcttttattcctcaaaaatacgctggttatctttttccgttaaagtctattcttgaggagaggataaagaatgaagggttagaatttgtactttataacatagagattccattaatccctgtactttactccatggagaagtgggggataaaggtagataaggaatatttaaaacagctttctgatgaattctgcgagagaattaaaaaattggaagaagagatatatgaacttgcaggaaccagatttaatctcaattctccaaaacaactttctgaagttttatttgagaggttaaaacttccttctggtaagaaaggaaaaacaggatattctacgtcgtcttctgtgcttcaaaacttaataaatgctcatcctatagtgagaaaaatcctccaatatagagaactctataaattgaagagtacttatgtggatgctattcctaatctggttaatccacaaacaggtagagttcatacaaaatttaatcctacaggtacagctacaggaagaataagtagtagtgaacctaatcttcagaatattcctataaaaagtgaagaaggtagaaagataagaagagccttcgtgtcagaagatggatattttcttgtatctcttgattattctcagatagagctaaggattatggctcatctttctcaggagcctaaattaatatctgccttccaaaaaggagaggatattcatagaagaacagcatcggagatttttggagtgccagaggaagaagttgatgatcttttaaggtcaagggcaaaggccgttaattttggaattatttatggtatctcttcttttggactttctgagactgtaagtattacaccagaagaggcagagaaatttatagactcgtattttaagcactatccaagagtgaagctttttatagataagactattcatgaggcaagagaaaaactgtacgttaaaaccttatttggcagaaaaagatatattcctgagattaagagcataaataaacaggtaaggaattggtatgaaaggatagcaataaatgcgccaattcagggaacagctgctgatattataaaacttgccatgatagaaatttacaaggagattgaaaataaaaatctcaagtcaagaatactccttcaaattcatgatgagcttattcttgaagtgccagaggaggagatggaatttactcctttaatggcaaaggaaaaaatggaaaaggtggtagaactttcggttcctcttgtagttgaaatctcggtaggtaaaaatcttgctgaattaaaatgagctataagattggtcgac

SEQ ID NO: 2212 - DNA, 2673 bp, Artificial Sequence
  Description of Artificial Sequence: Synthetic DNA sequence of Dictyoglomus thermophilum DNA A794Y
atgaaatacctgctgccgaccgctgctgctggtctgctgctcctcgctgcccagccggcgatggccatggatatcggaattaattcggatccgaaatctctgtgggatctttttcaagaaaataccgagaaagagtccaaaaggaagattctgattattgatggctcaagcctcatatacagggtttattacgcccttccccctttaaagacaaaaaatggtgaattaactaatgctctttatggcttcataagaatacttttaaaggccgtagaagattttaatcctgatcttgtaggcgttgcctttgatagacctgaacctacttttaggcatgtgatttataaagagtataaggctaagagaccacctatgaaggatgatttgaaagcgcagataccatggataagagaatttctaaggttaaatgatatacctctattggaagagcctggctatgaagcggatgatataatagctactatagtgaataaatataaggatgatttaaaatatattctctctggagatttagatcttttgcaattagtctcggacaaaacctttctaatacatcctcaaaagggaattactgagtttactatttatgatccaaaagctgtaaaggataggtttggagtagagccctataagattcccttatacaaagtattagtaggggacgaatctgataatattccaggagtaaatggaataggtcctaaaaaggcctcaaagattcttgagaaaatttcaagtgtagatgaatttaaaagtaaaataaaagttttggatagtgatttaagggagcttattgagaaaaattggaatattattgaaagaaatttagaacttgttactttaaaaaatatagataaggatcttattcttaaacccttcgagattaaaagagatgaaaaagtaatagattttttgaagagatatgaacttaagagtattcttcaaaagttatttcctgatcttcaagaggaagaaaatatagagattaaagatgtcgaagagatcaattttaatgaggtagaaaaagaaggctactttgcctttaaatgtcttggagatagggcttttgagggtatttctctttccttcaaggagggggaaggatattttatatctccttttgatttcaataatgagataagaaagaagattgaaaatataatttcttcagagaatgttaaaaaaattggctcttatattcaaagagatttacattttttaaactgtaaaataaagggcgatgtatttgatgttagtctcgcatcttatcttttgaaccctgaaagacaaaatcactctcttgatattttgataggagagtatctaaataaaacctcttttattcctcaaaaatacgctggttatctttttccgttaaagtctattcttgaggagaggataaagaatgaagggttagaatttgtactttataacatagagattccattaatccctgtactttactccatggagaagtgggggataaaggtagataaggaatatttaaaacagctttctgatgaattctgcgagagaattaaaaaattggaagaagagatatatgaacttgcaggaaccagatttaatctcaattctccaaaacaactttctgaagttttatttgagaggttaaaacttccttctggtaagaaaggaaaaacaggatattctacgtcgtcttctgtgcttcaaaacttaataaatgctcatcctatagtgagaaaaatcctccaatatagagaactctataaattgaagagtacttatgtggatgctattcctaatctggttaatccacaaacaggtagagttcatacaaaatttaatcctacaggtacagctacaggaagaataagtagtagtgaacctaatcttcagaatattcctataaaaagtgaagaaggtagaaagataagaagagccttcgtgtcagaagatggatattttcttgtatctcttgattattctcagatagagctaaggattatggctcatctttctcaggagcctaaattaatatctgccttccaaaaaggagaggatattcatagaagaacagcatcggagatttttggagtgccagaggaagaagttgatgatcttttaaggtcaagggcaaaggccgttaattttggaattatttatggtatctcttcttttggactttctgagactgtaagtattacaccagaagaggcagagaaatttatagactcgtattttaagcactatccaagagtgaagctttttatagataagactattcatgaggcaagagaaaaactgtacgttaaaaccttatttggcagaaaaagatatattcctgagattaagagcataaataaacaggtaaggaattattatgaaaggatagcaataaatgcgccaattcagggaacagctgctgatattataaaacttgccatgatagaaatttacaaggagattgaaaataaaaatctcaagtcaagaatactccttcaaattcatgatgagcttattcttgaagtgccagaggaggagatggaatttactcctttaatggcaaaggaaaaaatggaaaaggtggtagaactttcggttcctcttgtagttgaaatctcggtaggtaaaaatcttgctgaattaaaatgagctataagattggtcgac

SEQ ID NO: 2213 - DNA, 2673 bp, Artificial Sequence
  Description of Artificial Sequence: Synthetic DNA sequence of Dictyoglomus thermophilum DNA A794V
atgaaatacctgctgccgaccgctgctgctggtctgctgctcctcgctgcccagccggcgatggccatggatatcggaattaattcggatccgaaatctctgtgggatctttttcaagaaaataccgagaaagagtccaaaaggaagattctgattattgatggctcaagcctcatatacagggtttattacgcccttccccctttaaagacaaaaaatggtgaattaactaatgctctttatggcttcataagaatacttttaaaggccgtagaagattttaatcctgatcttgtaggcgttgcctttgatagacctgaacctacttttaggcatgtgatttataaagagtataaggctaagagaccacctatgaaggatgatttgaaagcgcagataccatggataagagaatttctaaggttaaatgatatacctctattggaagagcctggctatgaagcggatgatataatagctactatagtgaataaatataaggatgatttaaaatatattctctctggagatttagatcttttgcaattagtctcggacaaaacctttctaatacatcctcaaaagggaattactgagtttactatttatgatccaaaagctgtaaaggataggtttggagtagagccctataagattcccttatacaaagtattagtaggggacgaatctgataatattccaggagtaaatggaataggtcctaaaaaggcctcaaagattcttgagaaaatttcaagtgtagatgaatttaaaagtaaaataaaagttttggatagtgatttaagggagcttattgagaaaaattggaatattattgaaagaaatttagaacttgttactttaaaaaatatagataaggatcttattcttaaacccttcgagattaaaagagatgaaaaagtaatagattttttgaagagatatgaacttaagagtattcttcaaaagttatttcctgatcttcaagaggaagaaaatatagagattaaagatgtcgaagagatcaattttaatgaggtagaaaaagaaggctactttgcctttaaatgtcttggagatagggcttttgagggtatttctctttccttcaaggagggggaaggatattttatatctccttttgatttcaataatgagataagaaagaagattgaaaatataatttcttcagagaatgttaaaaaaattggctcttatattcaaagagatttacattttttaaactgtaaaataaagggcgatgtatttgatgttagtctcgcatcttatcttttgaaccctgaaagacaaaatcactctcttgatattttgataggagagtatctaaataaaacctcttttattcctcaaaaatacgctggttatctttttccgttaaagtctattcttgaggagaggataaagaatgaagggttagaatttgtactttataacatagagattccattaatccctgtactttactccatggagaagtgggggataaaggtagataaggaatatttaaaacagctttctgatgaattctgcgagagaattaaaaaattggaagaagagatatatgaacttgcaggaaccagatttaatctcaattctccaaaacaactttctgaagttttatttgagaggttaaaacttccttctggtaagaaaggaaaaacaggatattctacgtcgtcttctgtgcttcaaaacttaataaatgctcatcctatagtgagaaaaatcctccaatatagagaactctataaattgaagagtacttatgtggatgctattcctaatctggttaatccacaaacaggtagagttcatacaaaatttaatcctacaggtacagctacaggaagaataagtagtagtgaacctaatcttcagaatattcctataaaaagtgaagaaggtagaaagataagaagagccttcgtgtcagaagatggatattttcttgtatctcttgattattctcagatagagctaaggattatggctcatctttctcaggagcctaaattaatatctgccttccaaaaaggagaggatattcatagaagaacagcatcggagatttttggagtgccagaggaagaagttgatgatcttttaaggtcaagggcaaaggccgttaattttggaattatttatggtatctcttcttttggactttctgagactgtaagtattacaccagaagaggcagagaaatttatagactcgtattttaagcactatccaagagtgaagctttttatagataagactattcatgaggcaagagaaaaactgtacgttaaaaccttatttggcagaaaaagatatattcctgagattaagagcataaataaacaggtaaggaatgtttatgaaaggatagcaataaatgcgccaattcagggaacagctgctgatattataaaacttgccatgatagaaatttacaaggagattgaaaataaaaatctcaagtcaagaatactccttcaaattcatgatgagcttattcttgaagtgccagaggaggagatggaatttactcctttaatggcaaaggaaaaaatggaaaaggtggtagaactttcggttcctcttgtagttgaaatctcggtaggtaaaaatcttgctgaattaaaatgagctataagattggtcgac

SEQ ID NO: 2214 - DNA, 2673 bp, Artificial Sequence
  Description of Artificial Sequence: Synthetic DNA sequence of Dictyoglomus thermophilum DNA Y795A
atgaaatacctgctgccgaccgctgctgctggtctgctgctcctcgctgcccagccggcgatggccatggatatcggaattaattcggatccgaaatctctgtgggatctttttcaagaaaataccgagaaagagtccaaaaggaagattctgattattgatggctcaagcctcatatacagggtttattacgcccttccccctttaaagacaaaaaatggtgaattaactaatgctctttatggcttcataagaatacttttaaaggccgtagaagattttaatcctgatcttgtaggcgttgcctttgatagacctgaacctacttttaggcatgtgatttataaagagtataaggctaagagaccacctatgaaggatgatttgaaagcgcagataccatggataagagaatttctaaggttaaatgatatacctctattggaagagcctggctatgaagcggatgatataatagctactatagtgaataaatataaggatgatttaaaatatattctctctggagatttagatcttttgcaattagtctcggacaaaacctttctaatacatcctcaaaagggaattactgagtttactatttatgatccaaaagctgtaaaggataggtttggagtagagccctataagattcccttatacaaagtattagtaggggacgaatctgataatattccaggagtaaatggaataggtcctaaaaaggcctcaaagattcttgagaaaatttcaagtgtagatgaatttaaaagtaaaataaaagttttggatagtgatttaagggagcttattgagaaaaattggaatattattgaaagaaatttagaacttgttactttaaaaaatatagataaggatcttattcttaaacccttcgagattaaaagagatgaaaaagtaatagattttttgaagagatatgaacttaagagtattcttcaaaagttatttcctgatcttcaagaggaagaaaatatagagattaaagatgtcgaagagatcaattttaatgaggtagaaaaagaaggctactttgcctttaaatgtcttggagatagggcttttgagggtatttctctttccttcaaggagggggaaggatattttatatctccttttgatttcaataatgagataagaaagaagattgaaaatataatttcttcagagaatgttaaaaaaattggctcttatattcaaagagatttacattttttaaactgtaaaataaagggcgatgtatttgatgttagtctcgcatcttatcttttgaaccctgaaagacaaaatcactctcttgatattttgataggagagtatctaaataaaacctcttttattcctcaaaaatacgctggttatctttttccgttaaagtctattcttgaggagaggataaagaatgaagggttagaatttgtactttataacatagagattccattaatccctgtactttactccatggagaagtgggggataaaggtagataaggaatatttaaaacagctttctgatgaattctgcgagagaattaaaaaattggaagaagagatatatgaacttgcaggaaccagatttaatctcaattctccaaaacaactttctgaagttttatttgagaggttaaaacttccttctggtaagaaaggaaaaacaggatattctacgtcgtcttctgtgcttcaaaacttaataaatgctcatcctatagtgagaaaaatcctccaatatagagaactctataaattgaagagtacttatgtggatgctattcctaatctggttaatccacaaacaggtagagttcatacaaaatttaatcctacaggtacagctacaggaagaataagtagtagtgaacctaatcttcagaatattcctataaaaagtgaagaaggtagaaagataagaagagccttcgtgtcagaagatggatattttcttgtatctcttgattattctcagatagagctaaggattatggctcatctttctcaggagcctaaattaatatctgccttccaaaaaggagaggatattcatagaagaacagcatcggagatttttggagtgccagaggaagaagttgatgatcttttaaggtcaagggcaaaggccgttaattttggaattatttatggtatctcttcttttggactttctgagactgtaagtattacaccagaagaggcagagaaatttatagactcgtattttaagcactatccaagagtgaagctttttatagataagactattcatgaggcaagagaaaaactgtacgttaaaaccttatttggcagaaaaagatatattcctgagattaagagcataaataaacaggtaaggaatgccgctgaaaggatagcaataaatgcgccaattcagggaacagctgctgatattataaaacttgccatgatagaaatttacaaggagattgaaaataaaaatctcaagtcaagaatactccttcaaattcatgatgagcttattcttgaagtgccagaggaggagatggaatttactcctttaatggcaaaggaaaaaatggaaaaggtggtagaactttcggttcctcttgtagttgaaatctcggtaggtaaaaatcttgctgaattaaaatgagctataagattggtcgac

SEQ ID NO: 2215 - DNA, 2673 bp, Artificial Sequence
  Description of Artificial Sequence: Synthetic DNA sequence of Dictyoglomus thermophilum DNA Y795R
atgaaatacctgctgccgaccgctgctgctggtctgctgctcctcgctgcccagccggcgatggccatggatatcggaattaattcggatccgaaatctctgtgggatctttttcaagaaaataccgagaaagagtccaaaaggaagattctgattattgatggctcaagcctcatatacagggtttattacgcccttccccctttaaagacaaaaaatggtgaattaactaatgctctttatggcttcataagaatacttttaaaggccgtagaagattttaatcctgatcttgtaggcgttgcctttgatagacctgaacctacttttaggcatgtgatttataaagagtataaggctaagagaccacctatgaaggatgatttgaaagcgcagataccatggataagagaatttctaaggttaaatgatatacctctattggaagagcctggctatgaagcggatgatataatagctactatagtgaataaatataaggatgatttaaaatatattctctctggagatttagatcttttgcaattagtctcggacaaaacctttctaatacatcctcaaaagggaattactgagtttactatttatgatccaaaagctgtaaaggataggtttggagtagagccctataagattcccttatacaaagtattagtaggggacgaatctgataatattccaggagtaaatggaataggtcctaaaaaggcctcaaagattcttgagaaaatttcaagtgtagatgaatttaaaagtaaaataaaagttttggatagtgatttaagggagcttattgagaaaaattggaatattattgaaagaaatttagaacttgttactttaaaaaatatagataaggatcttattcttaaacccttcgagattaaaagagatgaaaaagtaatagattttttgaagagatatgaacttaagagtattcttcaaaagttatttcctgatcttcaagaggaagaaaatatagagattaaagatgtcgaagagatcaattttaatgaggtagaaaaagaaggctactttgcctttaaatgtcttggagatagggcttttgagggtatttctctttccttcaaggagggggaaggatattttatatctccttttgatttcaataatgagataagaaagaagattgaaaatataatttcttcagagaatgttaaaaaaattggctcttatattcaaagagatttacattttttaaactgtaaaataaagggcgatgtatttgatgttagtctcgcatcttatcttttgaaccctgaaagacaaaatcactctcttgatattttgataggagagtatctaaataaaacctcttttattcctcaaaaatacgctggttatctttttccgttaaagtctattcttgaggagaggataaagaatgaagggttagaatttgtactttataacatagagattccattaatccctgtactttactccatggagaagtgggggataaaggtagataaggaatatttaaaacagctttctgatgaattctgcgagagaattaaaaaattggaagaagagatatatgaacttgcaggaaccagatttaatctcaattctccaaaacaactttctgaagttttatttgagaggttaaaacttccttctggtaagaaaggaaaaacaggatattctacgtcgtcttctgtgcttcaaaacttaataaatgctcatcctatagtgagaaaaatcctccaatatagagaactctataaattgaagagtacttatgtggatgctattcctaatctggttaatccacaaacaggtagagttcatacaaaatttaatcctacaggtacagctacaggaagaataagtagtagtgaacctaatcttcagaatattcctataaaaagtgaagaaggtagaaagataagaagagccttcgtgtcagaagatggatattttcttgtatctcttgattattctcagatagagctaaggattatggctcatctttctcaggagcctaaattaatatctgccttccaaaaaggagaggatattcatagaagaacagcatcggagatttttggagtgccagaggaagaagttgatgatcttttaaggtcaagggcaaaggccgttaattttggaattatttatggtatctcttcttttggactttctgagactgtaagtattacaccagaagaggcagagaaatttatagactcgtattttaagcactatccaagagtgaagctttttatagataagactattcatgaggcaagagaaaaactgtacgttaaaaccttatttggcagaaaaagatatattcctgagattaagagcataaataaacaggtaaggaatgcccgtgaaaggatagcaataaatgcgccaattcagggaacagctgctgatattataaaacttgccatgatagaaatttacaaggagattgaaaataaaaatctcaagtcaagaatactccttcaaattcatgatgagcttattcttgaagtgccagaggaggagatggaatttactcctttaatggcaaaggaaaaaatggaaaaggtggtagaactttcggttcctcttgtagttgaaatctcggtaggtaaaaatcttgctgaattaaaatgagctataagattggtcgac

SEQ ID NO: 2216 - DNA, 2673 bp, Artificial Sequence
  Description of Artificial Sequence: Synthetic DNA sequence of Dictyoglomus thermophilum DNA Y795N
atgaaatacctgctgccgaccgctgctgctggtctgctgctcctcgctgcccagccggcgatggccatggatatcggaattaattcggatccgaaatctctgtgggatctttttcaagaaaataccgagaaagagtccaaaaggaagattctgattattgatggctcaagcctcatatacagggtttattacgcccttccccctttaaagacaaaaaatggtgaattaactaatgctctttatggcttcataagaatacttttaaaggccgtagaagattttaatcctgatcttgtaggcgttgcctttgatagacctgaacctacttttaggcatgtgatttataaagagtataaggctaagagaccacctatgaaggatgatttgaaagcgcagataccatggataagagaatttctaaggttaaatgatatacctctattggaagagcctggctatgaagcggatgatataatagctactatagtgaataaatataaggatgatttaaaatatattctctctggagatttagatcttttgcaattagtctcggacaaaacctttctaatacatcctcaaaagggaattactgagtttactatttatgatccaaaagctgtaaaggataggtttggagtagagccctataagattcccttatacaaagtattagtaggggacgaatctgataatattccaggagtaaatggaataggtcctaaaaaggcctcaaagattcttgagaaaatttcaagtgtagatgaatttaaaagtaaaataaaagttttggatagtgatttaagggagcttattgagaaaaattggaatattattgaaagaaatttagaacttgttactttaaaaaatatagataaggatcttattcttaaacccttcgagattaaaagagatgaaaaagtaatagattttttgaagagatatgaacttaagagtattcttcaaaagttatttcctgatcttcaagaggaagaaaatatagagattaaagatgtcgaagagatcaattttaatgaggtagaaaaagaaggctactttgcctttaaatgtcttggagatagggcttttgagggtatttctctttccttcaaggagggggaaggatattttatatctccttttgatttcaataatgagataagaaagaagattgaaaatataatttcttcagagaatgttaaaaaaattggctcttatattcaaagagatttacattttttaaactgtaaaataaagggcgatgtatttgatgttagtctcgcatcttatcttttgaaccctgaaagacaaaatcactctcttgatattttgataggagagtatctaaataaaacctcttttattcctcaaaaatacgctggttatctttttccgttaaagtctattcttgaggagaggataaagaatgaagggttagaatttgtactttataacatagagattccattaatccctgtactttactccatggagaagtgggggataaaggtagataaggaatatttaaaacagctttctgatgaattctgcgagagaattaaaaaattggaagaagagatatatgaacttgcaggaaccagatttaatctcaattctccaaaacaactttctgaagttttatttgagaggttaaaacttccttctggtaagaaaggaaaaacaggatattctacgtcgtcttctgtgcttcaaaacttaataaatgctcatcctatagtgagaaaaatcctccaatatagagaactctataaattgaagagtacttatgtggatgctattcctaatctggttaatccacaaacaggtagagttcatacaaaatttaatcctacaggtacagctacaggaagaataagtagtagtgaacctaatcttcagaatattcctataaaaagtgaagaaggtagaaagataagaagagccttcgtgtcagaagatggatattttcttgtatctcttgattattctcagatagagctaaggattatggctcatctttctcaggagcctaaattaatatctgccttccaaaaaggagaggatattcatagaagaacagcatcggagatttttggagtgccagaggaagaagttgatgatcttttaaggtcaagggcaaaggccgttaattttggaattatttatggtatctcttcttttggactttctgagactgtaagtattacaccagaagaggcagagaaatttatagactcgtattttaagcactatccaagagtgaagctttttatagataagactattcatgaggcaagagaaaaactgtacgttaaaaccttatttggcagaaaaagatatattcctgagattaagagcataaataaacaggtaaggaatgccaatgaaaggatagcaataaatgcgccaattcagggaacagctgctgatattataaaacttgccatgatagaaatttacaaggagattgaaaataaaaatctcaagtcaagaatactccttcaaattcatgatgagcttattcttgaagtgccagaggaggagatggaatttactcctttaatggcaaaggaaaaaatggaaaaggtggtagaactttcggttcctcttgtagttgaaatctcggtaggtaaaaatcttgctgaattaaaatgagctataagattggtcgac

SEQ ID NO: 2217 - DNA, 2673 bp, Artificial Sequence
  Description of Artificial Sequence: Synthetic DNA sequence of Dictyoglomus thermophilum DNA Y795D
atgaaatacctgctgccgaccgctgctgctggtctgctgctcctcgctgcccagccggcgatggccatggatatcggaattaattcggatccgaaatctctgtgggatctttttcaagaaaataccgagaaagagtccaaaaggaagattctgattattgatggctcaagcctcatatacagggtttattacgcccttccccctttaaagacaaaaaatggtgaattaactaatgctctttatggcttcataagaatacttttaaaggccgtagaagattttaatcctgatcttgtaggcgttgcctttgatagacctgaacctacttttaggcatgtgatttataaagagtataaggctaagagaccacctatgaaggatgatttgaaagcgcagataccatggataagagaatttctaaggttaaatgatatacctctattggaagagcctggctatgaagcggatgatataatagctactatagtgaataaatataaggatgatttaaaatatattctctctggagatttagatcttttgcaattagtctcggacaaaacctttctaatacatcctcaaaagggaattactgagtttactatttatgatccaaaagctgtaaaggataggtttggagtagagccctataagattcccttatacaaagtattagtaggggacgaatctgataatattccaggagtaaatggaataggtcctaaaaaggcctcaaagattcttgagaaaatttcaagtgtagatgaatttaaaagtaaaataaaagttttggatagtgatttaagggagcttattgagaaaaattggaatattattgaaagaaatttagaacttgttactttaaaaaatatagataaggatcttattcttaaacccttcgagattaaaagagatgaaaaagtaatagattttttgaagagatatgaacttaagagtattcttcaaaagttatttcctgatcttcaagaggaagaaaatatagagattaaagatgtcgaagagatcaattttaatgaggtagaaaaagaaggctactttgcctttaaatgtcttggagatagggcttttgagggtatttctctttccttcaaggagggggaaggatattttatatctccttttgatttcaataatgagataagaaagaagattgaaaatataatttcttcagagaatgttaaaaaaattggctcttatattcaaagagatttacattttttaaactgtaaaataaagggcgatgtatttgatgttagtctcgcatcttatcttttgaaccctgaaagacaaaatcactctcttgatattttgataggagagtatctaaataaaacctcttttattcctcaaaaatacgctggttatctttttccgttaaagtctattcttgaggagaggataaagaatgaagggttagaatttgtactttataacatagagattccattaatccctgtactttactccatggagaagtgggggataaaggtagataaggaatatttaaaacagctttctgatgaattctgcgagagaattaaaaaattggaagaagagatatatgaacttgcaggaaccagatttaatctcaattctccaaaacaactttctgaagttttatttgagaggttaaaacttccttctggtaagaaaggaaaaacaggatattctacgtcgtcttctgtgcttcaaaacttaataaatgctcatcctatagtgagaaaaatcctccaatatagagaactctataaattgaagagtacttatgtggatgctattcctaatctggttaatccacaaacaggtagagttcatacaaaatttaatcctacaggtacagctacaggaagaataagtagtagtgaacctaatcttcagaatattcctataaaaagtgaagaaggtagaaagataagaagagccttcgtgtcagaagatggatattttcttgtatctcttgattattctcagatagagctaaggattatggctcatctttctcaggagcctaaattaatatctgccttccaaaaaggagaggatattcatagaagaacagcatcggagatttttggagtgccagaggaagaagttgatgatcttttaaggtcaagggcaaaggccgttaattttggaattatttatggtatctcttcttttggactttctgagactgtaagtattacaccagaagaggcagagaaatttatagactcgtattttaagcactatccaagagtgaagctttttatagataagactattcatgaggcaagagaaaaactgtacgttaaaaccttatttggcagaaaaagatatattcctgagattaagagcataaataaacaggtaaggaatgccgatgaaaggatagcaataaatgcgccaattcagggaacagctgctgatattataaaacttgccatgatagaaatttacaaggagattgaaaataaaaatctcaagtcaagaatactccttcaaattcatgatgagcttattcttgaagtgccagaggaggagatggaatttactcctttaatggcaaaggaaaaaatggaaaaggtggtagaactttcggttcctcttgtagttgaaatctcggtaggtaaaaatcttgctgaattaaaatgagctataagattggtcgac

SEQ ID NO: 2218 - DNA, 2673 bp, Artificial Sequence
  Description of Artificial Sequence: Synthetic DNA sequence of Dictyoglomus thermophilum DNA Y795C
atgaaatacctgctgccgaccgctgctgctggtctgctgctcctcgctgcccagccggcgatggccatggatatcggaattaattcggatccgaaatctctgtgggatctttttcaagaaaataccgagaaagagtccaaaaggaagattctgattattgatggctcaagcctcatatacagggtttattacgcccttccccctttaaagacaaaaaatggtgaattaactaatgctctttatggcttcataagaatacttttaaaggccgtagaagattttaatcctgatcttgtaggcgttgcctttgatagacctgaacctacttttaggcatgtgatttataaagagtataaggctaagagaccacctatgaaggatgatttgaaagcgcagataccatggataagagaatttctaaggttaaatgatatacctctattggaagagcctggctatgaagcggatgatataatagctactatagtgaataaatataaggatgatttaaaatatattctctctggagatttagatcttttgcaattagtctcggacaaaacctttctaatacatcctcaaaagggaattactgagtttactatttatgatccaaaagctgtaaaggataggtttggagtagagccctataagattcccttatacaaagtattagtaggggacgaatctgataatattccaggagtaaatggaataggtcctaaaaaggcctcaaagattcttgagaaaatttcaagtgtagatgaatttaaaagtaaaataaaagttttggatagtgatttaagggagcttattgagaaaaattggaatattattgaaagaaatttagaacttgttactttaaaaaatatagataaggatcttattcttaaacccttcgagattaaaagagatgaaaaagtaatagattttttgaagagatatgaacttaagagtattcttcaaaagttatttcctgatcttcaagaggaagaaaatatagagattaaagatgtcgaagagatcaattttaatgaggtagaaaaagaaggctactttgcctttaaatgtcttggagatagggcttttgagggtatttctctttccttcaaggagggggaaggatattttatatctccttttgatttcaataatgagataagaaagaagattgaaaatataatttcttcagagaatgttaaaaaaattggctcttatattcaaagagatttacattttttaaactgtaaaataaagggcgatgtatttgatgttagtctcgcatcttatcttttgaaccctgaaagacaaaatcactctcttgatattttgataggagagtatctaaataaaacctcttttattcctcaaaaatacgctggttatctttttccgttaaagtctattcttgaggagaggataaagaatgaagggttagaatttgtactttataacatagagattccattaatccctgtactttactccatggagaagtgggggataaaggtagataaggaatatttaaaacagctttctgatgaattctgcgagagaattaaaaaattggaagaagagatatatgaacttgcaggaaccagatttaatctcaattctccaaaacaactttctgaagttttatttgagaggttaaaacttccttctggtaagaaaggaaaaacaggatattctacgtcgtcttctgtgcttcaaaacttaataaatgctcatcctatagtgagaaaaatcctccaatatagagaactctataaattgaagagtacttatgtggatgctattcctaatctggttaatccacaaacaggtagagttcatacaaaatttaatcctacaggtacagctacaggaagaataagtagtagtgaacctaatcttcagaatattcctataaaaagtgaagaaggtagaaagataagaagagccttcgtgtcagaagatggatattttcttgtatctcttgattattctcagatagagctaaggattatggctcatctttctcaggagcctaaattaatatctgccttccaaaaaggagaggatattcatagaagaacagcatcggagatttttggagtgccagaggaagaagttgatgatcttttaaggtcaagggcaaaggccgttaattttggaattatttatggtatctcttcttttggactttctgagactgtaagtattacaccagaagaggcagagaaatttatagactcgtattttaagcactatccaagagtgaagctttttatagataagactattcatgaggcaagagaaaaactgtacgttaaaaccttatttggcagaaaaagatatattcctgagattaagagcataaataaacaggtaaggaatgcctgtgaaaggatagcaataaatgcgccaattcagggaacagctgctgatattataaaacttgccatgatagaaatttacaaggagattgaaaataaaaatctcaagtcaagaatactccttcaaattcatgatgagcttattcttgaagtgccagaggaggagatggaatttactcctttaatggcaaaggaaaaaatggaaaaggtggtagaactttcggttcctcttgtagttgaaatctcggtaggtaaaaatcttgctgaattaaaatgagctataagattggtcgac

SEQ ID NO: 2219 - DNA, 2673 bp, Artificial Sequence
  Description of Artificial Sequence: Synthetic DNA sequence of Dictyoglomus thermophilum DNA Y795E
atgaaatacctgctgccgaccgctgctgctggtctgctgctcctcgctgcccagccggcgatggccatggatatcggaattaattcggatccgaaatctctgtgggatctttttcaagaaaataccgagaaagagtccaaaaggaagattctgattattgatggctcaagcctcatatacagggtttattacgcccttccccctttaaagacaaaaaatggtgaattaactaatgctctttatggcttcataagaatacttttaaaggccgtagaagattttaatcctgatcttgtaggcgttgcctttgatagacctgaacctacttttaggcatgtgatttataaagagtataaggctaagagaccacctatgaaggatgatttgaaagcgcagataccatggataagagaatttctaaggttaaatgatatacctctattggaagagcctggctatgaagcggatgatataatagctactatagtgaataaatataaggatgatttaaaatatattctctctggagatttagatcttttgcaattagtctcggacaaaacctttctaatacatcctcaaaagggaattactgagtttactatttatgatccaaaagctgtaaaggataggtttggagtagagccctataagattcccttatacaaagtattagtaggggacgaatctgataatattccaggagtaaatggaataggtcctaaaaaggcctcaaagattcttgagaaaatttcaagtgtagatgaatttaaaagtaaaataaaagttttggatagtgatttaagggagcttattgagaaaaattggaatattattgaaagaaatttagaacttgttactttaaaaaatatagataaggatcttattcttaaacccttcgagattaaaagagatgaaaaagtaatagattttttgaagagatatgaacttaagagtattcttcaaaagttatttcctgatcttcaagaggaagaaaatatagagattaaagatgtcgaagagatcaattttaatgaggtagaaaaagaaggctactttgcctttaaatgtcttggagatagggcttttgagggtatttctctttccttcaaggagggggaaggatattttatatctccttttgatttcaataatgagataagaaagaagattgaaaatataatttcttcagagaatgttaaaaaaattggctcttatattcaaagagatttacattttttaaactgtaaaataaagggcgatgtatttgatgttagtctcgcatcttatcttttgaaccctgaaagacaaaatcactctcttgatattttgataggagagtatctaaataaaacctcttttattcctcaaaaatacgctggttatctttttccgttaaagtctattcttgaggagaggataaagaatgaagggttagaatttgtactttataacatagagattccattaatccctgtactttactccatggagaagtgggggataaaggtagataaggaatatttaaaacagctttctgatgaattctgcgagagaattaaaaaattggaagaagagatatatgaacttgcaggaaccagatttaatctcaattctccaaaacaactttctgaagttttatttgagaggttaaaacttccttctggtaagaaaggaaaaacaggatattctacgtcgtcttctgtgcttcaaaacttaataaatgctcatcctatagtgagaaaaatcctccaatatagagaactctataaattgaagagtacttatgtggatgctattcctaatctggttaatccacaaacaggtagagttcatacaaaatttaatcctacaggtacagctacaggaagaataagtagtagtgaacctaatcttcagaatattcctataaaaagtgaagaaggtagaaagataagaagagccttcgtgtcagaagatggatattttcttgtatctcttgattattctcagatagagctaaggattatggctcatctttctcaggagcctaaattaatatctgccttccaaaaaggagaggatattcatagaagaacagcatcggagatttttggagtgccagaggaagaagttgatgatcttttaaggtcaagggcaaaggccgttaattttggaattatttatggtatctcttcttttggactttctgagactgtaagtattacaccagaagaggcagagaaatttatagactcgtattttaagcactatccaagagtgaagctttttatagataagactattcatgaggcaagagaaaaactgtacgttaaaaccttatttggcagaaaaagatatattcctgagattaagagcataaataaacaggtaaggaatgccgaagaaaggatagcaataaatgcgccaattcagggaacagctgctgatattataaaacttgccatgatagaaatttacaaggagattgaaaataaaaatctcaagtcaagaatactccttcaaattcatgatgagcttattcttgaagtgccagaggaggagatggaatttactcctttaatggcaaaggaaaaaatggaaaaggtggtagaactttcggttcctcttgtagttgaaatctcggtaggtaaaaatcttgctgaattaaaatgagctataagattggtcgac

SEQ ID NO: 2220 - DNA, 2673 bp, Artificial Sequence
  Description of Artificial Sequence: Synthetic DNA sequence of Dictyoglomus thermophilum DNA Y795Q
atgaaatacctgctgccgaccgctgctgctggtctgctgctcctcgctgcccagccggcgatggccatggatatcggaattaattcggatccgaaatctctgtgggatctttttcaagaaaataccgagaaagagtccaaaaggaagattctgattattgatggctcaagcctcatatacagggtttattacgcccttccccctttaaagacaaaaaatggtgaattaactaatgctctttatggcttcataagaatacttttaaaggccgtagaagattttaatcctgatcttgtaggcgttgcctttgatagacctgaacctacttttaggcatgtgatttataaagagtataaggctaagagaccacctatgaaggatgatttgaaagcgcagataccatggataagagaatttctaaggttaaatgatatacctctattggaagagcctggctatgaagcggatgatataatagctactatagtgaataaatataaggatgatttaaaatatattctctctggagatttagatcttttgcaattagtctcggacaaaacctttctaatacatcctcaaaagggaattactgagtttactatttatgatccaaaagctgtaaaggataggtttggagtagagccctataagattcccttatacaaagtattagtaggggacgaatctgataatattccaggagtaaatggaataggtcctaaaaaggcctcaaagattcttgagaaaatttcaagtgtagatgaatttaaaagtaaaataaaagttttggatagtgatttaagggagcttattgagaaaaattggaatattattgaaagaaatttagaacttgttactttaaaaaatatagataaggatcttattcttaaacccttcgagattaaaagagatgaaaaagtaatagattttttgaagagatatgaacttaagagtattcttcaaaagttatttcctgatcttcaagaggaagaaaatatagagattaaagatgtcgaagagatcaattttaatgaggtagaaaaagaaggctactttgcctttaaatgtcttggagatagggcttttgagggtatttctctttccttcaaggagggggaaggatattttatatctccttttgatttcaataatgagataagaaagaagattgaaaatataatttcttcagagaatgttaaaaaaattggctcttatattcaaagagatttacattttttaaactgtaaaataaagggcgatgtatttgatgttagtctcgcatcttatcttttgaaccctgaaagacaaaatcactctcttgatattttgataggagagtatctaaataaaacctcttttattcctcaaaaatacgctggttatctttttccgttaaagtctattcttgaggagaggataaagaatgaagggttagaatttgtactttataacatagagattccattaatccctgtactttactccatggagaagtgggggataaaggtagataaggaatatttaaaacagctttctgatgaattctgcgagagaattaaaaaattggaagaagagatatatgaacttgcaggaaccagatttaatctcaattctccaaaacaactttctgaagttttatttgagaggttaaaacttccttctggtaagaaaggaaaaacaggatattctacgtcgtcttctgtgcttcaaaacttaataaatgctcatcctatagtgagaaaaatcctccaatatagagaactctataaattgaagagtacttatgtggatgctattcctaatctggttaatccacaaacaggtagagttcatacaaaatttaatcctacaggtacagctacaggaagaataagtagtagtgaacctaatcttcagaatattcctataaaaagtgaagaaggtagaaagataagaagagccttcgtgtcagaagatggatattttcttgtatctcttgattattctcagatagagctaaggattatggctcatctttctcaggagcctaaattaatatctgccttccaaaaaggagaggatattcatagaagaacagcatcggagatttttggagtgccagaggaagaagttgatgatcttttaaggtcaagggcaaaggccgttaattttggaattatttatggtatctcttcttttggactttctgagactgtaagtattacaccagaagaggcagagaaatttatagactcgtattttaagcactatccaagagtgaagctttttatagataagactattcatgaggcaagagaaaaactgtacgttaaaaccttatttggcagaaaaagatatattcctgagattaagagcataaataaacaggtaaggaatgcccaagaaaggatagcaataaatgcgccaattcagggaacagctgctgatattataaaacttgccatgatagaaatttacaaggagattgaaaataaaaatctcaagtcaagaatactccttcaaattcatgatgagcttattcttgaagtgccagaggaggagatggaatttactcctttaatggcaaaggaaaaaatggaaaaggtggtagaactttcggttcctcttgtagttgaaatctcggtaggtaaaaatcttgctgaattaaaatgagctataagattggtcgac

SEQ ID NO: 2221 - DNA, 2673 bp, Artificial Sequence
  Description of Artificial Sequence: Synthetic DNA sequence of Dictyoglomus thermophilum DNA Y795G
atgaaatacctgctgccgaccgctgctgctggtctgctgctcctcgctgcccagccggcgatggccatggatatcggaattaattcggatccgaaatctctgtgggatctttttcaagaaaataccgagaaagagtccaaaaggaagattctgattattgatggctcaagcctcatatacagggtttattacgcccttccccctttaaagacaaaaaatggtgaattaactaatgctctttatggcttcataagaatacttttaaaggccgtagaagattttaatcctgatcttgtaggcgttgcctttgatagacctgaacctacttttaggcatgtgatttataaagagtataaggctaagagaccacctatgaaggatgatttgaaagcgcagataccatggataagagaatttctaaggttaaatgatatacctctattggaagagcctggctatgaagcggatgatataatagctactatagtgaataaatataaggatgatttaaaatatattctctctggagatttagatcttttgcaattagtctcggacaaaacctttctaatacatcctcaaaagggaattactgagtttactatttatgatccaaaagctgtaaaggataggtttggagtagagccctataagattcccttatacaaagtattagtaggggacgaatctgataatattccaggagtaaatggaataggtcctaaaaaggcctcaaagattcttgagaaaatttcaagtgtagatgaatttaaaagtaaaataaaagttttggatagtgatttaagggagcttattgagaaaaattggaatattattgaaagaaatttagaacttgttactttaaaaaatatagataaggatcttattcttaaacccttcgagattaaaagagatgaaaaagtaatagattttttgaagagatatgaacttaagagtattcttcaaaagttatttcctgatcttcaagaggaagaaaatatagagattaaagatgtcgaagagatcaattttaatgaggtagaaaaagaaggctactttgcctttaaatgtcttggagatagggcttttgagggtatttctctttccttcaaggagggggaaggatattttatatctccttttgatttcaataatgagataagaaagaagattgaaaatataatttcttcagagaatgttaaaaaaattggctcttatattcaaagagatttacattttttaaactgtaaaataaagggcgatgtatttgatgttagtctcgcatcttatcttttgaaccctgaaagacaaaatcactctcttgatattttgataggagagtatctaaataaaacctcttttattcctcaaaaatacgctggttatctttttccgttaaagtctattcttgaggagaggataaagaatgaagggttagaatttgtactttataacatagagattccattaatccctgtactttactccatggagaagtgggggataaaggtagataaggaatatttaaaacagctttctgatgaattctgcgagagaattaaaaaattggaagaagagatatatgaacttgcaggaaccagatttaatctcaattctccaaaacaactttctgaagttttatttgagaggttaaaacttccttctggtaagaaaggaaaaacaggatattctacgtcgtcttctgtgcttcaaaacttaataaatgctcatcctatagtgagaaaaatcctccaatatagagaactctataaattgaagagtacttatgtggatgctattcctaatctggttaatccacaaacaggtagagttcatacaaaatttaatcctacaggtacagctacaggaagaataagtagtagtgaacctaatcttcagaatattcctataaaaagtgaagaaggtagaaagataagaagagccttcgtgtcagaagatggatattttcttgtatctcttgattattctcagatagagctaaggattatggctcatctttctcaggagcctaaattaatatctgccttccaaaaaggagaggatattcatagaagaacagcatcggagatttttggagtgccagaggaagaagttgatgatcttttaaggtcaagggcaaaggccgttaattttggaattatttatggtatctcttcttttggactttctgagactgtaagtattacaccagaagaggcagagaaatttatagactcgtattttaagcactatccaagagtgaagctttttatagataagactattcatgaggcaagagaaaaactgtacgttaaaaccttatttggcagaaaaagatatattcctgagattaagagcataaataaacaggtaaggaatgccggtgaaaggatagcaataaatgcgccaattcagggaacagctgctgatattataaaacttgccatgatagaaatttacaaggagattgaaaataaaaatctcaagtcaagaatactccttcaaattcatgatgagcttattcttgaagtgccagaggaggagatggaatttactcctttaatggcaaaggaaaaaatggaaaaggtggtagaactttcggttcctcttgtagttgaaatctcggtaggtaaaaatcttgctgaattaaaatgagctataagattggtcgac

SEQ ID NO: 2222 - DNA, 2673 bp, Artificial Sequence
  Description of Artificial Sequence: Synthetic DNA sequence of Dictyoglomus thermophilum DNA Y795H
atgaaatacctgctgccgaccgctgctgctggtctgctgctcctcgctgcccagccggcgatggccatggatatcggaattaattcggatccgaaatctctgtgggatctttttcaagaaaataccgagaaagagtccaaaaggaagattctgattattgatggctcaagcctcatatacagggtttattacgcccttccccctttaaagacaaaaaatggtgaattaactaatgctctttatggcttcataagaatacttttaaaggccgtagaagattttaatcctgatcttgtaggcgttgcctttgatagacctgaacctacttttaggcatgtgatttataaagagtataaggctaagagaccacctatgaaggatgatttgaaagcgcagataccatggataagagaatttctaaggttaaatgatatacctctattggaagagcctggctatgaagcggatgatataatagctactatagtgaataaatataaggatgatttaaaatatattctctctggagatttagatcttttgcaattagtctcggacaaaacctttctaatacatcctcaaaagggaattactgagtttactatttatgatccaaaagctgtaaaggataggtttggagtagagccctataagattcccttatacaaagtattagtaggggacgaatctgataatattccaggagtaaatggaataggtcctaaaaaggcctcaaagattcttgagaaaatttcaagtgtagatgaatttaaaagtaaaataaaagttttggatagtgatttaagggagcttattgagaaaaattggaatattattgaaagaaatttagaacttgttactttaaaaaatatagataaggatcttattcttaaacccttcgagattaaaagagatgaaaaagtaatagattttttgaagagatatgaacttaagagtattcttcaaaagttatttcctgatcttcaagaggaagaaaatatagagattaaagatgtcgaagagatcaattttaatgaggtagaaaaagaaggctactttgcctttaaatgtcttggagatagggcttttgagggtatttctctttccttcaaggagggggaaggatattttatatctccttttgatttcaataatgagataagaaagaagattgaaaatataatttcttcagagaatgttaaaaaaattggctcttatattcaaagagatttacattttttaaactgtaaaataaagggcgatgtatttgatgttagtctcgcatcttatcttttgaaccctgaaagacaaaatcactctcttgatattttgataggagagtatctaaataaaacctcttttattcctcaaaaatacgctggttatctttttccgttaaagtctattcttgaggagaggataaagaatgaagggttagaatttgtactttataacatagagattccattaatccctgtactttactccatggagaagtgggggataaaggtagataaggaatatttaaaacagctttctgatgaattctgcgagagaattaaaaaattggaagaagagatatatgaacttgcaggaaccagatttaatctcaattctccaaaacaactttctgaagttttatttgagaggttaaaacttccttctggtaagaaaggaaaaacaggatattctacgtcgtcttctgtgcttcaaaacttaataaatgctcatcctatagtgagaaaaatcctccaatatagagaactctataaattgaagagtacttatgtggatgctattcctaatctggttaatccacaaacaggtagagttcatacaaaatttaatcctacaggtacagctacaggaagaataagtagtagtgaacctaatcttcagaatattcctataaaaagtgaagaaggtagaaagataagaagagccttcgtgtcagaagatggatattttcttgtatctcttgattattctcagatagagctaaggattatggctcatctttctcaggagcctaaattaatatctgccttccaaaaaggagaggatattcatagaagaacagcatcggagatttttggagtgccagaggaagaagttgatgatcttttaaggtcaagggcaaaggccgttaattttggaattatttatggtatctcttcttttggactttctgagactgtaagtattacaccagaagaggcagagaaatttatagactcgtattttaagcactatccaagagtgaagctttttatagataagactattcatgaggcaagagaaaaactgtacgttaaaaccttatttggcagaaaaagatatattcctgagattaagagcataaataaacaggtaaggaatgcccatgaaaggatagcaataaatgcgccaattcagggaacagctgctgatattataaaacttgccatgatagaaatttacaaggagattgaaaataaaaatctcaagtcaagaatactccttcaaattcatgatgagcttattcttgaagtgccagaggaggagatggaatttactcctttaatggcaaaggaaaaaatggaaaaggtggtagaactttcggttcctcttgtagttgaaatctcggtaggtaaaaatcttgctgaattaaaatgagctataagattggtcgac

SEQ ID NO: 2223 - DNA, 2673 bp, Artificial Sequence
  Description of Artificial Sequence: Synthetic DNA sequence of Dictyoglomus thermophilum DNA Y795I
atgaaatacctgctgccgaccgctgctgctggtctgctgctcctcgctgcccagccggcgatggccatggatatcggaattaattcggatccgaaatctctgtgggatctttttcaagaaaataccgagaaagagtccaaaaggaagattctgattattgatggctcaagcctcatatacagggtttattacgcccttccccctttaaagacaaaaaatggtgaattaactaatgctctttatggcttcataagaatacttttaaaggccgtagaagattttaatcctgatcttgtaggcgttgcctttgatagacctgaacctacttttaggcatgtgatttataaagagtataaggctaagagaccacctatgaaggatgatttgaaagcgcagataccatggataagagaatttctaaggttaaatgatatacctctattggaagagcctggctatgaagcggatgatataatagctactatagtgaataaatataaggatgatttaaaatatattctctctggagatttagatcttttgcaattagtctcggacaaaacctttctaatacatcctcaaaagggaattactgagtttactatttatgatccaaaagctgtaaaggataggtttggagtagagccctataagattcccttatacaaagtattagtaggggacgaatctgataatattccaggagtaaatggaataggtcctaaaaaggcctcaaagattcttgagaaaatttcaagtgtagatgaatttaaaagtaaaataaaagttttggatagtgatttaagggagcttattgagaaaaattggaatattattgaaagaaatttagaacttgttactttaaaaaatatagataaggatcttattcttaaacccttcgagattaaaagagatgaaaaagtaatagattttttgaagagatatgaacttaagagtattcttcaaaagttatttcctgatcttcaagaggaagaaaatatagagattaaagatgtcgaagagatcaattttaatgaggtagaaaaagaaggctactttgcctttaaatgtcttggagatagggcttttgagggtatttctctttccttcaaggagggggaaggatattttatatctccttttgatttcaataatgagataagaaagaagattgaaaatataatttcttcagagaatgttaaaaaaattggctcttatattcaaagagatttacattttttaaactgtaaaataaagggcgatgtatttgatgttagtctcgcatcttatcttttgaaccctgaaagacaaaatcactctcttgatattttgataggagagtatctaaataaaacctcttttattcctcaaaaatacgctggttatctttttccgttaaagtctattcttgaggagaggataaagaatgaagggttagaatttgtactttataacatagagattccattaatccctgtactttactccatggagaagtgggggataaaggtagataaggaatatttaaaacagctttctgatgaattctgcgagagaattaaaaaattggaagaagagatatatgaacttgcaggaaccagatttaatctcaattctccaaaacaactttctgaagttttatttgagaggttaaaacttccttctggtaagaaaggaaaaacaggatattctacgtcgtcttctgtgcttcaaaacttaataaatgctcatcctatagtgagaaaaatcctccaatatagagaactctataaattgaagagtacttatgtggatgctattcctaatctggttaatccacaaacaggtagagttcatacaaaatttaatcctacaggtacagctacaggaagaataagtagtagtgaacctaatcttcagaatattcctataaaaagtgaagaaggtagaaagataagaagagccttcgtgtcagaagatggatattttcttgtatctcttgattattctcagatagagctaaggattatggctcatctttctcaggagcctaaattaatatctgccttccaaaaaggagaggatattcatagaagaacagcatcggagatttttggagtgccagaggaagaagttgatgatcttttaaggtcaagggcaaaggccgttaattttggaattatttatggtatctcttcttttggactttctgagactgtaagtattacaccagaagaggcagagaaatttatagactcgtattttaagcactatccaagagtgaagctttttatagataagactattcatgaggcaagagaaaaactgtacgttaaaaccttatttggcagaaaaagatatattcctgagattaagagcataaataaacaggtaaggaatgccattgaaaggatagcaataaatgcgccaattcagggaacagctgctgatattataaaacttgccatgatagaaatttacaaggagattgaaaataaaaatctcaagtcaagaatactccttcaaattcatgatgagcttattcttgaagtgccagaggaggagatggaatttactcctttaatggcaaaggaaaaaatggaaaaggtggtagaactttcggttcctcttgtagttgaaatctcggtaggtaaaaatcttgctgaattaaaatgagctataagattggtcgac

SEQ ID NO: 2224 - DNA, 2673 bp, Artificial Sequence
  Description of Artificial Sequence: Synthetic DNA sequence of Dictyoglomus thermophilum DNA Y795L
atgaaatacctgctgccgaccgctgctgctggtctgctgctcctcgctgcccagccggcgatggccatggatatcggaattaattcggatccgaaatctctgtgggatctttttcaagaaaataccgagaaagagtccaaaaggaagattctgattattgatggctcaagcctcatatacagggtttattacgcccttccccctttaaagacaaaaaatggtgaattaactaatgctctttatggcttcataagaatacttttaaaggccgtagaagattttaatcctgatcttgtaggcgttgcctttgatagacctgaacctacttttaggcatgtgatttataaagagtataaggctaagagaccacctatgaaggatgatttgaaagcgcagataccatggataagagaatttctaaggttaaatgatatacctctattggaagagcctggctatgaagcggatgatataatagctactatagtgaataaatataaggatgatttaaaatatattctctctggagatttagatcttttgcaattagtctcggacaaaacctttctaatacatcctcaaaagggaattactgagtttactatttatgatccaaaagctgtaaaggataggtttggagtagagccctataagattcccttatacaaagtattagtaggggacgaatctgataatattccaggagtaaatggaataggtcctaaaaaggcctcaaagattcttgagaaaatttcaagtgtagatgaatttaaaagtaaaataaaagttttggatagtgatttaagggagcttattgagaaaaattggaatattattgaaagaaatttagaacttgttactttaaaaaatatagataaggatcttattcttaaacccttcgagattaaaagagatgaaaaagtaatagattttttgaagagatatgaacttaagagtattcttcaaaagttatttcctgatcttcaagaggaagaaaatatagagattaaagatgtcgaagagatcaattttaatgaggtagaaaaagaaggctactttgcctttaaatgtcttggagatagggcttttgagggtatttctctttccttcaaggagggggaaggatattttatatctccttttgatttcaataatgagataagaaagaagattgaaaatataatttcttcagagaatgttaaaaaaattggctcttatattcaaagagatttacattttttaaactgtaaaataaagggcgatgtatttgatgttagtctcgcatcttatcttttgaaccctgaaagacaaaatcactctcttgatattttgataggagagtatctaaataaaacctcttttattcctcaaaaatacgctggttatctttttccgttaaagtctattcttgaggagaggataaagaatgaagggttagaatttgtactttataacatagagattccattaatccctgtactttactccatggagaagtgggggataaaggtagataaggaatatttaaaacagctttctgatgaattctgcgagagaattaaaaaattggaagaagagatatatgaacttgcaggaaccagatttaatctcaattctccaaaacaactttctgaagttttatttgagaggttaaaacttccttctggtaagaaaggaaaaacaggatattctacgtcgtcttctgtgcttcaaaacttaataaatgctcatcctatagtgagaaaaatcctccaatatagagaactctataaattgaagagtacttatgtggatgctattcctaatctggttaatccacaaacaggtagagttcatacaaaatttaatcctacaggtacagctacaggaagaataagtagtagtgaacctaatcttcagaatattcctataaaaagtgaagaaggtagaaagataagaagagccttcgtgtcagaagatggatattttcttgtatctcttgattattctcagatagagctaaggattatggctcatctttctcaggagcctaaattaatatctgccttccaaaaaggagaggatattcatagaagaacagcatcggagatttttggagtgccagaggaagaagttgatgatcttttaaggtcaagggcaaaggccgttaattttggaattatttatggtatctcttcttttggactttctgagactgtaagtattacaccagaagaggcagagaaatttatagactcgtattttaagcactatccaagagtgaagctttttatagataagactattcatgaggcaagagaaaaactgtacgttaaaaccttatttggcagaaaaagatatattcctgagattaagagcataaataaacaggtaaggaatgcccttgaaaggatagcaataaatgcgccaattcagggaacagctgctgatattataaaacttgccatgatagaaatttacaaggagattgaaaataaaaatctcaagtcaagaatactccttcaaattcatgatgagcttattcttgaagtgccagaggaggagatggaatttactcctttaatggcaaaggaaaaaatggaaaaggtggtagaactttcggttcctcttgtagttgaaatctcggtaggtaaaaatcttgctgaattaaaatgagctataagattggtcgac

SEQ ID NO: 2225 - DNA, 2673 bp, Artificial Sequence
  Description of Artificial Sequence: Synthetic DNA sequence of Dictyoglomus thermophilum DNA Y795K
atgaaatacctgctgccgaccgctgctgctggtctgctgctcctcgctgcccagccggcgatggccatggatatcggaattaattcggatccgaaatctctgtgggatctttttcaagaaaataccgagaaagagtccaaaaggaagattctgattattgatggctcaagcctcatatacagggtttattacgcccttccccctttaaagacaaaaaatggtgaattaactaatgctctttatggcttcataagaatacttttaaaggccgtagaagattttaatcctgatcttgtaggcgttgcctttgatagacctgaacctacttttaggcatgtgatttataaagagtataaggctaagagaccacctatgaaggatgatttgaaagcgcagataccatggataagagaatttctaaggttaaatgatatacctctattggaagagcctggctatgaagcggatgatataatagctactatagtgaataaatataaggatgatttaaaatatattctctctggagatttagatcttttgcaattagtctcggacaaaacctttctaatacatcctcaaaagggaattactgagtttactatttatgatccaaaagctgtaaaggataggtttggagtagagccctataagattcccttatacaaagtattagtaggggacgaatctgataatattccaggagtaaatggaataggtcctaaaaaggcctcaaagattcttgagaaaatttcaagtgtagatgaatttaaaagtaaaataaaagttttggatagtgatttaagggagcttattgagaaaaattggaatattattgaaagaaatttagaacttgttactttaaaaaatatagataaggatcttattcttaaacccttcgagattaaaagagatgaaaaagtaatagattttttgaagagatatgaacttaagagtattcttcaaaagttatttcctgatcttcaagaggaagaaaatatagagattaaagatgtcgaagagatcaattttaatgaggtagaaaaagaaggctactttgcctttaaatgtcttggagatagggcttttgagggtatttctctttccttcaaggagggggaaggatattttatatctccttttgatttcaataatgagataagaaagaagattgaaaatataatttcttcagagaatgttaaaaaaattggctcttatattcaaagagatttacattttttaaactgtaaaataaagggcgatgtatttgatgttagtctcgcatcttatcttttgaaccctgaaagacaaaatcactctcttgatattttgataggagagtatctaaataaaacctcttttattcctcaaaaatacgctggttatctttttccgttaaagtctattcttgaggagaggataaagaatgaagggttagaatttgtactttataacatagagattccattaatccctgtactttactccatggagaagtgggggataaaggtagataaggaatatttaaaacagctttctgatgaattctgcgagagaattaaaaaattggaagaagagatatatgaacttgcaggaaccagatttaatctcaattctccaaaacaactttctgaagttttatttgagaggttaaaacttccttctggtaagaaaggaaaaacaggatattctacgtcgtcttctgtgcttcaaaacttaataaatgctcatcctatagtgagaaaaatcctccaatatagagaactctataaattgaagagtacttatgtggatgctattcctaatctggttaatccacaaacaggtagagttcatacaaaatttaatcctacaggtacagctacaggaagaataagtagtagtgaacctaatcttcagaatattcctataaaaagtgaagaaggtagaaagataagaagagccttcgtgtcagaagatggatattttcttgtatctcttgattattctcagatagagctaaggattatggctcatctttctcaggagcctaaattaatatctgccttccaaaaaggagaggatattcatagaagaacagcatcggagatttttggagtgccagaggaagaagttgatgatcttttaaggtcaagggcaaaggccgttaattttggaattatttatggtatctcttcttttggactttctgagactgtaagtattacaccagaagaggcagagaaatttatagactcgtattttaagcactatccaagagtgaagctttttatagataagactattcatgaggcaagagaaaaactgtacgttaaaaccttatttggcagaaaaagatatattcctgagattaagagcataaataaacaggtaaggaatgccaaagaaaggatagcaataaatgcgccaattcagggaacagctgctgatattataaaacttgccatgatagaaatttacaaggagattgaaaataaaaatctcaagtcaagaatactccttcaaattcatgatgagcttattcttgaagtgccagaggaggagatggaatttactcctttaatggcaaaggaaaaaatggaaaaggtggtagaactttcggttcctcttgtagttgaaatctcggtaggtaaaaatcttgctgaattaaaatgagctataagattggtcgac

SEQ ID NO: 2226 - DNA, 2673 bp, Artificial Sequence
  Description of Artificial Sequence: Synthetic DNA sequence of Dictyoglomus thermophilum DNA Y795M
atgaaatacctgctgccgaccgctgctgctggtctgctgctcctcgctgcccagccggcgatggccatggatatcggaattaattcggatccgaaatctctgtgggatctttttcaagaaaataccgagaaagagtccaaaaggaagattctgattattgatggctcaagcctcatatacagggtttattacgcccttccccctttaaagacaaaaaatggtgaattaactaatgctctttatggcttcataagaatacttttaaaggccgtagaagattttaatcctgatcttgtaggcgttgcctttgatagacctgaacctacttttaggcatgtgatttataaagagtataaggctaagagaccacctatgaaggatgatttgaaagcgcagataccatggataagagaatttctaaggttaaatgatatacctctattggaagagcctggctatgaagcggatgatataatagctactatagtgaataaatataaggatgatttaaaatatattctctctggagatttagatcttttgcaattagtctcggacaaaacctttctaatacatcctcaaaagggaattactgagtttactatttatgatccaaaagctgtaaaggataggtttggagtagagccctataagattcccttatacaaagtattagtaggggacgaatctgataatattccaggagtaaatggaataggtcctaaaaaggcctcaaagattcttgagaaaatttcaagtgtagatgaatttaaaagtaaaataaaagttttggatagtgatttaagggagcttattgagaaaaattggaatattattgaaagaaatttagaacttgttactttaaaaaatatagataaggatcttattcttaaacccttcgagattaaaagagatgaaaaagtaatagattttttgaagagatatgaacttaagagtattcttcaaaagttatttcctgatcttcaagaggaagaaaatatagagattaaagatgtcgaagagatcaattttaatgaggtagaaaaagaaggctactttgcctttaaatgtcttggagatagggcttttgagggtatttctctttccttcaaggagggggaaggatattttatatctccttttgatttcaataatgagataagaaagaagattgaaaatataatttcttcagagaatgttaaaaaaattggctcttatattcaaagagatttacattttttaaactgtaaaataaagggcgatgtatttgatgttagtctcgcatcttatcttttgaaccctgaaagacaaaatcactctcttgatattttgataggagagtatctaaataaaacctcttttattcctcaaaaatacgctggttatctttttccgttaaagtctattcttgaggagaggataaagaatgaagggttagaatttgtactttataacatagagattccattaatccctgtactttactccatggagaagtgggggataaaggtagataaggaatatttaaaacagctttctgatgaattctgcgagagaattaaaaaattggaagaagagatatatgaacttgcaggaaccagatttaatctcaattctccaaaacaactttctgaagttttatttgagaggttaaaacttccttctggtaagaaaggaaaaacaggatattctacgtcgtcttctgtgcttcaaaacttaataaatgctcatcctatagtgagaaaaatcctccaatatagagaactctataaattgaagagtacttatgtggatgctattcctaatctggttaatccacaaacaggtagagttcatacaaaatttaatcctacaggtacagctacaggaagaataagtagtagtgaacctaatcttcagaatattcctataaaaagtgaagaaggtagaaagataagaagagccttcgtgtcagaagatggatattttcttgtatctcttgattattctcagatagagctaaggattatggctcatctttctcaggagcctaaattaatatctgccttccaaaaaggagaggatattcatagaagaacagcatcggagatttttggagtgccagaggaagaagttgatgatcttttaaggtcaagggcaaaggccgttaattttggaattatttatggtatctcttcttttggactttctgagactgtaagtattacaccagaagaggcagagaaatttatagactcgtattttaagcactatccaagagtgaagctttttatagataagactattcatgaggcaagagaaaaactgtacgttaaaaccttatttggcagaaaaagatatattcctgagattaagagcataaataaacaggtaaggaatgccatggaaaggatagcaataaatgcgccaattcagggaacagctgctgatattataaaacttgccatgatagaaatttacaaggagattgaaaataaaaatctcaagtcaagaatactccttcaaattcatgatgagcttattcttgaagtgccagaggaggagatggaatttactcctttaatggcaaaggaaaaaatggaaaaggtggtagaactttcggttcctcttgtagttgaaatctcggtaggtaaaaatcttgctgaattaaaatgagctataagattggtcgac

SEQ ID NO: 2227 - DNA, 2673 bp, Artificial Sequence
  Description of Artificial Sequence: Synthetic DNA sequence of Dictyoglomus thermophilum DNA Y795F
atgaaatacctgctgccgaccgctgctgctggtctgctgctcctcgctgcccagccggcgatggccatggatatcggaattaattcggatccgaaatctctgtgggatctttttcaagaaaataccgagaaagagtccaaaaggaagattctgattattgatggctcaagcctcatatacagggtttattacgcccttccccctttaaagacaaaaaatggtgaattaactaatgctctttatggcttcataagaatacttttaaaggccgtagaagattttaatcctgatcttgtaggcgttgcctttgatagacctgaacctacttttaggcatgtgatttataaagagtataaggctaagagaccacctatgaaggatgatttgaaagcgcagataccatggataagagaatttctaaggttaaatgatatacctctattggaagagcctggctatgaagcggatgatataatagctactatagtgaataaatataaggatgatttaaaatatattctctctggagatttagatcttttgcaattagtctcggacaaaacctttctaatacatcctcaaaagggaattactgagtttactatttatgatccaaaagctgtaaaggataggtttggagtagagccctataagattcccttatacaaagtattagtaggggacgaatctgataatattccaggagtaaatggaataggtcctaaaaaggcctcaaagattcttgagaaaatttcaagtgtagatgaatttaaaagtaaaataaaagttttggatagtgatttaagggagcttattgagaaaaattggaatattattgaaagaaatttagaacttgttactttaaaaaatatagataaggatcttattcttaaacccttcgagattaaaagagatgaaaaagtaatagattttttgaagagatatgaacttaagagtattcttcaaaagttatttcctgatcttcaagaggaagaaaatatagagattaaagatgtcgaagagatcaattttaatgaggtagaaaaagaaggctactttgcctttaaatgtcttggagatagggcttttgagggtatttctctttccttcaaggagggggaaggatattttatatctccttttgatttcaataatgagataagaaagaagattgaaaatataatttcttcagagaatgttaaaaaaattggctcttatattcaaagagatttacattttttaaactgtaaaataaagggcgatgtatttgatgttagtctcgcatcttatcttttgaaccctgaaagacaaaatcactctcttgatattttgataggagagtatctaaataaaacctcttttattcctcaaaaatacgctggttatctttttccgttaaagtctattcttgaggagaggataaagaatgaagggttagaatttgtactttataacatagagattccattaatccctgtactttactccatggagaagtgggggataaaggtagataaggaatatttaaaacagctttctgatgaattctgcgagagaattaaaaaattggaagaagagatatatgaacttgcaggaaccagatttaatctcaattctccaaaacaactttctgaagttttatttgagaggttaaaacttccttctggtaagaaaggaaaaacaggatattctacgtcgtcttctgtgcttcaaaacttaataaatgctcatcctatagtgagaaaaatcctccaatatagagaactctataaattgaagagtacttatgtggatgctattcctaatctggttaatccacaaacaggtagagttcatacaaaatttaatcctacaggtacagctacaggaagaataagtagtagtgaacctaatcttcagaatattcctataaaaagtgaagaaggtagaaagataagaagagccttcgtgtcagaagatggatattttcttgtatctcttgattattctcagatagagctaaggattatggctcatctttctcaggagcctaaattaatatctgccttccaaaaaggagaggatattcatagaagaacagcatcggagatttttggagtgccagaggaagaagttgatgatcttttaaggtcaagggcaaaggccgttaattttggaattatttatggtatctcttcttttggactttctgagactgtaagtattacaccagaagaggcagagaaatttatagactcgtattttaagcactatccaagagtgaagctttttatagataagactattcatgaggcaagagaaaaactgtacgttaaaaccttatttggcagaaaaagatatattcctgagattaagagcataaataaacaggtaaggaatgcctttgaaaggatagcaataaatgcgccaattcagggaacagctgctgatattataaaacttgccatgatagaaatttacaaggagattgaaaataaaaatctcaagtcaagaatactccttcaaattcatgatgagcttattcttgaagtgccagaggaggagatggaatttactcctttaatggcaaaggaaaaaatggaaaaggtggtagaactttcggttcctcttgtagttgaaatctcggtaggtaaaaatcttgctgaattaaaatgagctataagattggtcgac

SEQ ID NO: 2228 - DNA, 2673 bp, Artificial Sequence
  Description of Artificial Sequence: Synthetic DNA sequence of Dictyoglomus thermophilum DNA Y795P
atgaaatacctgctgccgaccgctgctgctggtctgctgctcctcgctgcccagccggcgatggccatggatatcggaattaattcggatccgaaatctctgtgggatctttttcaagaaaataccgagaaagagtccaaaaggaagattctgattattgatggctcaagcctcatatacagggtttattacgcccttccccctttaaagacaaaaaatggtgaattaactaatgctctttatggcttcataagaatacttttaaaggccgtagaagattttaatcctgatcttgtaggcgttgcctttgatagacctgaacctacttttaggcatgtgatttataaagagtataaggctaagagaccacctatgaaggatgatttgaaagcgcagataccatggataagagaatttctaaggttaaatgatatacctctattggaagagcctggctatgaagcggatgatataatagctactatagtgaataaatataaggatgatttaaaatatattctctctggagatttagatcttttgcaattagtctcggacaaaacctttctaatacatcctcaaaagggaattactgagtttactatttatgatccaaaagctgtaaaggataggtttggagtagagccctataagattcccttatacaaagtattagtaggggacgaatctgataatattccaggagtaaatggaataggtcctaaaaaggcctcaaagattcttgagaaaatttcaagtgtagatgaatttaaaagtaaaataaaagttttggatagtgatttaagggagcttattgagaaaaattggaatattattgaaagaaatttagaacttgttactttaaaaaatatagataaggatcttattcttaaacccttcgagattaaaagagatgaaaaagtaatagattttttgaagagatatgaacttaagagtattcttcaaaagttatttcctgatcttcaagaggaagaaaatatagagattaaagatgtcgaagagatcaattttaatgaggtagaaaaagaaggctactttgcctttaaatgtcttggagatagggcttttgagggtatttctctttccttcaaggagggggaaggatattttatatctccttttgatttcaataatgagataagaaagaagattgaaaatataatttcttcagagaatgttaaaaaaattggctcttatattcaaagagatttacattttttaaactgtaaaataaagggcgatgtatttgatgttagtctcgcatcttatcttttgaaccctgaaagacaaaatcactctcttgatattttgataggagagtatctaaataaaacctcttttattcctcaaaaatacgctggttatctttttccgttaaagtctattcttgaggagaggataaagaatgaagggttagaatttgtactttataacatagagattccattaatccctgtactttactccatggagaagtgggggataaaggtagataaggaatatttaaaacagctttctgatgaattctgcgagagaattaaaaaattggaagaagagatatatgaacttgcaggaaccagatttaatctcaattctccaaaacaactttctgaagttttatttgagaggttaaaacttccttctggtaagaaaggaaaaacaggatattctacgtcgtcttctgtgcttcaaaacttaataaatgctcatcctatagtgagaaaaatcctccaatatagagaactctataaattgaagagtacttatgtggatgctattcctaatctggttaatccacaaacaggtagagttcatacaaaatttaatcctacaggtacagctacaggaagaataagtagtagtgaacctaatcttcagaatattcctataaaaagtgaagaaggtagaaagataagaagagccttcgtgtcagaagatggatattttcttgtatctcttgattattctcagatagagctaaggattatggctcatctttctcaggagcctaaattaatatctgccttccaaaaaggagaggatattcatagaagaacagcatcggagatttttggagtgccagaggaagaagttgatgatcttttaaggtcaagggcaaaggccgttaattttggaattatttatggtatctcttcttttggactttctgagactgtaagtattacaccagaagaggcagagaaatttatagactcgtattttaagcactatccaagagtgaagctttttatagataagactattcatgaggcaagagaaaaactgtacgttaaaaccttatttggcagaaaaagatatattcctgagattaagagcataaataaacaggtaaggaatgcccctgaaaggatagcaataaatgcgccaattcagggaacagctgctgatattataaaacttgccatgatagaaatttacaaggagattgaaaataaaaatctcaagtcaagaatactccttcaaattcatgatgagcttattcttgaagtgccagaggaggagatggaatttactcctttaatggcaaaggaaaaaatggaaaaggtggtagaactttcggttcctcttgtagttgaaatctcggtaggtaaaaatcttgctgaattaaaatgagctataagattggtcgac

SEQ ID NO: 2229 - DNA, 2673 bp, Artificial Sequence
  Description of Artificial Sequence: Synthetic DNA sequence of Dictyoglomus thermophilum DNA Y795S
atgaaatacctgctgccgaccgctgctgctggtctgctgctcctcgctgcccagccggcgatggccatggatatcggaattaattcggatccgaaatctctgtgggatctttttcaagaaaataccgagaaagagtccaaaaggaagattctgattattgatggctcaagcctcatatacagggtttattacgcccttccccctttaaagacaaaaaatggtgaattaactaatgctctttatggcttcataagaatacttttaaaggccgtagaagattttaatcctgatcttgtaggcgttgcctttgatagacctgaacctacttttaggcatgtgatttataaagagtataaggctaagagaccacctatgaaggatgatttgaaagcgcagataccatggataagagaatttctaaggttaaatgatatacctctattggaagagcctggctatgaagcggatgatataatagctactatagtgaataaatataaggatgatttaaaatatattctctctggagatttagatcttttgcaattagtctcggacaaaacctttctaatacatcctcaaaagggaattactgagtttactatttatgatccaaaagctgtaaaggataggtttggagtagagccctataagattcccttatacaaagtattagtaggggacgaatctgataatattccaggagtaaatggaataggtcctaaaaaggcctcaaagattcttgagaaaatttcaagtgtagatgaatttaaaagtaaaataaaagttttggatagtgatttaagggagcttattgagaaaaattggaatattattgaaagaaatttagaacttgttactttaaaaaatatagataaggatcttattcttaaacccttcgagattaaaagagatgaaaaagtaatagattttttgaagagatatgaacttaagagtattcttcaaaagttatttcctgatcttcaagaggaagaaaatatagagattaaagatgtcgaagagatcaattttaatgaggtagaaaaagaaggctactttgcctttaaatgtcttggagatagggcttttgagggtatttctctttccttcaaggagggggaaggatattttatatctccttttgatttcaataatgagataagaaagaagattgaaaatataatttcttcagagaatgttaaaaaaattggctcttatattcaaagagatttacattttttaaactgtaaaataaagggcgatgtatttgatgttagtctcgcatcttatcttttgaaccctgaaagacaaaatcactctcttgatattttgataggagagtatctaaataaaacctcttttattcctcaaaaatacgctggttatctttttccgttaaagtctattcttgaggagaggataaagaatgaagggttagaatttgtactttataacatagagattccattaatccctgtactttactccatggagaagtgggggataaaggtagataaggaatatttaaaacagctttctgatgaattctgcgagagaattaaaaaattggaagaagagatatatgaacttgcaggaaccagatttaatctcaattctccaaaacaactttctgaagttttatttgagaggttaaaacttccttctggtaagaaaggaaaaacaggatattctacgtcgtcttctgtgcttcaaaacttaataaatgctcatcctatagtgagaaaaatcctccaatatagagaactctataaattgaagagtacttatgtggatgctattcctaatctggttaatccacaaacaggtagagttcatacaaaatttaatcctacaggtacagctacaggaagaataagtagtagtgaacctaatcttcagaatattcctataaaaagtgaagaaggtagaaagataagaagagccttcgtgtcagaagatggatattttcttgtatctcttgattattctcagatagagctaaggattatggctcatctttctcaggagcctaaattaatatctgccttccaaaaaggagaggatattcatagaagaacagcatcggagatttttggagtgccagaggaagaagttgatgatcttttaaggtcaagggcaaaggccgttaattttggaattatttatggtatctcttcttttggactttctgagactgtaagtattacaccagaagaggcagagaaatttatagactcgtattttaagcactatccaagagtgaagctttttatagataagactattcatgaggcaagagaaaaactgtacgttaaaaccttatttggcagaaaaagatatattcctgagattaagagcataaataaacaggtaaggaatgcctctgaaaggatagcaataaatgcgccaattcagggaacagctgctgatattataaaacttgccatgatagaaatttacaaggagattgaaaataaaaatctcaagtcaagaatactccttcaaattcatgatgagcttattcttgaagtgccagaggaggagatggaatttactcctttaatggcaaaggaaaaaatggaaaaggtggtagaactttcggttcctcttgtagttgaaatctcggtaggtaaaaatcttgctgaattaaaatgagctataagattggtcgac

SEQ ID NO: 2230 - DNA, 2673 bp, Artificial Sequence
  Description of Artificial Sequence: Synthetic DNA sequence of Dictyoglomus thermophilum DNA Y795T
atgaaatacctgctgccgaccgctgctgctggtctgctgctcctcgctgcccagccggcgatggccatggatatcggaattaattcggatccgaaatctctgtgggatctttttcaagaaaataccgagaaagagtccaaaaggaagattctgattattgatggctcaagcctcatatacagggtttattacgcccttccccctttaaagacaaaaaatggtgaattaactaatgctctttatggcttcataagaatacttttaaaggccgtagaagattttaatcctgatcttgtaggcgttgcctttgatagacctgaacctacttttaggcatgtgatttataaagagtataaggctaagagaccacctatgaaggatgatttgaaagcgcagataccatggataagagaatttctaaggttaaatgatatacctctattggaagagcctggctatgaagcggatgatataatagctactatagtgaataaatataaggatgatttaaaatatattctctctggagatttagatcttttgcaattagtctcggacaaaacctttctaatacatcctcaaaagggaattactgagtttactatttatgatccaaaagctgtaaaggataggtttggagtagagccctataagattcccttatacaaagtattagtaggggacgaatctgataatattccaggagtaaatggaataggtcctaaaaaggcctcaaagattcttgagaaaatttcaagtgtagatgaatttaaaagtaaaataaaagttttggatagtgatttaagggagcttattgagaaaaattggaatattattgaaagaaatttagaacttgttactttaaaaaatatagataaggatcttattcttaaacccttcgagattaaaagagatgaaaaagtaatagattttttgaagagatatgaacttaagagtattcttcaaaagttatttcctgatcttcaagaggaagaaaatatagagattaaagatgtcgaagagatcaattttaatgaggtagaaaaagaaggctactttgcctttaaatgtcttggagatagggcttttgagggtatttctctttccttcaaggagggggaaggatattttatatctccttttgatttcaataatgagataagaaagaagattgaaaatataatttcttcagagaatgttaaaaaaattggctcttatattcaaagagatttacattttttaaactgtaaaataaagggcgatgtatttgatgttagtctcgcatcttatcttttgaaccctgaaagacaaaatcactctcttgatattttgataggagagtatctaaataaaacctcttttattcctcaaaaatacgctggttatctttttccgttaaagtctattcttgaggagaggataaagaatgaagggttagaatttgtactttataacatagagattccattaatccctgtactttactccatggagaagtgggggataaaggtagataaggaatatttaaaacagctttctgatgaattctgcgagagaattaaaaaattggaagaagagatatatgaacttgcaggaaccagatttaatctcaattctccaaaacaactttctgaagttttatttgagaggttaaaacttccttctggtaagaaaggaaaaacaggatattctacgtcgtcttctgtgcttcaaaacttaataaatgctcatcctatagtgagaaaaatcctccaatatagagaactctataaattgaagagtacttatgtggatgctattcctaatctggttaatccacaaacaggtagagttcatacaaaatttaatcctacaggtacagctacaggaagaataagtagtagtgaacctaatcttcagaatattcctataaaaagtgaagaaggtagaaagataagaagagccttcgtgtcagaagatggatattttcttgtatctcttgattattctcagatagagctaaggattatggctcatctttctcaggagcctaaattaatatctgccttccaaaaaggagaggatattcatagaagaacagcatcggagatttttggagtgccagaggaagaagttgatgatcttttaaggtcaagggcaaaggccgttaattttggaattatttatggtatctcttcttttggactttctgagactgtaagtattacaccagaagaggcagagaaatttatagactcgtattttaagcactatccaagagtgaagctttttatagataagactattcatgaggcaagagaaaaactgtacgttaaaaccttatttggcagaaaaagatatattcctgagattaagagcataaataaacaggtaaggaatgccactgaaaggatagcaataaatgcgccaattcagggaacagctgctgatattataaaacttgccatgatagaaatttacaaggagattgaaaataaaaatctcaagtcaagaatactccttcaaattcatgatgagcttattcttgaagtgccagaggaggagatggaatttactcctttaatggcaaaggaaaaaatggaaaaggtggtagaactttcggttcctcttgtagttgaaatctcggtaggtaaaaatcttgctgaattaaaatgagctataagattggtcgac

SEQ ID NO: 2231 - DNA, 2673 bp, Artificial Sequence
  Description of Artificial Sequence: Synthetic DNA sequence of Dictyoglomus thermophilum DNA Y795W
atgaaatacctgctgccgaccgctgctgctggtctgctgctcctcgctgcccagccggcgatggccatggatatcggaattaattcggatccgaaatctctgtgggatctttttcaagaaaataccgagaaagagtccaaaaggaagattctgattattgatggctcaagcctcatatacagggtttattacgcccttccccctttaaagacaaaaaatggtgaattaactaatgctctttatggcttcataagaatacttttaaaggccgtagaagattttaatcctgatcttgtaggcgttgcctttgatagacctgaacctacttttaggcatgtgatttataaagagtataaggctaagagaccacctatgaaggatgatttgaaagcgcagataccatggataagagaatttctaaggttaaatgatatacctctattggaagagcctggctatgaagcggatgatataatagctactatagtgaataaatataaggatgatttaaaatatattctctctggagatttagatcttttgcaattagtctcggacaaaacctttctaatacatcctcaaaagggaattactgagtttactatttatgatccaaaagctgtaaaggataggtttggagtagagccctataagattcccttatacaaagtattagtaggggacgaatctgataatattccaggagtaaatggaataggtcctaaaaaggcctcaaagattcttgagaaaatttcaagtgtagatgaatttaaaagtaaaataaaagttttggatagtgatttaagggagcttattgagaaaaattggaatattattgaaagaaatttagaacttgttactttaaaaaatatagataaggatcttattcttaaacccttcgagattaaaagagatgaaaaagtaatagattttttgaagagatatgaacttaagagtattcttcaaaagttatttcctgatcttcaagaggaagaaaatatagagattaaagatgtcgaagagatcaattttaatgaggtagaaaaagaaggctactttgcctttaaatgtcttggagatagggcttttgagggtatttctctttccttcaaggagggggaaggatattttatatctccttttgatttcaataatgagataagaaagaagattgaaaatataatttcttcagagaatgttaaaaaaattggctcttatattcaaagagatttacattttttaaactgtaaaataaagggcgatgtatttgatgttagtctcgcatcttatcttttgaaccctgaaagacaaaatcactctcttgatattttgataggagagtatctaaataaaacctcttttattcctcaaaaatacgctggttatctttttccgttaaagtctattcttgaggagaggataaagaatgaagggttagaatttgtactttataacatagagattccattaatccctgtactttactccatggagaagtgggggataaaggtagataaggaatatttaaaacagctttctgatgaattctgcgagagaattaaaaaattggaagaagagatatatgaacttgcaggaaccagatttaatctcaattctccaaaacaactttctgaagttttatttgagaggttaaaacttccttctggtaagaaaggaaaaacaggatattctacgtcgtcttctgtgcttcaaaacttaataaatgctcatcctatagtgagaaaaatcctccaatatagagaactctataaattgaagagtacttatgtggatgctattcctaatctggttaatccacaaacaggtagagttcatacaaaatttaatcctacaggtacagctacaggaagaataagtagtagtgaacctaatcttcagaatattcctataaaaagtgaagaaggtagaaagataagaagagccttcgtgtcagaagatggatattttcttgtatctcttgattattctcagatagagctaaggattatggctcatctttctcaggagcctaaattaatatctgccttccaaaaaggagaggatattcatagaagaacagcatcggagatttttggagtgccagaggaagaagttgatgatcttttaaggtcaagggcaaaggccgttaattttggaattatttatggtatctcttcttttggactttctgagactgtaagtattacaccagaagaggcagagaaatttatagactcgtattttaagcactatccaagagtgaagctttttatagataagactattcatgaggcaagagaaaaactgtacgttaaaaccttatttggcagaaaaagatatattcctgagattaagagcataaataaacaggtaaggaatgcctgggaaaggatagcaataaatgcgccaattcagggaacagctgctgatattataaaacttgccatgatagaaatttacaaggagattgaaaataaaaatctcaagtcaagaatactccttcaaattcatgatgagcttattcttgaagtgccagaggaggagatggaatttactcctttaatggcaaaggaaaaaatggaaaaggtggtagaactttcggttcctcttgtagttgaaatctcggtaggtaaaaatcttgctgaattaaaatgagctataagattggtcgac

SEQ ID NO: 2232 - DNA, 2673 bp, Artificial Sequence
  Description of Artificial Sequence: Synthetic DNA sequence of Dictyoglomus thermophilum DNA Y795V
atgaaatacctgctgccgaccgctgctgctggtctgctgctcctcgctgcccagccggcgatggccatggatatcggaattaattcggatccgaaatctctgtgggatctttttcaagaaaataccgagaaagagtccaaaaggaagattctgattattgatggctcaagcctcatatacagggtttattacgcccttccccctttaaagacaaaaaatggtgaattaactaatgctctttatggcttcataagaatacttttaaaggccgtagaagattttaatcctgatcttgtaggcgttgcctttgatagacctgaacctacttttaggcatgtgatttataaagagtataaggctaagagaccacctatgaaggatgatttgaaagcgcagataccatggataagagaatttctaaggttaaatgatatacctctattggaagagcctggctatgaagcggatgatataatagctactatagtgaataaatataaggatgatttaaaatatattctctctggagatttagatcttttgcaattagtctcggacaaaacctttctaatacatcctcaaaagggaattactgagtttactatttatgatccaaaagctgtaaaggataggtttggagtagagccctataagattcccttatacaaagtattagtaggggacgaatctgataatattccaggagtaaatggaataggtcctaaaaaggcctcaaagattcttgagaaaatttcaagtgtagatgaatttaaaagtaaaataaaagttttggatagtgatttaagggagcttattgagaaaaattggaatattattgaaagaaatttagaacttgttactttaaaaaatatagataaggatcttattcttaaacccttcgagattaaaagagatgaaaaagtaatagattttttgaagagatatgaacttaagagtattcttcaaaagttatttcctgatcttcaagaggaagaaaatatagagattaaagatgtcgaagagatcaattttaatgaggtagaaaaagaaggctactttgcctttaaatgtcttggagatagggcttttgagggtatttctctttccttcaaggagggggaaggatattttatatctccttttgatttcaataatgagataagaaagaagattgaaaatataatttcttcagagaatgttaaaaaaattggctcttatattcaaagagatttacattttttaaactgtaaaataaagggcgatgtatttgatgttagtctcgcatcttatcttttgaaccctgaaagacaaaatcactctcttgatattttgataggagagtatctaaataaaacctcttttattcctcaaaaatacgctggttatctttttccgttaaagtctattcttgaggagaggataaagaatgaagggttagaatttgtactttataacatagagattccattaatccctgtactttactccatggagaagtgggggataaaggtagataaggaatatttaaaacagctttctgatgaattctgcgagagaattaaaaaattggaagaagagatatatgaacttgcaggaaccagatttaatctcaattctccaaaacaactttctgaagttttatttgagaggttaaaacttccttctggtaagaaaggaaaaacaggatattctacgtcgtcttctgtgcttcaaaacttaataaatgctcatcctatagtgagaaaaatcctccaatatagagaactctataaattgaagagtacttatgtggatgctattcctaatctggttaatccacaaacaggtagagttcatacaaaatttaatcctacaggtacagctacaggaagaataagtagtagtgaacctaatcttcagaatattcctataaaaagtgaagaaggtagaaagataagaagagccttcgtgtcagaagatggatattttcttgtatctcttgattattctcagatagagctaaggattatggctcatctttctcaggagcctaaattaatatctgccttccaaaaaggagaggatattcatagaagaacagcatcggagatttttggagtgccagaggaagaagttgatgatcttttaaggtcaagggcaaaggccgttaattttggaattatttatggtatctcttcttttggactttctgagactgtaagtattacaccagaagaggcagagaaatttatagactcgtattttaagcactatccaagagtgaagctttttatagataagactattcatgaggcaagagaaaaactgtacgttaaaaccttatttggcagaaaaagatatattcctgagattaagagcataaataaacaggtaaggaatgccgttgaaaggatagcaataaatgcgccaattcagggaacagctgctgatattataaaacttgccatgatagaaatttacaaggagattgaaaataaaaatctcaagtcaagaatactccttcaaattcatgatgagcttattcttgaagtgccagaggaggagatggaatttactcctttaatggcaaaggaaaaaatggaaaaggtggtagaactttcggttcctcttgtagttgaaatctcggtaggtaaaaatcttgctgaattaaaatgagctataagattggtcgac

SEQ ID NO: 2233 - DNA, 2673 bp, Artificial Sequence
  Description of Artificial Sequence: Synthetic DNA sequence of Dictyoglomus thermophilum DNA E796A
atgaaatacctgctgccgaccgctgctgctggtctgctgctcctcgctgcccagccggcgatggccatggatatcggaattaattcggatccgaaatctctgtgggatctttttcaagaaaataccgagaaagagtccaaaaggaagattctgattattgatggctcaagcctcatatacagggtttattacgcccttccccctttaaagacaaaaaatggtgaattaactaatgctctttatggcttcataagaatacttttaaaggccgtagaagattttaatcctgatcttgtaggcgttgcctttgatagacctgaacctacttttaggcatgtgatttataaagagtataaggctaagagaccacctatgaaggatgatttgaaagcgcagataccatggataagagaatttctaaggttaaatgatatacctctattggaagagcctggctatgaagcggatgatataatagctactatagtgaataaatataaggatgatttaaaatatattctctctggagatttagatcttttgcaattagtctcggacaaaacctttctaatacatcctcaaaagggaattactgagtttactatttatgatccaaaagctgtaaaggataggtttggagtagagccctataagattcccttatacaaagtattagtaggggacgaatctgataatattccaggagtaaatggaataggtcctaaaaaggcctcaaagattcttgagaaaatttcaagtgtagatgaatttaaaagtaaaataaaagttttggatagtgatttaagggagcttattgagaaaaattggaatattattgaaagaaatttagaacttgttactttaaaaaatatagataaggatcttattcttaaacccttcgagattaaaagagatgaaaaagtaatagattttttgaagagatatgaacttaagagtattcttcaaaagttatttcctgatcttcaagaggaagaaaatatagagattaaagatgtcgaagagatcaattttaatgaggtagaaaaagaaggctactttgcctttaaatgtcttggagatagggcttttgagggtatttctctttccttcaaggagggggaaggatattttatatctccttttgatttcaataatgagataagaaagaagattgaaaatataatttcttcagagaatgttaaaaaaattggctcttatattcaaagagatttacattttttaaactgtaaaataaagggcgatgtatttgatgttagtctcgcatcttatcttttgaaccctgaaagacaaaatcactctcttgatattttgataggagagtatctaaataaaacctcttttattcctcaaaaatacgctggttatctttttccgttaaagtctattcttgaggagaggataaagaatgaagggttagaatttgtactttataacatagagattccattaatccctgtactttactccatggagaagtgggggataaaggtagataaggaatatttaaaacagctttctgatgaattctgcgagagaattaaaaaattggaagaagagatatatgaacttgcaggaaccagatttaatctcaattctccaaaacaactttctgaagttttatttgagaggttaaaacttccttctggtaagaaaggaaaaacaggatattctacgtcgtcttctgtgcttcaaaacttaataaatgctcatcctatagtgagaaaaatcctccaatatagagaactctataaattgaagagtacttatgtggatgctattcctaatctggttaatccacaaacaggtagagttcatacaaaatttaatcctacaggtacagctacaggaagaataagtagtagtgaacctaatcttcagaatattcctataaaaagtgaagaaggtagaaagataagaagagccttcgtgtcagaagatggatattttcttgtatctcttgattattctcagatagagctaaggattatggctcatctttctcaggagcctaaattaatatctgccttccaaaaaggagaggatattcatagaagaacagcatcggagatttttggagtgccagaggaagaagttgatgatcttttaaggtcaagggcaaaggccgttaattttggaattatttatggtatctcttcttttggactttctgagactgtaagtattacaccagaagaggcagagaaatttatagactcgtattttaagcactatccaagagtgaagctttttatagataagactattcatgaggcaagagaaaaactgtacgttaaaaccttatttggcagaaaaagatatattcctgagattaagagcataaataaacaggtaaggaatgcctatgctaggatagcaataaatgcgccaattcagggaacagctgctgatattataaaacttgccatgatagaaatttacaaggagattgaaaataaaaatctcaagtcaagaatactccttcaaattcatgatgagcttattcttgaagtgccagaggaggagatggaatttactcctttaatggcaaaggaaaaaatggaaaaggtggtagaactttcggttcctcttgtagttgaaatctcggtaggtaaaaatcttgctgaattaaaatgagctataagattggtcgac

SEQ ID NO: 2234 - DNA, 2673 bp, Artificial Sequence
  Description of Artificial Sequence: Synthetic DNA sequence of Dictyoglomus thermophilum DNA E796R
atgaaatacctgctgccgaccgctgctgctggtctgctgctcctcgctgcccagccggcgatggccatggatatcggaattaattcggatccgaaatctctgtgggatctttttcaagaaaataccgagaaagagtccaaaaggaagattctgattattgatggctcaagcctcatatacagggtttattacgcccttccccctttaaagacaaaaaatggtgaattaactaatgctctttatggcttcataagaatacttttaaaggccgtagaagattttaatcctgatcttgtaggcgttgcctttgatagacctgaacctacttttaggcatgtgatttataaagagtataaggctaagagaccacctatgaaggatgatttgaaagcgcagataccatggataagagaatttctaaggttaaatgatatacctctattggaagagcctggctatgaagcggatgatataatagctactatagtgaataaatataaggatgatttaaaatatattctctctggagatttagatcttttgcaattagtctcggacaaaacctttctaatacatcctcaaaagggaattactgagtttactatttatgatccaaaagctgtaaaggataggtttggagtagagccctataagattcccttatacaaagtattagtaggggacgaatctgataatattccaggagtaaatggaataggtcctaaaaaggcctcaaagattcttgagaaaatttcaagtgtagatgaatttaaaagtaaaataaaagttttggatagtgatttaagggagcttattgagaaaaattggaatattattgaaagaaatttagaacttgttactttaaaaaatatagataaggatcttattcttaaacccttcgagattaaaagagatgaaaaagtaatagattttttgaagagatatgaacttaagagtattcttcaaaagttatttcctgatcttcaagaggaagaaaatatagagattaaagatgtcgaagagatcaattttaatgaggtagaaaaagaaggctactttgcctttaaatgtcttggagatagggcttttgagggtatttctctttccttcaaggagggggaaggatattttatatctccttttgatttcaataatgagataagaaagaagattgaaaatataatttcttcagagaatgttaaaaaaattggctcttatattcaaagagatttacattttttaaactgtaaaataaagggcgatgtatttgatgttagtctcgcatcttatcttttgaaccctgaaagacaaaatcactctcttgatattttgataggagagtatctaaataaaacctcttttattcctcaaaaatacgctggttatctttttccgttaaagtctattcttgaggagaggataaagaatgaagggttagaatttgtactttataacatagagattccattaatccctgtactttactccatggagaagtgggggataaaggtagataaggaatatttaaaacagctttctgatgaattctgcgagagaattaaaaaattggaagaagagatatatgaacttgcaggaaccagatttaatctcaattctccaaaacaactttctgaagttttatttgagaggttaaaacttccttctggtaagaaaggaaaaacaggatattctacgtcgtcttctgtgcttcaaaacttaataaatgctcatcctatagtgagaaaaatcctccaatatagagaactctataaattgaagagtacttatgtggatgctattcctaatctggttaatccacaaacaggtagagttcatacaaaatttaatcctacaggtacagctacaggaagaataagtagtagtgaacctaatcttcagaatattcctataaaaagtgaagaaggtagaaagataagaagagccttcgtgtcagaagatggatattttcttgtatctcttgattattctcagatagagctaaggattatggctcatctttctcaggagcctaaattaatatctgccttccaaaaaggagaggatattcatagaagaacagcatcggagatttttggagtgccagaggaagaagttgatgatcttttaaggtcaagggcaaaggccgttaattttggaattatttatggtatctcttcttttggactttctgagactgtaagtattacaccagaagaggcagagaaatttatagactcgtattttaagcactatccaagagtgaagctttttatagataagactattcatgaggcaagagaaaaactgtacgttaaaaccttatttggcagaaaaagatatattcctgagattaagagcataaataaacaggtaaggaatgcctatcgtaggatagcaataaatgcgccaattcagggaacagctgctgatattataaaacttgccatgatagaaatttacaaggagattgaaaataaaaatctcaagtcaagaatactccttcaaattcatgatgagcttattcttgaagtgccagaggaggagatggaatttactcctttaatggcaaaggaaaaaatggaaaaggtggtagaactttcggttcctcttgtagttgaaatctcggtaggtaaaaatcttgctgaattaaaatgagctataagattggtcgac

SEQ ID NO: 2235 - DNA, 2673 bp, Artificial Sequence
  Description of Artificial Sequence: Synthetic DNA sequence of Dictyoglomus thermophilum DNA E796N
atgaaatacctgctgccgaccgctgctgctggtctgctgctcctcgctgcccagccggcgatggccatggatatcggaattaattcggatccgaaatctctgtgggatctttttcaagaaaataccgagaaagagtccaaaaggaagattctgattattgatggctcaagcctcatatacagggtttattacgcccttccccctttaaagacaaaaaatggtgaattaactaatgctctttatggcttcataagaatacttttaaaggccgtagaagattttaatcctgatcttgtaggcgttgcctttgatagacctgaacctacttttaggcatgtgatttataaagagtataaggctaagagaccacctatgaaggatgatttgaaagcgcagataccatggataagagaatttctaaggttaaatgatatacctctattggaagagcctggctatgaagcggatgatataatagctactatagtgaataaatataaggatgatttaaaatatattctctctggagatttagatcttttgcaattagtctcggacaaaacctttctaatacatcctcaaaagggaattactgagtttactatttatgatccaaaagctgtaaaggataggtttggagtagagccctataagattcccttatacaaagtattagtaggggacgaatctgataatattccaggagtaaatggaataggtcctaaaaaggcctcaaagattcttgagaaaatttcaagtgtagatgaatttaaaagtaaaataaaagttttggatagtgatttaagggagcttattgagaaaaattggaatattattgaaagaaatttagaacttgttactttaaaaaatatagataaggatcttattcttaaacccttcgagattaaaagagatgaaaaagtaatagattttttgaagagatatgaacttaagagtattcttcaaaagttatttcctgatcttcaagaggaagaaaatatagagattaaagatgtcgaagagatcaattttaatgaggtagaaaaagaaggctactttgcctttaaatgtcttggagatagggcttttgagggtatttctctttccttcaaggagggggaaggatattttatatctccttttgatttcaataatgagataagaaagaagattgaaaatataatttcttcagagaatgttaaaaaaattggctcttatattcaaagagatttacattttttaaactgtaaaataaagggcgatgtatttgatgttagtctcgcatcttatcttttgaaccctgaaagacaaaatcactctcttgatattttgataggagagtatctaaataaaacctcttttattcctcaaaaatacgctggttatctttttccgttaaagtctattcttgaggagaggataaagaatgaagggttagaatttgtactttataacatagagattccattaatccctgtactttactccatggagaagtgggggataaaggtagataaggaatatttaaaacagctttctgatgaattctgcgagagaattaaaaaattggaagaagagatatatgaacttgcaggaaccagatttaatctcaattctccaaaacaactttctgaagttttatttgagaggttaaaacttccttctggtaagaaaggaaaaacaggatattctacgtcgtcttctgtgcttcaaaacttaataaatgctcatcctatagtgagaaaaatcctccaatatagagaactctataaattgaagagtacttatgtggatgctattcctaatctggttaatccacaaacaggtagagttcatacaaaatttaatcctacaggtacagctacaggaagaataagtagtagtgaacctaatcttcagaatattcctataaaaagtgaagaaggtagaaagataagaagagccttcgtgtcagaagatggatattttcttgtatctcttgattattctcagatagagctaaggattatggctcatctttctcaggagcctaaattaatatctgccttccaaaaaggagaggatattcatagaagaacagcatcggagatttttggagtgccagaggaagaagttgatgatcttttaaggtcaagggcaaaggccgttaattttggaattatttatggtatctcttcttttggactttctgagactgtaagtattacaccagaagaggcagagaaatttatagactcgtattttaagcactatccaagagtgaagctttttatagataagactattcatgaggcaagagaaaaactgtacgttaaaaccttatttggcagaaaaagatatattcctgagattaagagcataaataaacaggtaaggaatgcctataataggatagcaataaatgcgccaattcagggaacagctgctgatattataaaacttgccatgatagaaatttacaaggagattgaaaataaaaatctcaagtcaagaatactccttcaaattcatgatgagcttattcttgaagtgccagaggaggagatggaatttactcctttaatggcaaaggaaaaaatggaaaaggtggtagaactttcggttcctcttgtagttgaaatctcggtaggtaaaaatcttgctgaattaaaatgagctataagattggtcgac

SEQ ID NO: 2236 - DNA, 2673 bp, Artificial Sequence
  Description of Artificial Sequence: Synthetic DNA sequence of Dictyoglomus thermophilum DNA E796D
atgaaatacctgctgccgaccgctgctgctggtctgctgctcctcgctgcccagccggcgatggccatggatatcggaattaattcggatccgaaatctctgtgggatctttttcaagaaaataccgagaaagagtccaaaaggaagattctgattattgatggctcaagcctcatatacagggtttattacgcccttccccctttaaagacaaaaaatggtgaattaactaatgctctttatggcttcataagaatacttttaaaggccgtagaagattttaatcctgatcttgtaggcgttgcctttgatagacctgaacctacttttaggcatgtgatttataaagagtataaggctaagagaccacctatgaaggatgatttgaaagcgcagataccatggataagagaatttctaaggttaaatgatatacctctattggaagagcctggctatgaagcggatgatataatagctactatagtgaataaatataaggatgatttaaaatatattctctctggagatttagatcttttgcaattagtctcggacaaaacctttctaatacatcctcaaaagggaattactgagtttactatttatgatccaaaagctgtaaaggataggtttggagtagagccctataagattcccttatacaaagtattagtaggggacgaatctgataatattccaggagtaaatggaataggtcctaaaaaggcctcaaagattcttgagaaaatttcaagtgtagatgaatttaaaagtaaaataaaagttttggatagtgatttaagggagcttattgagaaaaattggaatattattgaaagaaatttagaacttgttactttaaaaaatatagataaggatcttattcttaaacccttcgagattaaaagagatgaaaaagtaatagattttttgaagagatatgaacttaagagtattcttcaaaagttatttcctgatcttcaagaggaagaaaatatagagattaaagatgtcgaagagatcaattttaatgaggtagaaaaagaaggctactttgcctttaaatgtcttggagatagggcttttgagggtatttctctttccttcaaggagggggaaggatattttatatctccttttgatttcaataatgagataagaaagaagattgaaaatataatttcttcagagaatgttaaaaaaattggctcttatattcaaagagatttacattttttaaactgtaaaataaagggcgatgtatttgatgttagtctcgcatcttatcttttgaaccctgaaagacaaaatcactctcttgatattttgataggagagtatctaaataaaacctcttttattcctcaaaaatacgctggttatctttttccgttaaagtctattcttgaggagaggataaagaatgaagggttagaatttgtactttataacatagagattccattaatccctgtactttactccatggagaagtgggggataaaggtagataaggaatatttaaaacagctttctgatgaattctgcgagagaattaaaaaattggaagaagagatatatgaacttgcaggaaccagatttaatctcaattctccaaaacaactttctgaagttttatttgagaggttaaaacttccttctggtaagaaaggaaaaacaggatattctacgtcgtcttctgtgcttcaaaacttaataaatgctcatcctatagtgagaaaaatcctccaatatagagaactctataaattgaagagtacttatgtggatgctattcctaatctggttaatccacaaacaggtagagttcatacaaaatttaatcctacaggtacagctacaggaagaataagtagtagtgaacctaatcttcagaatattcctataaaaagtgaagaaggtagaaagataagaagagccttcgtgtcagaagatggatattttcttgtatctcttgattattctcagatagagctaaggattatggctcatctttctcaggagcctaaattaatatctgccttccaaaaaggagaggatattcatagaagaacagcatcggagatttttggagtgccagaggaagaagttgatgatcttttaaggtcaagggcaaaggccgttaattttggaattatttatggtatctcttcttttggactttctgagactgtaagtattacaccagaagaggcagagaaatttatagactcgtattttaagcactatccaagagtgaagctttttatagataagactattcatgaggcaagagaaaaactgtacgttaaaaccttatttggcagaaaaagatatattcctgagattaagagcataaataaacaggtaaggaatgcctatgataggatagcaataaatgcgccaattcagggaacagctgctgatattataaaacttgccatgatagaaatttacaaggagattgaaaataaaaatctcaagtcaagaatactccttcaaattcatgatgagcttattcttgaagtgccagaggaggagatggaatttactcctttaatggcaaaggaaaaaatggaaaaggtggtagaactttcggttcctcttgtagttgaaatctcggtaggtaaaaatcttgctgaattaaaatgagctataagattggtcgac

SEQ ID NO: 2237 - DNA, 2673 bp, Artificial Sequence
  Description of Artificial Sequence: Synthetic DNA sequence of Dictyoglomus thermophilum DNA E796C
atgaaatacctgctgccgaccgctgctgctggtctgctgctcctcgctgcccagccggcgatggccatggatatcggaattaattcggatccgaaatctctgtgggatctttttcaagaaaataccgagaaagagtccaaaaggaagattctgattattgatggctcaagcctcatatacagggtttattacgcccttccccctttaaagacaaaaaatggtgaattaactaatgctctttatggcttcataagaatacttttaaaggccgtagaagattttaatcctgatcttgtaggcgttgcctttgatagacctgaacctacttttaggcatgtgatttataaagagtataaggctaagagaccacctatgaaggatgatttgaaagcgcagataccatggataagagaatttctaaggttaaatgatatacctctattggaagagcctggctatgaagcggatgatataatagctactatagtgaataaatataaggatgatttaaaatatattctctctggagatttagatcttttgcaattagtctcggacaaaacctttctaatacatcctcaaaagggaattactgagtttactatttatgatccaaaagctgtaaaggataggtttggagtagagccctataagattcccttatacaaagtattagtaggggacgaatctgataatattccaggagtaaatggaataggtcctaaaaaggcctcaaagattcttgagaaaatttcaagtgtagatgaatttaaaagtaaaataaaagttttggatagtgatttaagggagcttattgagaaaaattggaatattattgaaagaaatttagaacttgttactttaaaaaatatagataaggatcttattcttaaacccttcgagattaaaagagatgaaaaagtaatagattttttgaagagatatgaacttaagagtattcttcaaaagttatttcctgatcttcaagaggaagaaaatatagagattaaagatgtcgaagagatcaattttaatgaggtagaaaaagaaggctactttgcctttaaatgtcttggagatagggcttttgagggtatttctctttccttcaaggagggggaaggatattttatatctccttttgatttcaataatgagataagaaagaagattgaaaatataatttcttcagagaatgttaaaaaaattggctcttatattcaaagagatttacattttttaaactgtaaaataaagggcgatgtatttgatgttagtctcgcatcttatcttttgaaccctgaaagacaaaatcactctcttgatattttgataggagagtatctaaataaaacctcttttattcctcaaaaatacgctggttatctttttccgttaaagtctattcttgaggagaggataaagaatgaagggttagaatttgtactttataacatagagattccattaatccctgtactttactccatggagaagtgggggataaaggtagataaggaatatttaaaacagctttctgatgaattctgcgagagaattaaaaaattggaagaagagatatatgaacttgcaggaaccagatttaatctcaattctccaaaacaactttctgaagttttatttgagaggttaaaacttccttctggtaagaaaggaaaaacaggatattctacgtcgtcttctgtgcttcaaaacttaataaatgctcatcctatagtgagaaaaatcctccaatatagagaactctataaattgaagagtacttatgtggatgctattcctaatctggttaatccacaaacaggtagagttcatacaaaatttaatcctacaggtacagctacaggaagaataagtagtagtgaacctaatcttcagaatattcctataaaaagtgaagaaggtagaaagataagaagagccttcgtgtcagaagatggatattttcttgtatctcttgattattctcagatagagctaaggattatggctcatctttctcaggagcctaaattaatatctgccttccaaaaaggagaggatattcatagaagaacagcatcggagatttttggagtgccagaggaagaagttgatgatcttttaaggtcaagggcaaaggccgttaattttggaattatttatggtatctcttcttttggactttctgagactgtaagtattacaccagaagaggcagagaaatttatagactcgtattttaagcactatccaagagtgaagctttttatagataagactattcatgaggcaagagaaaaactgtacgttaaaaccttatttggcagaaaaagatatattcctgagattaagagcataaataaacaggtaaggaatgcctattgtaggatagcaataaatgcgccaattcagggaacagctgctgatattataaaacttgccatgatagaaatttacaaggagattgaaaataaaaatctcaagtcaagaatactccttcaaattcatgatgagcttattcttgaagtgccagaggaggagatggaatttactcctttaatggcaaaggaaaaaatggaaaaggtggtagaactttcggttcctcttgtagttgaaatctcggtaggtaaaaatcttgctgaattaaaatgagctataagattggtcgac

SEQ ID NO: 2238 - DNA, 2673 bp, Artificial Sequence
  Description of Artificial Sequence: Synthetic DNA sequence of Dictyoglomus thermophilum DNA E796Q
atgaaatacctgctgccgaccgctgctgctggtctgctgctcctcgctgcccagccggcgatggccatggatatcggaattaattcggatccgaaatctctgtgggatctttttcaagaaaataccgagaaagagtccaaaaggaagattctgattattgatggctcaagcctcatatacagggtttattacgcccttccccctttaaagacaaaaaatggtgaattaactaatgctctttatggcttcataagaatacttttaaaggccgtagaagattttaatcctgatcttgtaggcgttgcctttgatagacctgaacctacttttaggcatgtgatttataaagagtataaggctaagagaccacctatgaaggatgatttgaaagcgcagataccatggataagagaatttctaaggttaaatgatatacctctattggaagagcctggctatgaagcggatgatataatagctactatagtgaataaatataaggatgatttaaaatatattctctctggagatttagatcttttgcaattagtctcggacaaaacctttctaatacatcctcaaaagggaattactgagtttactatttatgatccaaaagctgtaaaggataggtttggagtagagccctataagattcccttatacaaagtattagtaggggacgaatctgataatattccaggagtaaatggaataggtcctaaaaaggcctcaaagattcttgagaaaatttcaagtgtagatgaatttaaaagtaaaataaaagttttggatagtgatttaagggagcttattgagaaaaattggaatattattgaaagaaatttagaacttgttactttaaaaaatatagataaggatcttattcttaaacccttcgagattaaaagagatgaaaaagtaatagattttttgaagagatatgaacttaagagtattcttcaaaagttatttcctgatcttcaagaggaagaaaatatagagattaaagatgtcgaagagatcaattttaatgaggtagaaaaagaaggctactttgcctttaaatgtcttggagatagggcttttgagggtatttctctttccttcaaggagggggaaggatattttatatctccttttgatttcaataatgagataagaaagaagattgaaaatataatttcttcagagaatgttaaaaaaattggctcttatattcaaagagatttacattttttaaactgtaaaataaagggcgatgtatttgatgttagtctcgcatcttatcttttgaaccctgaaagacaaaatcactctcttgatattttgataggagagtatctaaataaaacctcttttattcctcaaaaatacgctggttatctttttccgttaaagtctattcttgaggagaggataaagaatgaagggttagaatttgtactttataacatagagattccattaatccctgtactttactccatggagaagtgggggataaaggtagataaggaatatttaaaacagctttctgatgaattctgcgagagaattaaaaaattggaagaagagatatatgaacttgcaggaaccagatttaatctcaattctccaaaacaactttctgaagttttatttgagaggttaaaacttccttctggtaagaaaggaaaaacaggatattctacgtcgtcttctgtgcttcaaaacttaataaatgctcatcctatagtgagaaaaatcctccaatatagagaactctataaattgaagagtacttatgtggatgctattcctaatctggttaatccacaaacaggtagagttcatacaaaatttaatcctacaggtacagctacaggaagaataagtagtagtgaacctaatcttcagaatattcctataaaaagtgaagaaggtagaaagataagaagagccttcgtgtcagaagatggatattttcttgtatctcttgattattctcagatagagctaaggattatggctcatctttctcaggagcctaaattaatatctgccttccaaaaaggagaggatattcatagaagaacagcatcggagatttttggagtgccagaggaagaagttgatgatcttttaaggtcaagggcaaaggccgttaattttggaattatttatggtatctcttcttttggactttctgagactgtaagtattacaccagaagaggcagagaaatttatagactcgtattttaagcactatccaagagtgaagctttttatagataagactattcatgaggcaagagaaaaactgtacgttaaaaccttatttggcagaaaaagatatattcctgagattaagagcataaataaacaggtaaggaatgcctatcaaaggatagcaataaatgcgccaattcagggaacagctgctgatattataaaacttgccatgatagaaatttacaaggagattgaaaataaaaatctcaagtcaagaatactccttcaaattcatgatgagcttattcttgaagtgccagaggaggagatggaatttactcctttaatggcaaaggaaaaaatggaaaaggtggtagaactttcggttcctcttgtagttgaaatctcggtaggtaaaaatcttgctgaattaaaatgagctataagattggtcgac

SEQ ID NO: 2239 - DNA, 2673 bp, Artificial Sequence
  Description of Artificial Sequence: Synthetic DNA sequence of Dictyoglomus thermophilum DNA E796G
atgaaatacctgctgccgaccgctgctgctggtctgctgctcctcgctgcccagccggcgatggccatggatatcggaattaattcggatccgaaatctctgtgggatctttttcaagaaaataccgagaaagagtccaaaaggaagattctgattattgatggctcaagcctcatatacagggtttattacgcccttccccctttaaagacaaaaaatggtgaattaactaatgctctttatggcttcataagaatacttttaaaggccgtagaagattttaatcctgatcttgtaggcgttgcctttgatagacctgaacctacttttaggcatgtgatttataaagagtataaggctaagagaccacctatgaaggatgatttgaaagcgcagataccatggataagagaatttctaaggttaaatgatatacctctattggaagagcctggctatgaagcggatgatataatagctactatagtgaataaatataaggatgatttaaaatatattctctctggagatttagatcttttgcaattagtctcggacaaaacctttctaatacatcctcaaaagggaattactgagtttactatttatgatccaaaagctgtaaaggataggtttggagtagagccctataagattcccttatacaaagtattagtaggggacgaatctgataatattccaggagtaaatggaataggtcctaaaaaggcctcaaagattcttgagaaaatttcaagtgtagatgaatttaaaagtaaaataaaagttttggatagtgatttaagggagcttattgagaaaaattggaatattattgaaagaaatttagaacttgttactttaaaaaatatagataaggatcttattcttaaacccttcgagattaaaagagatgaaaaagtaatagattttttgaagagatatgaacttaagagtattcttcaaaagttatttcctgatcttcaagaggaagaaaatatagagattaaagatgtcgaagagatcaattttaatgaggtagaaaaagaaggctactttgcctttaaatgtcttggagatagggcttttgagggtatttctctttccttcaaggagggggaaggatattttatatctccttttgatttcaataatgagataagaaagaagattgaaaatataatttcttcagagaatgttaaaaaaattggctcttatattcaaagagatttacattttttaaactgtaaaataaagggcgatgtatttgatgttagtctcgcatcttatcttttgaaccctgaaagacaaaatcactctcttgatattttgataggagagtatctaaataaaacctcttttattcctcaaaaatacgctggttatctttttccgttaaagtctattcttgaggagaggataaagaatgaagggttagaatttgtactttataacatagagattccattaatccctgtactttactccatggagaagtgggggataaaggtagataaggaatatttaaaacagctttctgatgaattctgcgagagaattaaaaaattggaagaagagatatatgaacttgcaggaaccagatttaatctcaattctccaaaacaactttctgaagttttatttgagaggttaaaacttccttctggtaagaaaggaaaaacaggatattctacgtcgtcttctgtgcttcaaaacttaataaatgctcatcctatagtgagaaaaatcctccaatatagagaactctataaattgaagagtacttatgtggatgctattcctaatctggttaatccacaaacaggtagagttcatacaaaatttaatcctacaggtacagctacaggaagaataagtagtagtgaacctaatcttcagaatattcctataaaaagtgaagaaggtagaaagataagaagagccttcgtgtcagaagatggatattttcttgtatctcttgattattctcagatagagctaaggattatggctcatctttctcaggagcctaaattaatatctgccttccaaaaaggagaggatattcatagaagaacagcatcggagatttttggagtgccagaggaagaagttgatgatcttttaaggtcaagggcaaaggccgttaattttggaattatttatggtatctcttcttttggactttctgagactgtaagtattacaccagaagaggcagagaaatttatagactcgtattttaagcactatccaagagtgaagctttttatagataagactattcatgaggcaagagaaaaactgtacgttaaaaccttatttggcagaaaaagatatattcctgagattaagagcataaataaacaggtaaggaatgcctatggtaggatagcaataaatgcgccaattcagggaacagctgctgatattataaaacttgccatgatagaaatttacaaggagattgaaaataaaaatctcaagtcaagaatactccttcaaattcatgatgagcttattcttgaagtgccagaggaggagatggaatttactcctttaatggcaaaggaaaaaatggaaaaggtggtagaactttcggttcctcttgtagttgaaatctcggtaggtaaaaatcttgctgaattaaaatgagctataagattggtcgac

SEQ ID NO: 2240 - DNA, 2673 bp, Artificial Sequence
  Description of Artificial Sequence: Synthetic DNA sequence of Dictyoglomus thermophilum DNA E796H
atgaaatacctgctgccgaccgctgctgctggtctgctgctcctcgctgcccagccggcgatggccatggatatcggaattaattcggatccgaaatctctgtgggatctttttcaagaaaataccgagaaagagtccaaaaggaagattctgattattgatggctcaagcctcatatacagggtttattacgcccttccccctttaaagacaaaaaatggtgaattaactaatgctctttatggcttcataagaatacttttaaaggccgtagaagattttaatcctgatcttgtaggcgttgcctttgatagacctgaacctacttttaggcatgtgatttataaagagtataaggctaagagaccacctatgaaggatgatttgaaagcgcagataccatggataagagaatttctaaggttaaatgatatacctctattggaagagcctggctatgaagcggatgatataatagctactatagtgaataaatataaggatgatttaaaatatattctctctggagatttagatcttttgcaattagtctcggacaaaacctttctaatacatcctcaaaagggaattactgagtttactatttatgatccaaaagctgtaaaggataggtttggagtagagccctataagattcccttatacaaagtattagtaggggacgaatctgataatattccaggagtaaatggaataggtcctaaaaaggcctcaaagattcttgagaaaatttcaagtgtagatgaatttaaaagtaaaataaaagttttggatagtgatttaagggagcttattgagaaaaattggaatattattgaaagaaatttagaacttgttactttaaaaaatatagataaggatcttattcttaaacccttcgagattaaaagagatgaaaaagtaatagattttttgaagagatatgaacttaagagtattcttcaaaagttatttcctgatcttcaagaggaagaaaatatagagattaaagatgtcgaagagatcaattttaatgaggtagaaaaagaaggctactttgcctttaaatgtcttggagatagggcttttgagggtatttctctttccttcaaggagggggaaggatattttatatctccttttgatttcaataatgagataagaaagaagattgaaaatataatttcttcagagaatgttaaaaaaattggctcttatattcaaagagatttacattttttaaactgtaaaataaagggcgatgtatttgatgttagtctcgcatcttatcttttgaaccctgaaagacaaaatcactctcttgatattttgataggagagtatctaaataaaacctcttttattcctcaaaaatacgctggttatctttttccgttaaagtctattcttgaggagaggataaagaatgaagggttagaatttgtactttataacatagagattccattaatccctgtactttactccatggagaagtgggggataaaggtagataaggaatatttaaaacagctttctgatgaattctgcgagagaattaaaaaattggaagaagagatatatgaacttgcaggaaccagatttaatctcaattctccaaaacaactttctgaagttttatttgagaggttaaaacttccttctggtaagaaaggaaaaacaggatattctacgtcgtcttctgtgcttcaaaacttaataaatgctcatcctatagtgagaaaaatcctccaatatagagaactctataaattgaagagtacttatgtggatgctattcctaatctggttaatccacaaacaggtagagttcatacaaaatttaatcctacaggtacagctacaggaagaataagtagtagtgaacctaatcttcagaatattcctataaaaagtgaagaaggtagaaagataagaagagccttcgtgtcagaagatggatattttcttgtatctcttgattattctcagatagagctaaggattatggctcatctttctcaggagcctaaattaatatctgccttccaaaaaggagaggatattcatagaagaacagcatcggagatttttggagtgccagaggaagaagttgatgatcttttaaggtcaagggcaaaggccgttaattttggaattatttatggtatctcttcttttggactttctgagactgtaagtattacaccagaagaggcagagaaatttatagactcgtattttaagcactatccaagagtgaagctttttatagataagactattcatgaggcaagagaaaaactgtacgttaaaaccttatttggcagaaaaagatatattcctgagattaagagcataaataaacaggtaaggaatgcctatcataggatagcaataaatgcgccaattcagggaacagctgctgatattataaaacttgccatgatagaaatttacaaggagattgaaaataaaaatctcaagtcaagaatactccttcaaattcatgatgagcttattcttgaagtgccagaggaggagatggaatttactcctttaatggcaaaggaaaaaatggaaaaggtggtagaactttcggttcctcttgtagttgaaatctcggtaggtaaaaatcttgctgaattaaaatgagctataagattggtcgac

SEQ ID NO: 2241 - DNA, 2673 bp, Artificial Sequence
  Description of Artificial Sequence: Synthetic DNA sequence of Dictyoglomus thermophilum DNA E796I
atgaaatacctgctgccgaccgctgctgctggtctgctgctcctcgctgcccagccggcgatggccatggatatcggaattaattcggatccgaaatctctgtgggatctttttcaagaaaataccgagaaagagtccaaaaggaagattctgattattgatggctcaagcctcatatacagggtttattacgcccttccccctttaaagacaaaaaatggtgaattaactaatgctctttatggcttcataagaatacttttaaaggccgtagaagattttaatcctgatcttgtaggcgttgcctttgatagacctgaacctacttttaggcatgtgatttataaagagtataaggctaagagaccacctatgaaggatgatttgaaagcgcagataccatggataagagaatttctaaggttaaatgatatacctctattggaagagcctggctatgaagcggatgatataatagctactatagtgaataaatataaggatgatttaaaatatattctctctggagatttagatcttttgcaattagtctcggacaaaacctttctaatacatcctcaaaagggaattactgagtttactatttatgatccaaaagctgtaaaggataggtttggagtagagccctataagattcccttatacaaagtattagtaggggacgaatctgataatattccaggagtaaatggaataggtcctaaaaaggcctcaaagattcttgagaaaatttcaagtgtagatgaatttaaaagtaaaataaaagttttggatagtgatttaagggagcttattgagaaaaattggaatattattgaaagaaatttagaacttgttactttaaaaaatatagataaggatcttattcttaaacccttcgagattaaaagagatgaaaaagtaatagattttttgaagagatatgaacttaagagtattcttcaaaagttatttcctgatcttcaagaggaagaaaatatagagattaaagatgtcgaagagatcaattttaatgaggtagaaaaagaaggctactttgcctttaaatgtcttggagatagggcttttgagggtatttctctttccttcaaggagggggaaggatattttatatctccttttgatttcaataatgagataagaaagaagattgaaaatataatttcttcagagaatgttaaaaaaattggctcttatattcaaagagatttacattttttaaactgtaaaataaagggcgatgtatttgatgttagtctcgcatcttatcttttgaaccctgaaagacaaaatcactctcttgatattttgataggagagtatctaaataaaacctcttttattcctcaaaaatacgctggttatctttttccgttaaagtctattcttgaggagaggataaagaatgaagggttagaatttgtactttataacatagagattccattaatccctgtactttactccatggagaagtgggggataaaggtagataaggaatatttaaaacagctttctgatgaattctgcgagagaattaaaaaattggaagaagagatatatgaacttgcaggaaccagatttaatctcaattctccaaaacaactttctgaagttttatttgagaggttaaaacttccttctggtaagaaaggaaaaacaggatattctacgtcgtcttctgtgcttcaaaacttaataaatgctcatcctatagtgagaaaaatcctccaatatagagaactctataaattgaagagtacttatgtggatgctattcctaatctggttaatccacaaacaggtagagttcatacaaaatttaatcctacaggtacagctacaggaagaataagtagtagtgaacctaatcttcagaatattcctataaaaagtgaagaaggtagaaagataagaagagccttcgtgtcagaagatggatattttcttgtatctcttgattattctcagatagagctaaggattatggctcatctttctcaggagcctaaattaatatctgccttccaaaaaggagaggatattcatagaagaacagcatcggagatttttggagtgccagaggaagaagttgatgatcttttaaggtcaagggcaaaggccgttaattttggaattatttatggtatctcttcttttggactttctgagactgtaagtattacaccagaagaggcagagaaatttatagactcgtattttaagcactatccaagagtgaagctttttatagataagactattcatgaggcaagagaaaaactgtacgttaaaaccttatttggcagaaaaagatatattcctgagattaagagcataaataaacaggtaaggaatgcctatattaggatagcaataaatgcgccaattcagggaacagctgctgatattataaaacttgccatgatagaaatttacaaggagattgaaaataaaaatctcaagtcaagaatactccttcaaattcatgatgagcttattcttgaagtgccagaggaggagatggaatttactcctttaatggcaaaggaaaaaatggaaaaggtggtagaactttcggttcctcttgtagttgaaatctcggtaggtaaaaatcttgctgaattaaaatgagctataagattggtcgac

SEQ ID NO: 2242 - DNA, 2673 bp, Artificial Sequence
  Description of Artificial Sequence: Synthetic DNA sequence of Dictyoglomus thermophilum DNA E796L
atgaaatacctgctgccgaccgctgctgctggtctgctgctcctcgctgcccagccggcgatggccatggatatcggaattaattcggatccgaaatctctgtgggatctttttcaagaaaataccgagaaagagtccaaaaggaagattctgattattgatggctcaagcctcatatacagggtttattacgcccttccccctttaaagacaaaaaatggtgaattaactaatgctctttatggcttcataagaatacttttaaaggccgtagaagattttaatcctgatcttgtaggcgttgcctttgatagacctgaacctacttttaggcatgtgatttataaagagtataaggctaagagaccacctatgaaggatgatttgaaagcgcagataccatggataagagaatttctaaggttaaatgatatacctctattggaagagcctggctatgaagcggatgatataatagctactatagtgaataaatataaggatgatttaaaatatattctctctggagatttagatcttttgcaattagtctcggacaaaacctttctaatacatcctcaaaagggaattactgagtttactatttatgatccaaaagctgtaaaggataggtttggagtagagccctataagattcccttatacaaagtattagtaggggacgaatctgataatattccaggagtaaatggaataggtcctaaaaaggcctcaaagattcttgagaaaatttcaagtgtagatgaatttaaaagtaaaataaaagttttggatagtgatttaagggagcttattgagaaaaattggaatattattgaaagaaatttagaacttgttactttaaaaaatatagataaggatcttattcttaaacccttcgagattaaaagagatgaaaaagtaatagattttttgaagagatatgaacttaagagtattcttcaaaagttatttcctgatcttcaagaggaagaaaatatagagattaaagatgtcgaagagatcaattttaatgaggtagaaaaagaaggctactttgcctttaaatgtcttggagatagggcttttgagggtatttctctttccttcaaggagggggaaggatattttatatctccttttgatttcaataatgagataagaaagaagattgaaaatataatttcttcagagaatgttaaaaaaattggctcttatattcaaagagatttacattttttaaactgtaaaataaagggcgatgtatttgatgttagtctcgcatcttatcttttgaaccctgaaagacaaaatcactctcttgatattttgataggagagtatctaaataaaacctcttttattcctcaaaaatacgctggttatctttttccgttaaagtctattcttgaggagaggataaagaatgaagggttagaatttgtactttataacatagagattccattaatccctgtactttactccatggagaagtgggggataaaggtagataaggaatatttaaaacagctttctgatgaattctgcgagagaattaaaaaattggaagaagagatatatgaacttgcaggaaccagatttaatctcaattctccaaaacaactttctgaagttttatttgagaggttaaaacttccttctggtaagaaaggaaaaacaggatattctacgtcgtcttctgtgcttcaaaacttaataaatgctcatcctatagtgagaaaaatcctccaatatagagaactctataaattgaagagtacttatgtggatgctattcctaatctggttaatccacaaacaggtagagttcatacaaaatttaatcctacaggtacagctacaggaagaataagtagtagtgaacctaatcttcagaatattcctataaaaagtgaagaaggtagaaagataagaagagccttcgtgtcagaagatggatattttcttgtatctcttgattattctcagatagagctaaggattatggctcatctttctcaggagcctaaattaatatctgccttccaaaaaggagaggatattcatagaagaacagcatcggagatttttggagtgccagaggaagaagttgatgatcttttaaggtcaagggcaaaggccgttaattttggaattatttatggtatctcttcttttggactttctgagactgtaagtattacaccagaagaggcagagaaatttatagactcgtattttaagcactatccaagagtgaagctttttatagataagactattcatgaggcaagagaaaaactgtacgttaaaaccttatttggcagaaaaagatatattcctgagattaagagcataaataaacaggtaaggaatgcctatcttaggatagcaataaatgcgccaattcagggaacagctgctgatattataaaacttgccatgatagaaatttacaaggagattgaaaataaaaatctcaagtcaagaatactccttcaaattcatgatgagcttattcttgaagtgccagaggaggagatggaatttactcctttaatggcaaaggaaaaaatggaaaaggtggtagaactttcggttcctcttgtagttgaaatctcggtaggtaaaaatcttgctgaattaaaatgagctataagattggtcgac

SEQ ID NO: 2243 - DNA, 2673 bp, Artificial Sequence
  Description of Artificial Sequence: Synthetic DNA sequence of Dictyoglomus thermophilum DNA E796K
atgaaatacctgctgccgaccgctgctgctggtctgctgctcctcgctgcccagccggcgatggccatggatatcggaattaattcggatccgaaatctctgtgggatctttttcaagaaaataccgagaaagagtccaaaaggaagattctgattattgatggctcaagcctcatatacagggtttattacgcccttccccctttaaagacaaaaaatggtgaattaactaatgctctttatggcttcataagaatacttttaaaggccgtagaagattttaatcctgatcttgtaggcgttgcctttgatagacctgaacctacttttaggcatgtgatttataaagagtataaggctaagagaccacctatgaaggatgatttgaaagcgcagataccatggataagagaatttctaaggttaaatgatatacctctattggaagagcctggctatgaagcggatgatataatagctactatagtgaataaatataaggatgatttaaaatatattctctctggagatttagatcttttgcaattagtctcggacaaaacctttctaatacatcctcaaaagggaattactgagtttactatttatgatccaaaagctgtaaaggataggtttggagtagagccctataagattcccttatacaaagtattagtaggggacgaatctgataatattccaggagtaaatggaataggtcctaaaaaggcctcaaagattcttgagaaaatttcaagtgtagatgaatttaaaagtaaaataaaagttttggatagtgatttaagggagcttattgagaaaaattggaatattattgaaagaaatttagaacttgttactttaaaaaatatagataaggatcttattcttaaacccttcgagattaaaagagatgaaaaagtaatagattttttgaagagatatgaacttaagagtattcttcaaaagttatttcctgatcttcaagaggaagaaaatatagagattaaagatgtcgaagagatcaattttaatgaggtagaaaaagaaggctactttgcctttaaatgtcttggagatagggcttttgagggtatttctctttccttcaaggagggggaaggatattttatatctccttttgatttcaataatgagataagaaagaagattgaaaatataatttcttcagagaatgttaaaaaaattggctcttatattcaaagagatttacattttttaaactgtaaaataaagggcgatgtatttgatgttagtctcgcatcttatcttttgaaccctgaaagacaaaatcactctcttgatattttgataggagagtatctaaataaaacctcttttattcctcaaaaatacgctggttatctttttccgttaaagtctattcttgaggagaggataaagaatgaagggttagaatttgtactttataacatagagattccattaatccctgtactttactccatggagaagtgggggataaaggtagataaggaatatttaaaacagctttctgatgaattctgcgagagaattaaaaaattggaagaagagatatatgaacttgcaggaaccagatttaatctcaattctccaaaacaactttctgaagttttatttgagaggttaaaacttccttctggtaagaaaggaaaaacaggatattctacgtcgtcttctgtgcttcaaaacttaataaatgctcatcctatagtgagaaaaatcctccaatatagagaactctataaattgaagagtacttatgtggatgctattcctaatctggttaatccacaaacaggtagagttcatacaaaatttaatcctacaggtacagctacaggaagaataagtagtagtgaacctaatcttcagaatattcctataaaaagtgaagaaggtagaaagataagaagagccttcgtgtcagaagatggatattttcttgtatctcttgattattctcagatagagctaaggattatggctcatctttctcaggagcctaaattaatatctgccttccaaaaaggagaggatattcatagaagaacagcatcggagatttttggagtgccagaggaagaagttgatgatcttttaaggtcaagggcaaaggccgttaattttggaattatttatggtatctcttcttttggactttctgagactgtaagtattacaccagaagaggcagagaaatttatagactcgtattttaagcactatccaagagtgaagctttttatagataagactattcatgaggcaagagaaaaactgtacgttaaaaccttatttggcagaaaaagatatattcctgagattaagagcataaataaacaggtaaggaatgcctataaaaggatagcaataaatgcgccaattcagggaacagctgctgatattataaaacttgccatgatagaaatttacaaggagattgaaaataaaaatctcaagtcaagaatactccttcaaattcatgatgagcttattcttgaagtgccagaggaggagatggaatttactcctttaatggcaaaggaaaaaatggaaaaggtggtagaactttcggttcctcttgtagttgaaatctcggtaggtaaaaatcttgctgaattaaaatgagctataagattggtcgac

SEQ ID NO: 2244 - DNA, 2673 bp, Artificial Sequence
  Description of Artificial Sequence: Synthetic DNA sequence of Dictyoglomus thermophilum DNA E796M
atgaaatacctgctgccgaccgctgctgctggtctgctgctcctcgctgcccagccggcgatggccatggatatcggaattaattcggatccgaaatctctgtgggatctttttcaagaaaataccgagaaagagtccaaaaggaagattctgattattgatggctcaagcctcatatacagggtttattacgcccttccccctttaaagacaaaaaatggtgaattaactaatgctctttatggcttcataagaatacttttaaaggccgtagaagattttaatcctgatcttgtaggcgttgcctttgatagacctgaacctacttttaggcatgtgatttataaagagtataaggctaagagaccacctatgaaggatgatttgaaagcgcagataccatggataagagaatttctaaggttaaatgatatacctctattggaagagcctggctatgaagcggatgatataatagctactatagtgaataaatataaggatgatttaaaatatattctctctggagatttagatcttttgcaattagtctcggacaaaacctttctaatacatcctcaaaagggaattactgagtttactatttatgatccaaaagctgtaaaggataggtttggagtagagccctataagattcccttatacaaagtattagtaggggacgaatctgataatattccaggagtaaatggaataggtcctaaaaaggcctcaaagattcttgagaaaatttcaagtgtagatgaatttaaaagtaaaataaaagttttggatagtgatttaagggagcttattgagaaaaattggaatattattgaaagaaatttagaacttgttactttaaaaaatatagataaggatcttattcttaaacccttcgagattaaaagagatgaaaaagtaatagattttttgaagagatatgaacttaagagtattcttcaaaagttatttcctgatcttcaagaggaagaaaatatagagattaaagatgtcgaagagatcaattttaatgaggtagaaaaagaaggctactttgcctttaaatgtcttggagatagggcttttgagggtatttctctttccttcaaggagggggaaggatattttatatctccttttgatttcaataatgagataagaaagaagattgaaaatataatttcttcagagaatgttaaaaaaattggctcttatattcaaagagatttacattttttaaactgtaaaataaagggcgatgtatttgatgttagtctcgcatcttatcttttgaaccctgaaagacaaaatcactctcttgatattttgataggagagtatctaaataaaacctcttttattcctcaaaaatacgctggttatctttttccgttaaagtctattcttgaggagaggataaagaatgaagggttagaatttgtactttataacatagagattccattaatccctgtactttactccatggagaagtgggggataaaggtagataaggaatatttaaaacagctttctgatgaattctgcgagagaattaaaaaattggaagaagagatatatgaacttgcaggaaccagatttaatctcaattctccaaaacaactttctgaagttttatttgagaggttaaaacttccttctggtaagaaaggaaaaacaggatattctacgtcgtcttctgtgcttcaaaacttaataaatgctcatcctatagtgagaaaaatcctccaatatagagaactctataaattgaagagtacttatgtggatgctattcctaatctggttaatccacaaacaggtagagttcatacaaaatttaatcctacaggtacagctacaggaagaataagtagtagtgaacctaatcttcagaatattcctataaaaagtgaagaaggtagaaagataagaagagccttcgtgtcagaagatggatattttcttgtatctcttgattattctcagatagagctaaggattatggctcatctttctcaggagcctaaattaatatctgccttccaaaaaggagaggatattcatagaagaacagcatcggagatttttggagtgccagaggaagaagttgatgatcttttaaggtcaagggcaaaggccgttaattttggaattatttatggtatctcttcttttggactttctgagactgtaagtattacaccagaagaggcagagaaatttatagactcgtattttaagcactatccaagagtgaagctttttatagataagactattcatgaggcaagagaaaaactgtacgttaaaaccttatttggcagaaaaagatatattcctgagattaagagcataaataaacaggtaaggaatgcctatatgaggatagcaataaatgcgccaattcagggaacagctgctgatattataaaacttgccatgatagaaatttacaaggagattgaaaataaaaatctcaagtcaagaatactccttcaaattcatgatgagcttattcttgaagtgccagaggaggagatggaatttactcctttaatggcaaaggaaaaaatggaaaaggtggtagaactttcggttcctcttgtagttgaaatctcggtaggtaaaaatcttgctgaattaaaatgagctataagattggtcgac

SEQ ID NO: 2245 - DNA, 2673 bp, Artificial Sequence
  Description of Artificial Sequence: Synthetic DNA sequence of Dictyoglomus thermophilum DNA E796F
atgaaatacctgctgccgaccgctgctgctggtctgctgctcctcgctgcccagccggcgatggccatggatatcggaattaattcggatccgaaatctctgtgggatctttttcaagaaaataccgagaaagagtccaaaaggaagattctgattattgatggctcaagcctcatatacagggtttattacgcccttccccctttaaagacaaaaaatggtgaattaactaatgctctttatggcttcataagaatacttttaaaggccgtagaagattttaatcctgatcttgtaggcgttgcctttgatagacctgaacctacttttaggcatgtgatttataaagagtataaggctaagagaccacctatgaaggatgatttgaaagcgcagataccatggataagagaatttctaaggttaaatgatatacctctattggaagagcctggctatgaagcggatgatataatagctactatagtgaataaatataaggatgatttaaaatatattctctctggagatttagatcttttgcaattagtctcggacaaaacctttctaatacatcctcaaaagggaattactgagtttactatttatgatccaaaagctgtaaaggataggtttggagtagagccctataagattcccttatacaaagtattagtaggggacgaatctgataatattccaggagtaaatggaataggtcctaaaaaggcctcaaagattcttgagaaaatttcaagtgtagatgaatttaaaagtaaaataaaagttttggatagtgatttaagggagcttattgagaaaaattggaatattattgaaagaaatttagaacttgttactttaaaaaatatagataaggatcttattcttaaacccttcgagattaaaagagatgaaaaagtaatagattttttgaagagatatgaacttaagagtattcttcaaaagttatttcctgatcttcaagaggaagaaaatatagagattaaagatgtcgaagagatcaattttaatgaggtagaaaaagaaggctactttgcctttaaatgtcttggagatagggcttttgagggtatttctctttccttcaaggagggggaaggatattttatatctccttttgatttcaataatgagataagaaagaagattgaaaatataatttcttcagagaatgttaaaaaaattggctcttatattcaaagagatttacattttttaaactgtaaaataaagggcgatgtatttgatgttagtctcgcatcttatcttttgaaccctgaaagacaaaatcactctcttgatattttgataggagagtatctaaataaaacctcttttattcctcaaaaatacgctggttatctttttccgttaaagtctattcttgaggagaggataaagaatgaagggttagaatttgtactttataacatagagattccattaatccctgtactttactccatggagaagtgggggataaaggtagataaggaatatttaaaacagctttctgatgaattctgcgagagaattaaaaaattggaagaagagatatatgaacttgcaggaaccagatttaatctcaattctccaaaacaactttctgaagttttatttgagaggttaaaacttccttctggtaagaaaggaaaaacaggatattctacgtcgtcttctgtgcttcaaaacttaataaatgctcatcctatagtgagaaaaatcctccaatatagagaactctataaattgaagagtacttatgtggatgctattcctaatctggttaatccacaaacaggtagagttcatacaaaatttaatcctacaggtacagctacaggaagaataagtagtagtgaacctaatcttcagaatattcctataaaaagtgaagaaggtagaaagataagaagagccttcgtgtcagaagatggatattttcttgtatctcttgattattctcagatagagctaaggattatggctcatctttctcaggagcctaaattaatatctgccttccaaaaaggagaggatattcatagaagaacagcatcggagatttttggagtgccagaggaagaagttgatgatcttttaaggtcaagggcaaaggccgttaattttggaattatttatggtatctcttcttttggactttctgagactgtaagtattacaccagaagaggcagagaaatttatagactcgtattttaagcactatccaagagtgaagctttttatagataagactattcatgaggcaagagaaaaactgtacgttaaaaccttatttggcagaaaaagatatattcctgagattaagagcataaataaacaggtaaggaatgcctattttaggatagcaataaatgcgccaattcagggaacagctgctgatattataaaacttgccatgatagaaatttacaaggagattgaaaataaaaatctcaagtcaagaatactccttcaaattcatgatgagcttattcttgaagtgccagaggaggagatggaatttactcctttaatggcaaaggaaaaaatggaaaaggtggtagaactttcggttcctcttgtagttgaaatctcggtaggtaaaaatcttgctgaattaaaatgagctataagattggtcgac

SEQ ID NO: 2246 - DNA, 2673 bp, Artificial Sequence
  Description of Artificial Sequence: Synthetic DNA sequence of Dictyoglomus thermophilum DNA E796P
atgaaatacctgctgccgaccgctgctgctggtctgctgctcctcgctgcccagccggcgatggccatggatatcggaattaattcggatccgaaatctctgtgggatctttttcaagaaaataccgagaaagagtccaaaaggaagattctgattattgatggctcaagcctcatatacagggtttattacgcccttccccctttaaagacaaaaaatggtgaattaactaatgctctttatggcttcataagaatacttttaaaggccgtagaagattttaatcctgatcttgtaggcgttgcctttgatagacctgaacctacttttaggcatgtgatttataaagagtataaggctaagagaccacctatgaaggatgatttgaaagcgcagataccatggataagagaatttctaaggttaaatgatatacctctattggaagagcctggctatgaagcggatgatataatagctactatagtgaataaatataaggatgatttaaaatatattctctctggagatttagatcttttgcaattagtctcggacaaaacctttctaatacatcctcaaaagggaattactgagtttactatttatgatccaaaagctgtaaaggataggtttggagtagagccctataagattcccttatacaaagtattagtaggggacgaatctgataatattccaggagtaaatggaataggtcctaaaaaggcctcaaagattcttgagaaaatttcaagtgtagatgaatttaaaagtaaaataaaagttttggatagtgatttaagggagcttattgagaaaaattggaatattattgaaagaaatttagaacttgttactttaaaaaatatagataaggatcttattcttaaacccttcgagattaaaagagatgaaaaagtaatagattttttgaagagatatgaacttaagagtattcttcaaaagttatttcctgatcttcaagaggaagaaaatatagagattaaagatgtcgaagagatcaattttaatgaggtagaaaaagaaggctactttgcctttaaatgtcttggagatagggcttttgagggtatttctctttccttcaaggagggggaaggatattttatatctccttttgatttcaataatgagataagaaagaagattgaaaatataatttcttcagagaatgttaaaaaaattggctcttatattcaaagagatttacattttttaaactgtaaaataaagggcgatgtatttgatgttagtctcgcatcttatcttttgaaccctgaaagacaaaatcactctcttgatattttgataggagagtatctaaataaaacctcttttattcctcaaaaatacgctggttatctttttccgttaaagtctattcttgaggagaggataaagaatgaagggttagaatttgtactttataacatagagattccattaatccctgtactttactccatggagaagtgggggataaaggtagataaggaatatttaaaacagctttctgatgaattctgcgagagaattaaaaaattggaagaagagatatatgaacttgcaggaaccagatttaatctcaattctccaaaacaactttctgaagttttatttgagaggttaaaacttccttctggtaagaaaggaaaaacaggatattctacgtcgtcttctgtgcttcaaaacttaataaatgctcatcctatagtgagaaaaatcctccaatatagagaactctataaattgaagagtacttatgtggatgctattcctaatctggttaatccacaaacaggtagagttcatacaaaatttaatcctacaggtacagctacaggaagaataagtagtagtgaacctaatcttcagaatattcctataaaaagtgaagaaggtagaaagataagaagagccttcgtgtcagaagatggatattttcttgtatctcttgattattctcagatagagctaaggattatggctcatctttctcaggagcctaaattaatatctgccttccaaaaaggagaggatattcatagaagaacagcatcggagatttttggagtgccagaggaagaagttgatgatcttttaaggtcaagggcaaaggccgttaattttggaattatttatggtatctcttcttttggactttctgagactgtaagtattacaccagaagaggcagagaaatttatagactcgtattttaagcactatccaagagtgaagctttttatagataagactattcatgaggcaagagaaaaactgtacgttaaaaccttatttggcagaaaaagatatattcctgagattaagagcataaataaacaggtaaggaatgcctatcctaggatagcaataaatgcgccaattcagggaacagctgctgatattataaaacttgccatgatagaaatttacaaggagattgaaaataaaaatctcaagtcaagaatactccttcaaattcatgatgagcttattcttgaagtgccagaggaggagatggaatttactcctttaatggcaaaggaaaaaatggaaaaggtggtagaactttcggttcctcttgtagttgaaatctcggtaggtaaaaatcttgctgaattaaaatgagctataagattggtcgac

SEQ ID NO: 2247 - DNA, 2673 bp, Artificial Sequence
  Description of Artificial Sequence: Synthetic DNA sequence of Dictyoglomus thermophilum DNA E796S
atgaaatacctgctgccgaccgctgctgctggtctgctgctcctcgctgcccagccggcgatggccatggatatcggaattaattcggatccgaaatctctgtgggatctttttcaagaaaataccgagaaagagtccaaaaggaagattctgattattgatggctcaagcctcatatacagggtttattacgcccttccccctttaaagacaaaaaatggtgaattaactaatgctctttatggcttcataagaatacttttaaaggccgtagaagattttaatcctgatcttgtaggcgttgcctttgatagacctgaacctacttttaggcatgtgatttataaagagtataaggctaagagaccacctatgaaggatgatttgaaagcgcagataccatggataagagaatttctaaggttaaatgatatacctctattggaagagcctggctatgaagcggatgatataatagctactatagtgaataaatataaggatgatttaaaatatattctctctggagatttagatcttttgcaattagtctcggacaaaacctttctaatacatcctcaaaagggaattactgagtttactatttatgatccaaaagctgtaaaggataggtttggagtagagccctataagattcccttatacaaagtattagtaggggacgaatctgataatattccaggagtaaatggaataggtcctaaaaaggcctcaaagattcttgagaaaatttcaagtgtagatgaatttaaaagtaaaataaaagttttggatagtgatttaagggagcttattgagaaaaattggaatattattgaaagaaatttagaacttgttactttaaaaaatatagataaggatcttattcttaaacccttcgagattaaaagagatgaaaaagtaatagattttttgaagagatatgaacttaagagtattcttcaaaagttatttcctgatcttcaagaggaagaaaatatagagattaaagatgtcgaagagatcaattttaatgaggtagaaaaagaaggctactttgcctttaaatgtcttggagatagggcttttgagggtatttctctttccttcaaggagggggaaggatattttatatctccttttgatttcaataatgagataagaaagaagattgaaaatataatttcttcagagaatgttaaaaaaattggctcttatattcaaagagatttacattttttaaactgtaaaataaagggcgatgtatttgatgttagtctcgcatcttatcttttgaaccctgaaagacaaaatcactctcttgatattttgataggagagtatctaaataaaacctcttttattcctcaaaaatacgctggttatctttttccgttaaagtctattcttgaggagaggataaagaatgaagggttagaatttgtactttataacatagagattccattaatccctgtactttactccatggagaagtgggggataaaggtagataaggaatatttaaaacagctttctgatgaattctgcgagagaattaaaaaattggaagaagagatatatgaacttgcaggaaccagatttaatctcaattctccaaaacaactttctgaagttttatttgagaggttaaaacttccttctggtaagaaaggaaaaacaggatattctacgtcgtcttctgtgcttcaaaacttaataaatgctcatcctatagtgagaaaaatcctccaatatagagaactctataaattgaagagtacttatgtggatgctattcctaatctggttaatccacaaacaggtagagttcatacaaaatttaatcctacaggtacagctacaggaagaataagtagtagtgaacctaatcttcagaatattcctataaaaagtgaagaaggtagaaagataagaagagccttcgtgtcagaagatggatattttcttgtatctcttgattattctcagatagagctaaggattatggctcatctttctcaggagcctaaattaatatctgccttccaaaaaggagaggatattcatagaagaacagcatcggagatttttggagtgccagaggaagaagttgatgatcttttaaggtcaagggcaaaggccgttaattttggaattatttatggtatctcttcttttggactttctgagactgtaagtattacaccagaagaggcagagaaatttatagactcgtattttaagcactatccaagagtgaagctttttatagataagactattcatgaggcaagagaaaaactgtacgttaaaaccttatttggcagaaaaagatatattcctgagattaagagcataaataaacaggtaaggaatgcctattctaggatagcaataaatgcgccaattcagggaacagctgctgatattataaaacttgccatgatagaaatttacaaggagattgaaaataaaaatctcaagtcaagaatactccttcaaattcatgatgagcttattcttgaagtgccagaggaggagatggaatttactcctttaatggcaaaggaaaaaatggaaaaggtggtagaactttcggttcctcttgtagttgaaatctcggtaggtaaaaatcttgctgaattaaaatgagctataagattggtcgac

SEQ ID NO: 2248 - DNA, 2673 bp, Artificial Sequence
  Description of Artificial Sequence: Synthetic DNA sequence of Dictyoglomus thermophilum DNA E796T
atgaaatacctgctgccgaccgctgctgctggtctgctgctcctcgctgcccagccggcgatggccatggatatcggaattaattcggatccgaaatctctgtgggatctttttcaagaaaataccgagaaagagtccaaaaggaagattctgattattgatggctcaagcctcatatacagggtttattacgcccttccccctttaaagacaaaaaatggtgaattaactaatgctctttatggcttcataagaatacttttaaaggccgtagaagattttaatcctgatcttgtaggcgttgcctttgatagacctgaacctacttttaggcatgtgatttataaagagtataaggctaagagaccacctatgaaggatgatttgaaagcgcagataccatggataagagaatttctaaggttaaatgatatacctctattggaagagcctggctatgaagcggatgatataatagctactatagtgaataaatataaggatgatttaaaatatattctctctggagatttagatcttttgcaattagtctcggacaaaacctttctaatacatcctcaaaagggaattactgagtttactatttatgatccaaaagctgtaaaggataggtttggagtagagccctataagattcccttatacaaagtattagtaggggacgaatctgataatattccaggagtaaatggaataggtcctaaaaaggcctcaaagattcttgagaaaatttcaagtgtagatgaatttaaaagtaaaataaaagttttggatagtgatttaagggagcttattgagaaaaattggaatattattgaaagaaatttagaacttgttactttaaaaaatatagataaggatcttattcttaaacccttcgagattaaaagagatgaaaaagtaatagattttttgaagagatatgaacttaagagtattcttcaaaagttatttcctgatcttcaagaggaagaaaatatagagattaaagatgtcgaagagatcaattttaatgaggtagaaaaagaaggctactttgcctttaaatgtcttggagatagggcttttgagggtatttctctttccttcaaggagggggaaggatattttatatctccttttgatttcaataatgagataagaaagaagattgaaaatataatttcttcagagaatgttaaaaaaattggctcttatattcaaagagatttacattttttaaactgtaaaataaagggcgatgtatttgatgttagtctcgcatcttatcttttgaaccctgaaagacaaaatcactctcttgatattttgataggagagtatctaaataaaacctcttttattcctcaaaaatacgctggttatctttttccgttaaagtctattcttgaggagaggataaagaatgaagggttagaatttgtactttataacatagagattccattaatccctgtactttactccatggagaagtgggggataaaggtagataaggaatatttaaaacagctttctgatgaattctgcgagagaattaaaaaattggaagaagagatatatgaacttgcaggaaccagatttaatctcaattctccaaaacaactttctgaagttttatttgagaggttaaaacttccttctggtaagaaaggaaaaacaggatattctacgtcgtcttctgtgcttcaaaacttaataaatgctcatcctatagtgagaaaaatcctccaatatagagaactctataaattgaagagtacttatgtggatgctattcctaatctggttaatccacaaacaggtagagttcatacaaaatttaatcctacaggtacagctacaggaagaataagtagtagtgaacctaatcttcagaatattcctataaaaagtgaagaaggtagaaagataagaagagccttcgtgtcagaagatggatattttcttgtatctcttgattattctcagatagagctaaggattatggctcatctttctcaggagcctaaattaatatctgccttccaaaaaggagaggatattcatagaagaacagcatcggagatttttggagtgccagaggaagaagttgatgatcttttaaggtcaagggcaaaggccgttaattttggaattatttatggtatctcttcttttggactttctgagactgtaagtattacaccagaagaggcagagaaatttatagactcgtattttaagcactatccaagagtgaagctttttatagataagactattcatgaggcaagagaaaaactgtacgttaaaaccttatttggcagaaaaagatatattcctgagattaagagcataaataaacaggtaaggaatgcctatactaggatagcaataaatgcgccaattcagggaacagctgctgatattataaaacttgccatgatagaaatttacaaggagattgaaaataaaaatctcaagtcaagaatactccttcaaattcatgatgagcttattcttgaagtgccagaggaggagatggaatttactcctttaatggcaaaggaaaaaatggaaaaggtggtagaactttcggttcctcttgtagttgaaatctcggtaggtaaaaatcttgctgaattaaaatgagctataagattggtcgac

SEQ ID NO: 2249 - DNA, 2673 bp, Artificial Sequence
  Description of Artificial Sequence: Synthetic DNA sequence of Dictyoglomus thermophilum DNA E796W
atgaaatacctgctgccgaccgctgctgctggtctgctgctcctcgctgcccagccggcgatggccatggatatcggaattaattcggatccgaaatctctgtgggatctttttcaagaaaataccgagaaagagtccaaaaggaagattctgattattgatggctcaagcctcatatacagggtttattacgcccttccccctttaaagacaaaaaatggtgaattaactaatgctctttatggcttcataagaatacttttaaaggccgtagaagattttaatcctgatcttgtaggcgttgcctttgatagacctgaacctacttttaggcatgtgatttataaagagtataaggctaagagaccacctatgaaggatgatttgaaagcgcagataccatggataagagaatttctaaggttaaatgatatacctctattggaagagcctggctatgaagcggatgatataatagctactatagtgaataaatataaggatgatttaaaatatattctctctggagatttagatcttttgcaattagtctcggacaaaacctttctaatacatcctcaaaagggaattactgagtttactatttatgatccaaaagctgtaaaggataggtttggagtagagccctataagattcccttatacaaagtattagtaggggacgaatctgataatattccaggagtaaatggaataggtcctaaaaaggcctcaaagattcttgagaaaatttcaagtgtagatgaatttaaaagtaaaataaaagttttggatagtgatttaagggagcttattgagaaaaattggaatattattgaaagaaatttagaacttgttactttaaaaaatatagataaggatcttattcttaaacccttcgagattaaaagagatgaaaaagtaatagattttttgaagagatatgaacttaagagtattcttcaaaagttatttcctgatcttcaagaggaagaaaatatagagattaaagatgtcgaagagatcaattttaatgaggtagaaaaagaaggctactttgcctttaaatgtcttggagatagggcttttgagggtatttctctttccttcaaggagggggaaggatattttatatctccttttgatttcaataatgagataagaaagaagattgaaaatataatttcttcagagaatgttaaaaaaattggctcttatattcaaagagatttacattttttaaactgtaaaataaagggcgatgtatttgatgttagtctcgcatcttatcttttgaaccctgaaagacaaaatcactctcttgatattttgataggagagtatctaaataaaacctcttttattcctcaaaaatacgctggttatctttttccgttaaagtctattcttgaggagaggataaagaatgaagggttagaatttgtactttataacatagagattccattaatccctgtactttactccatggagaagtgggggataaaggtagataaggaatatttaaaacagctttctgatgaattctgcgagagaattaaaaaattggaagaagagatatatgaacttgcaggaaccagatttaatctcaattctccaaaacaactttctgaagttttatttgagaggttaaaacttccttctggtaagaaaggaaaaacaggatattctacgtcgtcttctgtgcttcaaaacttaataaatgctcatcctatagtgagaaaaatcctccaatatagagaactctataaattgaagagtacttatgtggatgctattcctaatctggttaatccacaaacaggtagagttcatacaaaatttaatcctacaggtacagctacaggaagaataagtagtagtgaacctaatcttcagaatattcctataaaaagtgaagaaggtagaaagataagaagagccttcgtgtcagaagatggatattttcttgtatctcttgattattctcagatagagctaaggattatggctcatctttctcaggagcctaaattaatatctgccttccaaaaaggagaggatattcatagaagaacagcatcggagatttttggagtgccagaggaagaagttgatgatcttttaaggtcaagggcaaaggccgttaattttggaattatttatggtatctcttcttttggactttctgagactgtaagtattacaccagaagaggcagagaaatttatagactcgtattttaagcactatccaagagtgaagctttttatagataagactattcatgaggcaagagaaaaactgtacgttaaaaccttatttggcagaaaaagatatattcctgagattaagagcataaataaacaggtaaggaatgcctattggaggatagcaataaatgcgccaattcagggaacagctgctgatattataaaacttgccatgatagaaatttacaaggagattgaaaataaaaatctcaagtcaagaatactccttcaaattcatgatgagcttattcttgaagtgccagaggaggagatggaatttactcctttaatggcaaaggaaaaaatggaaaaggtggtagaactttcggttcctcttgtagttgaaatctcggtaggtaaaaatcttgctgaattaaaatgagctataagattggtcgac

SEQ ID NO: 2250 - DNA, 2673 bp, Artificial Sequence
  Description of Artificial Sequence: Synthetic DNA sequence of Dictyoglomus thermophilum DNA E796Y
atgaaatacctgctgccgaccgctgctgctggtctgctgctcctcgctgcccagccggcgatggccatggatatcggaattaattcggatccgaaatctctgtgggatctttttcaagaaaataccgagaaagagtccaaaaggaagattctgattattgatggctcaagcctcatatacagggtttattacgcccttccccctttaaagacaaaaaatggtgaattaactaatgctctttatggcttcataagaatacttttaaaggccgtagaagattttaatcctgatcttgtaggcgttgcctttgatagacctgaacctacttttaggcatgtgatttataaagagtataaggctaagagaccacctatgaaggatgatttgaaagcgcagataccatggataagagaatttctaaggttaaatgatatacctctattggaagagcctggctatgaagcggatgatataatagctactatagtgaataaatataaggatgatttaaaatatattctctctggagatttagatcttttgcaattagtctcggacaaaacctttctaatacatcctcaaaagggaattactgagtttactatttatgatccaaaagctgtaaaggataggtttggagtagagccctataagattcccttatacaaagtattagtaggggacgaatctgataatattccaggagtaaatggaataggtcctaaaaaggcctcaaagattcttgagaaaatttcaagtgtagatgaatttaaaagtaaaataaaagttttggatagtgatttaagggagcttattgagaaaaattggaatattattgaaagaaatttagaacttgttactttaaaaaatatagataaggatcttattcttaaacccttcgagattaaaagagatgaaaaagtaatagattttttgaagagatatgaacttaagagtattcttcaaaagttatttcctgatcttcaagaggaagaaaatatagagattaaagatgtcgaagagatcaattttaatgaggtagaaaaagaaggctactttgcctttaaatgtcttggagatagggcttttgagggtatttctctttccttcaaggagggggaaggatattttatatctccttttgatttcaataatgagataagaaagaagattgaaaatataatttcttcagagaatgttaaaaaaattggctcttatattcaaagagatttacattttttaaactgtaaaataaagggcgatgtatttgatgttagtctcgcatcttatcttttgaaccctgaaagacaaaatcactctcttgatattttgataggagagtatctaaataaaacctcttttattcctcaaaaatacgctggttatctttttccgttaaagtctattcttgaggagaggataaagaatgaagggttagaatttgtactttataacatagagattccattaatccctgtactttactccatggagaagtgggggataaaggtagataaggaatatttaaaacagctttctgatgaattctgcgagagaattaaaaaattggaagaagagatatatgaacttgcaggaaccagatttaatctcaattctccaaaacaactttctgaagttttatttgagaggttaaaacttccttctggtaagaaaggaaaaacaggatattctacgtcgtcttctgtgcttcaaaacttaataaatgctcatcctatagtgagaaaaatcctccaatatagagaactctataaattgaagagtacttatgtggatgctattcctaatctggttaatccacaaacaggtagagttcatacaaaatttaatcctacaggtacagctacaggaagaataagtagtagtgaacctaatcttcagaatattcctataaaaagtgaagaaggtagaaagataagaagagccttcgtgtcagaagatggatattttcttgtatctcttgattattctcagatagagctaaggattatggctcatctttctcaggagcctaaattaatatctgccttccaaaaaggagaggatattcatagaagaacagcatcggagatttttggagtgccagaggaagaagttgatgatcttttaaggtcaagggcaaaggccgttaattttggaattatttatggtatctcttcttttggactttctgagactgtaagtattacaccagaagaggcagagaaatttatagactcgtattttaagcactatccaagagtgaagctttttatagataagactattcatgaggcaagagaaaaactgtacgttaaaaccttatttggcagaaaaagatatattcctgagattaagagcataaataaacaggtaaggaatgcctattataggatagcaataaatgcgccaattcagggaacagctgctgatattataaaacttgccatgatagaaatttacaaggagattgaaaataaaaatctcaagtcaagaatactccttcaaattcatgatgagcttattcttgaagtgccagaggaggagatggaatttactcctttaatggcaaaggaaaaaatggaaaaggtggtagaactttcggttcctcttgtagttgaaatctcggtaggtaaaaatcttgctgaattaaaatgagctataagattggtcgac

SEQ ID NO: 2251 - DNA, 2673 bp, Artificial Sequence
  Description of Artificial Sequence: Synthetic DNA sequence of Dictyoglomus thermophilum DNA E796V
atgaaatacctgctgccgaccgctgctgctggtctgctgctcctcgctgcccagccggcgatggccatggatatcggaattaattcggatccgaaatctctgtgggatctttttcaagaaaataccgagaaagagtccaaaaggaagattctgattattgatggctcaagcctcatatacagggtttattacgcccttccccctttaaagacaaaaaatggtgaattaactaatgctctttatggcttcataagaatacttttaaaggccgtagaagattttaatcctgatcttgtaggcgttgcctttgatagacctgaacctacttttaggcatgtgatttataaagagtataaggctaagagaccacctatgaaggatgatttgaaagcgcagataccatggataagagaatttctaaggttaaatgatatacctctattggaagagcctggctatgaagcggatgatataatagctactatagtgaataaatataaggatgatttaaaatatattctctctggagatttagatcttttgcaattagtctcggacaaaacctttctaatacatcctcaaaagggaattactgagtttactatttatgatccaaaagctgtaaaggataggtttggagtagagccctataagattcccttatacaaagtattagtaggggacgaatctgataatattccaggagtaaatggaataggtcctaaaaaggcctcaaagattcttgagaaaatttcaagtgtagatgaatttaaaagtaaaataaaagttttggatagtgatttaagggagcttattgagaaaaattggaatattattgaaagaaatttagaacttgttactttaaaaaatatagataaggatcttattcttaaacccttcgagattaaaagagatgaaaaagtaatagattttttgaagagatatgaacttaagagtattcttcaaaagttatttcctgatcttcaagaggaagaaaatatagagattaaagatgtcgaagagatcaattttaatgaggtagaaaaagaaggctactttgcctttaaatgtcttggagatagggcttttgagggtatttctctttccttcaaggagggggaaggatattttatatctccttttgatttcaataatgagataagaaagaagattgaaaatataatttcttcagagaatgttaaaaaaattggctcttatattcaaagagatttacattttttaaactgtaaaataaagggcgatgtatttgatgttagtctcgcatcttatcttttgaaccctgaaagacaaaatcactctcttgatattttgataggagagtatctaaataaaacctcttttattcctcaaaaatacgctggttatctttttccgttaaagtctattcttgaggagaggataaagaatgaagggttagaatttgtactttataacatagagattccattaatccctgtactttactccatggagaagtgggggataaaggtagataaggaatatttaaaacagctttctgatgaattctgcgagagaattaaaaaattggaagaagagatatatgaacttgcaggaaccagatttaatctcaattctccaaaacaactttctgaagttttatttgagaggttaaaacttccttctggtaagaaaggaaaaacaggatattctacgtcgtcttctgtgcttcaaaacttaataaatgctcatcctatagtgagaaaaatcctccaatatagagaactctataaattgaagagtacttatgtggatgctattcctaatctggttaatccacaaacaggtagagttcatacaaaatttaatcctacaggtacagctacaggaagaataagtagtagtgaacctaatcttcagaatattcctataaaaagtgaagaaggtagaaagataagaagagccttcgtgtcagaagatggatattttcttgtatctcttgattattctcagatagagctaaggattatggctcatctttctcaggagcctaaattaatatctgccttccaaaaaggagaggatattcatagaagaacagcatcggagatttttggagtgccagaggaagaagttgatgatcttttaaggtcaagggcaaaggccgttaattttggaattatttatggtatctcttcttttggactttctgagactgtaagtattacaccagaagaggcagagaaatttatagactcgtattttaagcactatccaagagtgaagctttttatagataagactattcatgaggcaagagaaaaactgtacgttaaaaccttatttggcagaaaaagatatattcctgagattaagagcataaataaacaggtaaggaatgcctatgttaggatagcaataaatgcgccaattcagggaacagctgctgatattataaaacttgccatgatagaaatttacaaggagattgaaaataaaaatctcaagtcaagaatactccttcaaattcatgatgagcttattcttgaagtgccagaggaggagatggaatttactcctttaatggcaaaggaaaaaatggaaaaggtggtagaactttcggttcctcttgtagttgaaatctcggtaggtaaaaatcttgctgaattaaaatgagctataagattggtcgac

SEQ ID NO: 2252 - DNA, 2673 bp, Artificial Sequence
  Description of Artificial Sequence: Synthetic DNA sequence of Dictyoglomus thermophilum DNA R797A
atgaaatacctgctgccgaccgctgctgctggtctgctgctcctcgctgcccagccggcgatggccatggatatcggaattaattcggatccgaaatctctgtgggatctttttcaagaaaataccgagaaagagtccaaaaggaagattctgattattgatggctcaagcctcatatacagggtttattacgcccttccccctttaaagacaaaaaatggtgaattaactaatgctctttatggcttcataagaatacttttaaaggccgtagaagattttaatcctgatcttgtaggcgttgcctttgatagacctgaacctacttttaggcatgtgatttataaagagtataaggctaagagaccacctatgaaggatgatttgaaagcgcagataccatggataagagaatttctaaggttaaatgatatacctctattggaagagcctggctatgaagcggatgatataatagctactatagtgaataaatataaggatgatttaaaatatattctctctggagatttagatcttttgcaattagtctcggacaaaacctttctaatacatcctcaaaagggaattactgagtttactatttatgatccaaaagctgtaaaggataggtttggagtagagccctataagattcccttatacaaagtattagtaggggacgaatctgataatattccaggagtaaatggaataggtcctaaaaaggcctcaaagattcttgagaaaatttcaagtgtagatgaatttaaaagtaaaataaaagttttggatagtgatttaagggagcttattgagaaaaattggaatattattgaaagaaatttagaacttgttactttaaaaaatatagataaggatcttattcttaaacccttcgagattaaaagagatgaaaaagtaatagattttttgaagagatatgaacttaagagtattcttcaaaagttatttcctgatcttcaagaggaagaaaatatagagattaaagatgtcgaagagatcaattttaatgaggtagaaaaagaaggctactttgcctttaaatgtcttggagatagggcttttgagggtatttctctttccttcaaggagggggaaggatattttatatctccttttgatttcaataatgagataagaaagaagattgaaaatataatttcttcagagaatgttaaaaaaattggctcttatattcaaagagatttacattttttaaactgtaaaataaagggcgatgtatttgatgttagtctcgcatcttatcttttgaaccctgaaagacaaaatcactctcttgatattttgataggagagtatctaaataaaacctcttttattcctcaaaaatacgctggttatctttttccgttaaagtctattcttgaggagaggataaagaatgaagggttagaatttgtactttataacatagagattccattaatccctgtactttactccatggagaagtgggggataaaggtagataaggaatatttaaaacagctttctgatgaattctgcgagagaattaaaaaattggaagaagagatatatgaacttgcaggaaccagatttaatctcaattctccaaaacaactttctgaagttttatttgagaggttaaaacttccttctggtaagaaaggaaaaacaggatattctacgtcgtcttctgtgcttcaaaacttaataaatgctcatcctatagtgagaaaaatcctccaatatagagaactctataaattgaagagtacttatgtggatgctattcctaatctggttaatccacaaacaggtagagttcatacaaaatttaatcctacaggtacagctacaggaagaataagtagtagtgaacctaatcttcagaatattcctataaaaagtgaagaaggtagaaagataagaagagccttcgtgtcagaagatggatattttcttgtatctcttgattattctcagatagagctaaggattatggctcatctttctcaggagcctaaattaatatctgccttccaaaaaggagaggatattcatagaagaacagcatcggagatttttggagtgccagaggaagaagttgatgatcttttaaggtcaagggcaaaggccgttaattttggaattatttatggtatctcttcttttggactttctgagactgtaagtattacaccagaagaggcagagaaatttatagactcgtattttaagcactatccaagagtgaagctttttatagataagactattcatgaggcaagagaaaaactgtacgttaaaaccttatttggcagaaaaagatatattcctgagattaagagcataaataaacaggtaaggaatgcctatgaagctatagcaataaatgcgccaattcagggaacagctgctgatattataaaacttgccatgatagaaatttacaaggagattgaaaataaaaatctcaagtcaagaatactccttcaaattcatgatgagcttattcttgaagtgccagaggaggagatggaatttactcctttaatggcaaaggaaaaaatggaaaaggtggtagaactttcggttcctcttgtagttgaaatctcggtaggtaaaaatcttgctgaattaaaatgagctataagattggtcgac

SEQ ID NO: 2253 - DNA, 2673 bp, Artificial Sequence
  Description of Artificial Sequence: Synthetic DNA sequence of Dictyoglomus thermophilum DNA R797N
atgaaatacctgctgccgaccgctgctgctggtctgctgctcctcgctgcccagccggcgatggccatggatatcggaattaattcggatccgaaatctctgtgggatctttttcaagaaaataccgagaaagagtccaaaaggaagattctgattattgatggctcaagcctcatatacagggtttattacgcccttccccctttaaagacaaaaaatggtgaattaactaatgctctttatggcttcataagaatacttttaaaggccgtagaagattttaatcctgatcttgtaggcgttgcctttgatagacctgaacctacttttaggcatgtgatttataaagagtataaggctaagagaccacctatgaaggatgatttgaaagcgcagataccatggataagagaatttctaaggttaaatgatatacctctattggaagagcctggctatgaagcggatgatataatagctactatagtgaataaatataaggatgatttaaaatatattctctctggagatttagatcttttgcaattagtctcggacaaaacctttctaatacatcctcaaaagggaattactgagtttactatttatgatccaaaagctgtaaaggataggtttggagtagagccctataagattcccttatacaaagtattagtaggggacgaatctgataatattccaggagtaaatggaataggtcctaaaaaggcctcaaagattcttgagaaaatttcaagtgtagatgaatttaaaagtaaaataaaagttttggatagtgatttaagggagcttattgagaaaaattggaatattattgaaagaaatttagaacttgttactttaaaaaatatagataaggatcttattcttaaacccttcgagattaaaagagatgaaaaagtaatagattttttgaagagatatgaacttaagagtattcttcaaaagttatttcctgatcttcaagaggaagaaaatatagagattaaagatgtcgaagagatcaattttaatgaggtagaaaaagaaggctactttgcctttaaatgtcttggagatagggcttttgagggtatttctctttccttcaaggagggggaaggatattttatatctccttttgatttcaataatgagataagaaagaagattgaaaatataatttcttcagagaatgttaaaaaaattggctcttatattcaaagagatttacattttttaaactgtaaaataaagggcgatgtatttgatgttagtctcgcatcttatcttttgaaccctgaaagacaaaatcactctcttgatattttgataggagagtatctaaataaaacctcttttattcctcaaaaatacgctggttatctttttccgttaaagtctattcttgaggagaggataaagaatgaagggttagaatttgtactttataacatagagattccattaatccctgtactttactccatggagaagtgggggataaaggtagataaggaatatttaaaacagctttctgatgaattctgcgagagaattaaaaaattggaagaagagatatatgaacttgcaggaaccagatttaatctcaattctccaaaacaactttctgaagttttatttgagaggttaaaacttccttctggtaagaaaggaaaaacaggatattctacgtcgtcttctgtgcttcaaaacttaataaatgctcatcctatagtgagaaaaatcctccaatatagagaactctataaattgaagagtacttatgtggatgctattcctaatctggttaatccacaaacaggtagagttcatacaaaatttaatcctacaggtacagctacaggaagaataagtagtagtgaacctaatcttcagaatattcctataaaaagtgaagaaggtagaaagataagaagagccttcgtgtcagaagatggatattttcttgtatctcttgattattctcagatagagctaaggattatggctcatctttctcaggagcctaaattaatatctgccttccaaaaaggagaggatattcatagaagaacagcatcggagatttttggagtgccagaggaagaagttgatgatcttttaaggtcaagggcaaaggccgttaattttggaattatttatggtatctcttcttttggactttctgagactgtaagtattacaccagaagaggcagagaaatttatagactcgtattttaagcactatccaagagtgaagctttttatagataagactattcatgaggcaagagaaaaactgtacgttaaaaccttatttggcagaaaaagatatattcctgagattaagagcataaataaacaggtaaggaatgcctatgaaaatatagcaataaatgcgccaattcagggaacagctgctgatattataaaacttgccatgatagaaatttacaaggagattgaaaataaaaatctcaagtcaagaatactccttcaaattcatgatgagcttattcttgaagtgccagaggaggagatggaatttactcctttaatggcaaaggaaaaaatggaaaaggtggtagaactttcggttcctcttgtagttgaaatctcggtaggtaaaaatcttgctgaattaaaatgagctataagattggtcgac

SEQ ID NO: 2254 - DNA, 2673 bp, Artificial Sequence
  Description of Artificial Sequence: Synthetic DNA sequence of Dictyoglomus thermophilum DNA R797D
atgaaatacctgctgccgaccgctgctgctggtctgctgctcctcgctgcccagccggcgatggccatggatatcggaattaattcggatccgaaatctctgtgggatctttttcaagaaaataccgagaaagagtccaaaaggaagattctgattattgatggctcaagcctcatatacagggtttattacgcccttccccctttaaagacaaaaaatggtgaattaactaatgctctttatggcttcataagaatacttttaaaggccgtagaagattttaatcctgatcttgtaggcgttgcctttgatagacctgaacctacttttaggcatgtgatttataaagagtataaggctaagagaccacctatgaaggatgatttgaaagcgcagataccatggataagagaatttctaaggttaaatgatatacctctattggaagagcctggctatgaagcggatgatataatagctactatagtgaataaatataaggatgatttaaaatatattctctctggagatttagatcttttgcaattagtctcggacaaaacctttctaatacatcctcaaaagggaattactgagtttactatttatgatccaaaagctgtaaaggataggtttggagtagagccctataagattcccttatacaaagtattagtaggggacgaatctgataatattccaggagtaaatggaataggtcctaaaaaggcctcaaagattcttgagaaaatttcaagtgtagatgaatttaaaagtaaaataaaagttttggatagtgatttaagggagcttattgagaaaaattggaatattattgaaagaaatttagaacttgttactttaaaaaatatagataaggatcttattcttaaacccttcgagattaaaagagatgaaaaagtaatagattttttgaagagatatgaacttaagagtattcttcaaaagttatttcctgatcttcaagaggaagaaaatatagagattaaagatgtcgaagagatcaattttaatgaggtagaaaaagaaggctactttgcctttaaatgtcttggagatagggcttttgagggtatttctctttccttcaaggagggggaaggatattttatatctccttttgatttcaataatgagataagaaagaagattgaaaatataatttcttcagagaatgttaaaaaaattggctcttatattcaaagagatttacattttttaaactgtaaaataaagggcgatgtatttgatgttagtctcgcatcttatcttttgaaccctgaaagacaaaatcactctcttgatattttgataggagagtatctaaataaaacctcttttattcctcaaaaatacgctggttatctttttccgttaaagtctattcttgaggagaggataaagaatgaagggttagaatttgtactttataacatagagattccattaatccctgtactttactccatggagaagtgggggataaaggtagataaggaatatttaaaacagctttctgatgaattctgcgagagaattaaaaaattggaagaagagatatatgaacttgcaggaaccagatttaatctcaattctccaaaacaactttctgaagttttatttgagaggttaaaacttccttctggtaagaaaggaaaaacaggatattctacgtcgtcttctgtgcttcaaaacttaataaatgctcatcctatagtgagaaaaatcctccaatatagagaactctataaattgaagagtacttatgtggatgctattcctaatctggttaatccacaaacaggtagagttcatacaaaatttaatcctacaggtacagctacaggaagaataagtagtagtgaacctaatcttcagaatattcctataaaaagtgaagaaggtagaaagataagaagagccttcgtgtcagaagatggatattttcttgtatctcttgattattctcagatagagctaaggattatggctcatctttctcaggagcctaaattaatatctgccttccaaaaaggagaggatattcatagaagaacagcatcggagatttttggagtgccagaggaagaagttgatgatcttttaaggtcaagggcaaaggccgttaattttggaattatttatggtatctcttcttttggactttctgagactgtaagtattacaccagaagaggcagagaaatttatagactcgtattttaagcactatccaagagtgaagctttttatagataagactattcatgaggcaagagaaaaactgtacgttaaaaccttatttggcagaaaaagatatattcctgagattaagagcataaataaacaggtaaggaatgcctatgaagatatagcaataaatgcgccaattcagggaacagctgctgatattataaaacttgccatgatagaaatttacaaggagattgaaaataaaaatctcaagtcaagaatactccttcaaattcatgatgagcttattcttgaagtgccagaggaggagatggaatttactcctttaatggcaaaggaaaaaatggaaaaggtggtagaactttcggttcctcttgtagttgaaatctcggtaggtaaaaatcttgctgaattaaaatgagctataagattggtcgac

SEQ ID NO: 2255 - DNA, 2673 bp, Artificial Sequence
  Description of Artificial Sequence: Synthetic DNA sequence of Dictyoglomus thermophilum DNA R797C
atgaaatacctgctgccgaccgctgctgctggtctgctgctcctcgctgcccagccggcgatggccatggatatcggaattaattcggatccgaaatctctgtgggatctttttcaagaaaataccgagaaagagtccaaaaggaagattctgattattgatggctcaagcctcatatacagggtttattacgcccttccccctttaaagacaaaaaatggtgaattaactaatgctctttatggcttcataagaatacttttaaaggccgtagaagattttaatcctgatcttgtaggcgttgcctttgatagacctgaacctacttttaggcatgtgatttataaagagtataaggctaagagaccacctatgaaggatgatttgaaagcgcagataccatggataagagaatttctaaggttaaatgatatacctctattggaagagcctggctatgaagcggatgatataatagctactatagtgaataaatataaggatgatttaaaatatattctctctggagatttagatcttttgcaattagtctcggacaaaacctttctaatacatcctcaaaagggaattactgagtttactatttatgatccaaaagctgtaaaggataggtttggagtagagccctataagattcccttatacaaagtattagtaggggacgaatctgataatattccaggagtaaatggaataggtcctaaaaaggcctcaaagattcttgagaaaatttcaagtgtagatgaatttaaaagtaaaataaaagttttggatagtgatttaagggagcttattgagaaaaattggaatattattgaaagaaatttagaacttgttactttaaaaaatatagataaggatcttattcttaaacccttcgagattaaaagagatgaaaaagtaatagattttttgaagagatatgaacttaagagtattcttcaaaagttatttcctgatcttcaagaggaagaaaatatagagattaaagatgtcgaagagatcaattttaatgaggtagaaaaagaaggctactttgcctttaaatgtcttggagatagggcttttgagggtatttctctttccttcaaggagggggaaggatattttatatctccttttgatttcaataatgagataagaaagaagattgaaaatataatttcttcagagaatgttaaaaaaattggctcttatattcaaagagatttacattttttaaactgtaaaataaagggcgatgtatttgatgttagtctcgcatcttatcttttgaaccctgaaagacaaaatcactctcttgatattttgataggagagtatctaaataaaacctcttttattcctcaaaaatacgctggttatctttttccgttaaagtctattcttgaggagaggataaagaatgaagggttagaatttgtactttataacatagagattccattaatccctgtactttactccatggagaagtgggggataaaggtagataaggaatatttaaaacagctttctgatgaattctgcgagagaattaaaaaattggaagaagagatatatgaacttgcaggaaccagatttaatctcaattctccaaaacaactttctgaagttttatttgagaggttaaaacttccttctggtaagaaaggaaaaacaggatattctacgtcgtcttctgtgcttcaaaacttaataaatgctcatcctatagtgagaaaaatcctccaatatagagaactctataaattgaagagtacttatgtggatgctattcctaatctggttaatccacaaacaggtagagttcatacaaaatttaatcctacaggtacagctacaggaagaataagtagtagtgaacctaatcttcagaatattcctataaaaagtgaagaaggtagaaagataagaagagccttcgtgtcagaagatggatattttcttgtatctcttgattattctcagatagagctaaggattatggctcatctttctcaggagcctaaattaatatctgccttccaaaaaggagaggatattcatagaagaacagcatcggagatttttggagtgccagaggaagaagttgatgatcttttaaggtcaagggcaaaggccgttaattttggaattatttatggtatctcttcttttggactttctgagactgtaagtattacaccagaagaggcagagaaatttatagactcgtattttaagcactatccaagagtgaagctttttatagataagactattcatgaggcaagagaaaaactgtacgttaaaaccttatttggcagaaaaagatatattcctgagattaagagcataaataaacaggtaaggaatgcctatgaatgtatagcaataaatgcgccaattcagggaacagctgctgatattataaaacttgccatgatagaaatttacaaggagattgaaaataaaaatctcaagtcaagaatactccttcaaattcatgatgagcttattcttgaagtgccagaggaggagatggaatttactcctttaatggcaaaggaaaaaatggaaaaggtggtagaactttcggttcctcttgtagttgaaatctcggtaggtaaaaatcttgctgaattaaaatgagctataagattggtcgac

SEQ ID NO: 2256 - DNA, 2673 bp, Artificial Sequence
  Description of Artificial Sequence: Synthetic DNA sequence of Dictyoglomus thermophilum DNA R797E
atgaaatacctgctgccgaccgctgctgctggtctgctgctcctcgctgcccagccggcgatggccatggatatcggaattaattcggatccgaaatctctgtgggatctttttcaagaaaataccgagaaagagtccaaaaggaagattctgattattgatggctcaagcctcatatacagggtttattacgcccttccccctttaaagacaaaaaatggtgaattaactaatgctctttatggcttcataagaatacttttaaaggccgtagaagattttaatcctgatcttgtaggcgttgcctttgatagacctgaacctacttttaggcatgtgatttataaagagtataaggctaagagaccacctatgaaggatgatttgaaagcgcagataccatggataagagaatttctaaggttaaatgatatacctctattggaagagcctggctatgaagcggatgatataatagctactatagtgaataaatataaggatgatttaaaatatattctctctggagatttagatcttttgcaattagtctcggacaaaacctttctaatacatcctcaaaagggaattactgagtttactatttatgatccaaaagctgtaaaggataggtttggagtagagccctataagattcccttatacaaagtattagtaggggacgaatctgataatattccaggagtaaatggaataggtcctaaaaaggcctcaaagattcttgagaaaatttcaagtgtagatgaatttaaaagtaaaataaaagttttggatagtgatttaagggagcttattgagaaaaattggaatattattgaaagaaatttagaacttgttactttaaaaaatatagataaggatcttattcttaaacccttcgagattaaaagagatgaaaaagtaatagattttttgaagagatatgaacttaagagtattcttcaaaagttatttcctgatcttcaagaggaagaaaatatagagattaaagatgtcgaagagatcaattttaatgaggtagaaaaagaaggctactttgcctttaaatgtcttggagatagggcttttgagggtatttctctttccttcaaggagggggaaggatattttatatctccttttgatttcaataatgagataagaaagaagattgaaaatataatttcttcagagaatgttaaaaaaattggctcttatattcaaagagatttacattttttaaactgtaaaataaagggcgatgtatttgatgttagtctcgcatcttatcttttgaaccctgaaagacaaaatcactctcttgatattttgataggagagtatctaaataaaacctcttttattcctcaaaaatacgctggttatctttttccgttaaagtctattcttgaggagaggataaagaatgaagggttagaatttgtactttataacatagagattccattaatccctgtactttactccatggagaagtgggggataaaggtagataaggaatatttaaaacagctttctgatgaattctgcgagagaattaaaaaattggaagaagagatatatgaacttgcaggaaccagatttaatctcaattctccaaaacaactttctgaagttttatttgagaggttaaaacttccttctggtaagaaaggaaaaacaggatattctacgtcgtcttctgtgcttcaaaacttaataaatgctcatcctatagtgagaaaaatcctccaatatagagaactctataaattgaagagtacttatgtggatgctattcctaatctggttaatccacaaacaggtagagttcatacaaaatttaatcctacaggtacagctacaggaagaataagtagtagtgaacctaatcttcagaatattcctataaaaagtgaagaaggtagaaagataagaagagccttcgtgtcagaagatggatattttcttgtatctcttgattattctcagatagagctaaggattatggctcatctttctcaggagcctaaattaatatctgccttccaaaaaggagaggatattcatagaagaacagcatcggagatttttggagtgccagaggaagaagttgatgatcttttaaggtcaagggcaaaggccgttaattttggaattatttatggtatctcttcttttggactttctgagactgtaagtattacaccagaagaggcagagaaatttatagactcgtattttaagcactatccaagagtgaagctttttatagataagactattcatgaggcaagagaaaaactgtacgttaaaaccttatttggcagaaaaagatatattcctgagattaagagcataaataaacaggtaaggaatgcctatgaagaaatagcaataaatgcgccaattcagggaacagctgctgatattataaaacttgccatgatagaaatttacaaggagattgaaaataaaaatctcaagtcaagaatactccttcaaattcatgatgagcttattcttgaagtgccagaggaggagatggaatttactcctttaatggcaaaggaaaaaatggaaaaggtggtagaactttcggttcctcttgtagttgaaatctcggtaggtaaaaatcttgctgaattaaaatgagctataagattggtcgac

SEQ ID NO: 2257 - DNA, 2673 bp, Artificial Sequence
  Description of Artificial Sequence: Synthetic DNA sequence of Dictyoglomus thermophilum DNA R797Q
atgaaatacctgctgccgaccgctgctgctggtctgctgctcctcgctgcccagccggcgatggccatggatatcggaattaattcggatccgaaatctctgtgggatctttttcaagaaaataccgagaaagagtccaaaaggaagattctgattattgatggctcaagcctcatatacagggtttattacgcccttccccctttaaagacaaaaaatggtgaattaactaatgctctttatggcttcataagaatacttttaaaggccgtagaagattttaatcctgatcttgtaggcgttgcctttgatagacctgaacctacttttaggcatgtgatttataaagagtataaggctaagagaccacctatgaaggatgatttgaaagcgcagataccatggataagagaatttctaaggttaaatgatatacctctattggaagagcctggctatgaagcggatgatataatagctactatagtgaataaatataaggatgatttaaaatatattctctctggagatttagatcttttgcaattagtctcggacaaaacctttctaatacatcctcaaaagggaattactgagtttactatttatgatccaaaagctgtaaaggataggtttggagtagagccctataagattcccttatacaaagtattagtaggggacgaatctgataatattccaggagtaaatggaataggtcctaaaaaggcctcaaagattcttgagaaaatttcaagtgtagatgaatttaaaagtaaaataaaagttttggatagtgatttaagggagcttattgagaaaaattggaatattattgaaagaaatttagaacttgttactttaaaaaatatagataaggatcttattcttaaacccttcgagattaaaagagatgaaaaagtaatagattttttgaagagatatgaacttaagagtattcttcaaaagttatttcctgatcttcaagaggaagaaaatatagagattaaagatgtcgaagagatcaattttaatgaggtagaaaaagaaggctactttgcctttaaatgtcttggagatagggcttttgagggtatttctctttccttcaaggagggggaaggatattttatatctccttttgatttcaataatgagataagaaagaagattgaaaatataatttcttcagagaatgttaaaaaaattggctcttatattcaaagagatttacattttttaaactgtaaaataaagggcgatgtatttgatgttagtctcgcatcttatcttttgaaccctgaaagacaaaatcactctcttgatattttgataggagagtatctaaataaaacctcttttattcctcaaaaatacgctggttatctttttccgttaaagtctattcttgaggagaggataaagaatgaagggttagaatttgtactttataacatagagattccattaatccctgtactttactccatggagaagtgggggataaaggtagataaggaatatttaaaacagctttctgatgaattctgcgagagaattaaaaaattggaagaagagatatatgaacttgcaggaaccagatttaatctcaattctccaaaacaactttctgaagttttatttgagaggttaaaacttccttctggtaagaaaggaaaaacaggatattctacgtcgtcttctgtgcttcaaaacttaataaatgctcatcctatagtgagaaaaatcctccaatatagagaactctataaattgaagagtacttatgtggatgctattcctaatctggttaatccacaaacaggtagagttcatacaaaatttaatcctacaggtacagctacaggaagaataagtagtagtgaacctaatcttcagaatattcctataaaaagtgaagaaggtagaaagataagaagagccttcgtgtcagaagatggatattttcttgtatctcttgattattctcagatagagctaaggattatggctcatctttctcaggagcctaaattaatatctgccttccaaaaaggagaggatattcatagaagaacagcatcggagatttttggagtgccagaggaagaagttgatgatcttttaaggtcaagggcaaaggccgttaattttggaattatttatggtatctcttcttttggactttctgagactgtaagtattacaccagaagaggcagagaaatttatagactcgtattttaagcactatccaagagtgaagctttttatagataagactattcatgaggcaagagaaaaactgtacgttaaaaccttatttggcagaaaaagatatattcctgagattaagagcataaataaacaggtaaggaatgcctatgaacaaatagcaataaatgcgccaattcagggaacagctgctgatattataaaacttgccatgatagaaatttacaaggagattgaaaataaaaatctcaagtcaagaatactccttcaaattcatgatgagcttattcttgaagtgccagaggaggagatggaatttactcctttaatggcaaaggaaaaaatggaaaaggtggtagaactttcggttcctcttgtagttgaaatctcggtaggtaaaaatcttgctgaattaaaatgagctataagattggtcgac

SEQ ID NO: 2258 - DNA, 2673 bp, Artificial Sequence
  Description of Artificial Sequence: Synthetic DNA sequence of Dictyoglomus thermophilum DNA R797G
atgaaatacctgctgccgaccgctgctgctggtctgctgctcctcgctgcccagccggcgatggccatggatatcggaattaattcggatccgaaatctctgtgggatctttttcaagaaaataccgagaaagagtccaaaaggaagattctgattattgatggctcaagcctcatatacagggtttattacgcccttccccctttaaagacaaaaaatggtgaattaactaatgctctttatggcttcataagaatacttttaaaggccgtagaagattttaatcctgatcttgtaggcgttgcctttgatagacctgaacctacttttaggcatgtgatttataaagagtataaggctaagagaccacctatgaaggatgatttgaaagcgcagataccatggataagagaatttctaaggttaaatgatatacctctattggaagagcctggctatgaagcggatgatataatagctactatagtgaataaatataaggatgatttaaaatatattctctctggagatttagatcttttgcaattagtctcggacaaaacctttctaatacatcctcaaaagggaattactgagtttactatttatgatccaaaagctgtaaaggataggtttggagtagagccctataagattcccttatacaaagtattagtaggggacgaatctgataatattccaggagtaaatggaataggtcctaaaaaggcctcaaagattcttgagaaaatttcaagtgtagatgaatttaaaagtaaaataaaagttttggatagtgatttaagggagcttattgagaaaaattggaatattattgaaagaaatttagaacttgttactttaaaaaatatagataaggatcttattcttaaacccttcgagattaaaagagatgaaaaagtaatagattttttgaagagatatgaacttaagagtattcttcaaaagttatttcctgatcttcaagaggaagaaaatatagagattaaagatgtcgaagagatcaattttaatgaggtagaaaaagaaggctactttgcctttaaatgtcttggagatagggcttttgagggtatttctctttccttcaaggagggggaaggatattttatatctccttttgatttcaataatgagataagaaagaagattgaaaatataatttcttcagagaatgttaaaaaaattggctcttatattcaaagagatttacattttttaaactgtaaaataaagggcgatgtatttgatgttagtctcgcatcttatcttttgaaccctgaaagacaaaatcactctcttgatattttgataggagagtatctaaataaaacctcttttattcctcaaaaatacgctggttatctttttccgttaaagtctattcttgaggagaggataaagaatgaagggttagaatttgtactttataacatagagattccattaatccctgtactttactccatggagaagtgggggataaaggtagataaggaatatttaaaacagctttctgatgaattctgcgagagaattaaaaaattggaagaagagatatatgaacttgcaggaaccagatttaatctcaattctccaaaacaactttctgaagttttatttgagaggttaaaacttccttctggtaagaaaggaaaaacaggatattctacgtcgtcttctgtgcttcaaaacttaataaatgctcatcctatagtgagaaaaatcctccaatatagagaactctataaattgaagagtacttatgtggatgctattcctaatctggttaatccacaaacaggtagagttcatacaaaatttaatcctacaggtacagctacaggaagaataagtagtagtgaacctaatcttcagaatattcctataaaaagtgaagaaggtagaaagataagaagagccttcgtgtcagaagatggatattttcttgtatctcttgattattctcagatagagctaaggattatggctcatctttctcaggagcctaaattaatatctgccttccaaaaaggagaggatattcatagaagaacagcatcggagatttttggagtgccagaggaagaagttgatgatcttttaaggtcaagggcaaaggccgttaattttggaattatttatggtatctcttcttttggactttctgagactgtaagtattacaccagaagaggcagagaaatttatagactcgtattttaagcactatccaagagtgaagctttttatagataagactattcatgaggcaagagaaaaactgtacgttaaaaccttatttggcagaaaaagatatattcctgagattaagagcataaataaacaggtaaggaatgcctatgaaggtatagcaataaatgcgccaattcagggaacagctgctgatattataaaacttgccatgatagaaatttacaaggagattgaaaataaaaatctcaagtcaagaatactccttcaaattcatgatgagcttattcttgaagtgccagaggaggagatggaatttactcctttaatggcaaaggaaaaaatggaaaaggtggtagaactttcggttcctcttgtagttgaaatctcggtaggtaaaaatcttgctgaattaaaatgagctataagattggtcgac

SEQ ID NO: 2259 - DNA, 2673 bp, Artificial Sequence
  Description of Artificial Sequence: Synthetic DNA sequence of Dictyoglomus thermophilum DNA R797H
atgaaatacctgctgccgaccgctgctgctggtctgctgctcctcgctgcccagccggcgatggccatggatatcggaattaattcggatccgaaatctctgtgggatctttttcaagaaaataccgagaaagagtccaaaaggaagattctgattattgatggctcaagcctcatatacagggtttattacgcccttccccctttaaagacaaaaaatggtgaattaactaatgctctttatggcttcataagaatacttttaaaggccgtagaagattttaatcctgatcttgtaggcgttgcctttgatagacctgaacctacttttaggcatgtgatttataaagagtataaggctaagagaccacctatgaaggatgatttgaaagcgcagataccatggataagagaatttctaaggttaaatgatatacctctattggaagagcctggctatgaagcggatgatataatagctactatagtgaataaatataaggatgatttaaaatatattctctctggagatttagatcttttgcaattagtctcggacaaaacctttctaatacatcctcaaaagggaattactgagtttactatttatgatccaaaagctgtaaaggataggtttggagtagagccctataagattcccttatacaaagtattagtaggggacgaatctgataatattccaggagtaaatggaataggtcctaaaaaggcctcaaagattcttgagaaaatttcaagtgtagatgaatttaaaagtaaaataaaagttttggatagtgatttaagggagcttattgagaaaaattggaatattattgaaagaaatttagaacttgttactttaaaaaatatagataaggatcttattcttaaacccttcgagattaaaagagatgaaaaagtaatagattttttgaagagatatgaacttaagagtattcttcaaaagttatttcctgatcttcaagaggaagaaaatatagagattaaagatgtcgaagagatcaattttaatgaggtagaaaaagaaggctactttgcctttaaatgtcttggagatagggcttttgagggtatttctctttccttcaaggagggggaaggatattttatatctccttttgatttcaataatgagataagaaagaagattgaaaatataatttcttcagagaatgttaaaaaaattggctcttatattcaaagagatttacattttttaaactgtaaaataaagggcgatgtatttgatgttagtctcgcatcttatcttttgaaccctgaaagacaaaatcactctcttgatattttgataggagagtatctaaataaaacctcttttattcctcaaaaatacgctggttatctttttccgttaaagtctattcttgaggagaggataaagaatgaagggttagaatttgtactttataacatagagattccattaatccctgtactttactccatggagaagtgggggataaaggtagataaggaatatttaaaacagctttctgatgaattctgcgagagaattaaaaaattggaagaagagatatatgaacttgcaggaaccagatttaatctcaattctccaaaacaactttctgaagttttatttgagaggttaaaacttccttctggtaagaaaggaaaaacaggatattctacgtcgtcttctgtgcttcaaaacttaataaatgctcatcctatagtgagaaaaatcctccaatatagagaactctataaattgaagagtacttatgtggatgctattcctaatctggttaatccacaaacaggtagagttcatacaaaatttaatcctacaggtacagctacaggaagaataagtagtagtgaacctaatcttcagaatattcctataaaaagtgaagaaggtagaaagataagaagagccttcgtgtcagaagatggatattttcttgtatctcttgattattctcagatagagctaaggattatggctcatctttctcaggagcctaaattaatatctgccttccaaaaaggagaggatattcatagaagaacagcatcggagatttttggagtgccagaggaagaagttgatgatcttttaaggtcaagggcaaaggccgttaattttggaattatttatggtatctcttcttttggactttctgagactgtaagtattacaccagaagaggcagagaaatttatagactcgtattttaagcactatccaagagtgaagctttttatagataagactattcatgaggcaagagaaaaactgtacgttaaaaccttatttggcagaaaaagatatattcctgagattaagagcataaataaacaggtaaggaatgcctatgaacatatagcaataaatgcgccaattcagggaacagctgctgatattataaaacttgccatgatagaaatttacaaggagattgaaaataaaaatctcaagtcaagaatactccttcaaattcatgatgagcttattcttgaagtgccagaggaggagatggaatttactcctttaatggcaaaggaaaaaatggaaaaggtggtagaactttcggttcctcttgtagttgaaatctcggtaggtaaaaatcttgctgaattaaaatgagctataagattggtcgac

SEQ ID NO: 2260 - DNA, 2673 bp, Artificial Sequence
  Description of Artificial Sequence: Synthetic DNA sequence of Dictyoglomus thermophilum DNA R797I
atgaaatacctgctgccgaccgctgctgctggtctgctgctcctcgctgcccagccggcgatggccatggatatcggaattaattcggatccgaaatctctgtgggatctttttcaagaaaataccgagaaagagtccaaaaggaagattctgattattgatggctcaagcctcatatacagggtttattacgcccttccccctttaaagacaaaaaatggtgaattaactaatgctctttatggcttcataagaatacttttaaaggccgtagaagattttaatcctgatcttgtaggcgttgcctttgatagacctgaacctacttttaggcatgtgatttataaagagtataaggctaagagaccacctatgaaggatgatttgaaagcgcagataccatggataagagaatttctaaggttaaatgatatacctctattggaagagcctggctatgaagcggatgatataatagctactatagtgaataaatataaggatgatttaaaatatattctctctggagatttagatcttttgcaattagtctcggacaaaacctttctaatacatcctcaaaagggaattactgagtttactatttatgatccaaaagctgtaaaggataggtttggagtagagccctataagattcccttatacaaagtattagtaggggacgaatctgataatattccaggagtaaatggaataggtcctaaaaaggcctcaaagattcttgagaaaatttcaagtgtagatgaatttaaaagtaaaataaaagttttggatagtgatttaagggagcttattgagaaaaattggaatattattgaaagaaatttagaacttgttactttaaaaaatatagataaggatcttattcttaaacccttcgagattaaaagagatgaaaaagtaatagattttttgaagagatatgaacttaagagtattcttcaaaagttatttcctgatcttcaagaggaagaaaatatagagattaaagatgtcgaagagatcaattttaatgaggtagaaaaagaaggctactttgcctttaaatgtcttggagatagggcttttgagggtatttctctttccttcaaggagggggaaggatattttatatctccttttgatttcaataatgagataagaaagaagattgaaaatataatttcttcagagaatgttaaaaaaattggctcttatattcaaagagatttacattttttaaactgtaaaataaagggcgatgtatttgatgttagtctcgcatcttatcttttgaaccctgaaagacaaaatcactctcttgatattttgataggagagtatctaaataaaacctcttttattcctcaaaaatacgctggttatctttttccgttaaagtctattcttgaggagaggataaagaatgaagggttagaatttgtactttataacatagagattccattaatccctgtactttactccatggagaagtgggggataaaggtagataaggaatatttaaaacagctttctgatgaattctgcgagagaattaaaaaattggaagaagagatatatgaacttgcaggaaccagatttaatctcaattctccaaaacaactttctgaagttttatttgagaggttaaaacttccttctggtaagaaaggaaaaacaggatattctacgtcgtcttctgtgcttcaaaacttaataaatgctcatcctatagtgagaaaaatcctccaatatagagaactctataaattgaagagtacttatgtggatgctattcctaatctggttaatccacaaacaggtagagttcatacaaaatttaatcctacaggtacagctacaggaagaataagtagtagtgaacctaatcttcagaatattcctataaaaagtgaagaaggtagaaagataagaagagccttcgtgtcagaagatggatattttcttgtatctcttgattattctcagatagagctaaggattatggctcatctttctcaggagcctaaattaatatctgccttccaaaaaggagaggatattcatagaagaacagcatcggagatttttggagtgccagaggaagaagttgatgatcttttaaggtcaagggcaaaggccgttaattttggaattatttatggtatctcttcttttggactttctgagactgtaagtattacaccagaagaggcagagaaatttatagactcgtattttaagcactatccaagagtgaagctttttatagataagactattcatgaggcaagagaaaaactgtacgttaaaaccttatttggcagaaaaagatatattcctgagattaagagcataaataaacaggtaaggaatgcctatgaaattatagcaataaatgcgccaattcagggaacagctgctgatattataaaacttgccatgatagaaatttacaaggagattgaaaataaaaatctcaagtcaagaatactccttcaaattcatgatgagcttattcttgaagtgccagaggaggagatggaatttactcctttaatggcaaaggaaaaaatggaaaaggtggtagaactttcggttcctcttgtagttgaaatctcggtaggtaaaaatcttgctgaattaaaatgagctataagattggtcgac

SEQ ID NO: 2261 - DNA, 2673 bp, Artificial Sequence
  Description of Artificial Sequence: Synthetic DNA sequence of Dictyoglomus thermophilum DNA R797L
atgaaatacctgctgccgaccgctgctgctggtctgctgctcctcgctgcccagccggcgatggccatggatatcggaattaattcggatccgaaatctctgtgggatctttttcaagaaaataccgagaaagagtccaaaaggaagattctgattattgatggctcaagcctcatatacagggtttattacgcccttccccctttaaagacaaaaaatggtgaattaactaatgctctttatggcttcataagaatacttttaaaggccgtagaagattttaatcctgatcttgtaggcgttgcctttgatagacctgaacctacttttaggcatgtgatttataaagagtataaggctaagagaccacctatgaaggatgatttgaaagcgcagataccatggataagagaatttctaaggttaaatgatatacctctattggaagagcctggctatgaagcggatgatataatagctactatagtgaataaatataaggatgatttaaaatatattctctctggagatttagatcttttgcaattagtctcggacaaaacctttctaatacatcctcaaaagggaattactgagtttactatttatgatccaaaagctgtaaaggataggtttggagtagagccctataagattcccttatacaaagtattagtaggggacgaatctgataatattccaggagtaaatggaataggtcctaaaaaggcctcaaagattcttgagaaaatttcaagtgtagatgaatttaaaagtaaaataaaagttttggatagtgatttaagggagcttattgagaaaaattggaatattattgaaagaaatttagaacttgttactttaaaaaatatagataaggatcttattcttaaacccttcgagattaaaagagatgaaaaagtaatagattttttgaagagatatgaacttaagagtattcttcaaaagttatttcctgatcttcaagaggaagaaaatatagagattaaagatgtcgaagagatcaattttaatgaggtagaaaaagaaggctactttgcctttaaatgtcttggagatagggcttttgagggtatttctctttccttcaaggagggggaaggatattttatatctccttttgatttcaataatgagataagaaagaagattgaaaatataatttcttcagagaatgttaaaaaaattggctcttatattcaaagagatttacattttttaaactgtaaaataaagggcgatgtatttgatgttagtctcgcatcttatcttttgaaccctgaaagacaaaatcactctcttgatattttgataggagagtatctaaataaaacctcttttattcctcaaaaatacgctggttatctttttccgttaaagtctattcttgaggagaggataaagaatgaagggttagaatttgtactttataacatagagattccattaatccctgtactttactccatggagaagtgggggataaaggtagataaggaatatttaaaacagctttctgatgaattctgcgagagaattaaaaaattggaagaagagatatatgaacttgcaggaaccagatttaatctcaattctccaaaacaactttctgaagttttatttgagaggttaaaacttccttctggtaagaaaggaaaaacaggatattctacgtcgtcttctgtgcttcaaaacttaataaatgctcatcctatagtgagaaaaatcctccaatatagagaactctataaattgaagagtacttatgtggatgctattcctaatctggttaatccacaaacaggtagagttcatacaaaatttaatcctacaggtacagctacaggaagaataagtagtagtgaacctaatcttcagaatattcctataaaaagtgaagaaggtagaaagataagaagagccttcgtgtcagaagatggatattttcttgtatctcttgattattctcagatagagctaaggattatggctcatctttctcaggagcctaaattaatatctgccttccaaaaaggagaggatattcatagaagaacagcatcggagatttttggagtgccagaggaagaagttgatgatcttttaaggtcaagggcaaaggccgttaattttggaattatttatggtatctcttcttttggactttctgagactgtaagtattacaccagaagaggcagagaaatttatagactcgtattttaagcactatccaagagtgaagctttttatagataagactattcatgaggcaagagaaaaactgtacgttaaaaccttatttggcagaaaaagatatattcctgagattaagagcataaataaacaggtaaggaatgcctatgaacttatagcaataaatgcgccaattcagggaacagctgctgatattataaaacttgccatgatagaaatttacaaggagattgaaaataaaaatctcaagtcaagaatactccttcaaattcatgatgagcttattcttgaagtgccagaggaggagatggaatttactcctttaatggcaaaggaaaaaatggaaaaggtggtagaactttcggttcctcttgtagttgaaatctcggtaggtaaaaatcttgctgaattaaaatgagctataagattggtcgac

SEQ ID NO: 2262 - DNA, 2673 bp, Artificial Sequence
  Description of Artificial Sequence: Synthetic DNA sequence of Dictyoglomus thermophilum DNA R797K
atgaaatacctgctgccgaccgctgctgctggtctgctgctcctcgctgcccagccggcgatggccatggatatcggaattaattcggatccgaaatctctgtgggatctttttcaagaaaataccgagaaagagtccaaaaggaagattctgattattgatggctcaagcctcatatacagggtttattacgcccttccccctttaaagacaaaaaatggtgaattaactaatgctctttatggcttcataagaatacttttaaaggccgtagaagattttaatcctgatcttgtaggcgttgcctttgatagacctgaacctacttttaggcatgtgatttataaagagtataaggctaagagaccacctatgaaggatgatttgaaagcgcagataccatggataagagaatttctaaggttaaatgatatacctctattggaagagcctggctatgaagcggatgatataatagctactatagtgaataaatataaggatgatttaaaatatattctctctggagatttagatcttttgcaattagtctcggacaaaacctttctaatacatcctcaaaagggaattactgagtttactatttatgatccaaaagctgtaaaggataggtttggagtagagccctataagattcccttatacaaagtattagtaggggacgaatctgataatattccaggagtaaatggaataggtcctaaaaaggcctcaaagattcttgagaaaatttcaagtgtagatgaatttaaaagtaaaataaaagttttggatagtgatttaagggagcttattgagaaaaattggaatattattgaaagaaatttagaacttgttactttaaaaaatatagataaggatcttattcttaaacccttcgagattaaaagagatgaaaaagtaatagattttttgaagagatatgaacttaagagtattcttcaaaagttatttcctgatcttcaagaggaagaaaatatagagattaaagatgtcgaagagatcaattttaatgaggtagaaaaagaaggctactttgcctttaaatgtcttggagatagggcttttgagggtatttctctttccttcaaggagggggaaggatattttatatctccttttgatttcaataatgagataagaaagaagattgaaaatataatttcttcagagaatgttaaaaaaattggctcttatattcaaagagatttacattttttaaactgtaaaataaagggcgatgtatttgatgttagtctcgcatcttatcttttgaaccctgaaagacaaaatcactctcttgatattttgataggagagtatctaaataaaacctcttttattcctcaaaaatacgctggttatctttttccgttaaagtctattcttgaggagaggataaagaatgaagggttagaatttgtactttataacatagagattccattaatccctgtactttactccatggagaagtgggggataaaggtagataaggaatatttaaaacagctttctgatgaattctgcgagagaattaaaaaattggaagaagagatatatgaacttgcaggaaccagatttaatctcaattctccaaaacaactttctgaagttttatttgagaggttaaaacttccttctggtaagaaaggaaaaacaggatattctacgtcgtcttctgtgcttcaaaacttaataaatgctcatcctatagtgagaaaaatcctccaatatagagaactctataaattgaagagtacttatgtggatgctattcctaatctggttaatccacaaacaggtagagttcatacaaaatttaatcctacaggtacagctacaggaagaataagtagtagtgaacctaatcttcagaatattcctataaaaagtgaagaaggtagaaagataagaagagccttcgtgtcagaagatggatattttcttgtatctcttgattattctcagatagagctaaggattatggctcatctttctcaggagcctaaattaatatctgccttccaaaaaggagaggatattcatagaagaacagcatcggagatttttggagtgccagaggaagaagttgatgatcttttaaggtcaagggcaaaggccgttaattttggaattatttatggtatctcttcttttggactttctgagactgtaagtattacaccagaagaggcagagaaatttatagactcgtattttaagcactatccaagagtgaagctttttatagataagactattcatgaggcaagagaaaaactgtacgttaaaaccttatttggcagaaaaagatatattcctgagattaagagcataaataaacaggtaaggaatgcctatgaaaaaatagcaataaatgcgccaattcagggaacagctgctgatattataaaacttgccatgatagaaatttacaaggagattgaaaataaaaatctcaagtcaagaatactccttcaaattcatgatgagcttattcttgaagtgccagaggaggagatggaatttactcctttaatggcaaaggaaaaaatggaaaaggtggtagaactttcggttcctcttgtagttgaaatctcggtaggtaaaaatcttgctgaattaaaatgagctataagattggtcgac

SEQ ID NO: 2263 - DNA, 2673 bp, Artificial Sequence
  Description of Artificial Sequence: Synthetic DNA sequence of Dictyoglomus thermophilum DNA R797M
atgaaatacctgctgccgaccgctgctgctggtctgctgctcctcgctgcccagccggcgatggccatggatatcggaattaattcggatccgaaatctctgtgggatctttttcaagaaaataccgagaaagagtccaaaaggaagattctgattattgatggctcaagcctcatatacagggtttattacgcccttccccctttaaagacaaaaaatggtgaattaactaatgctctttatggcttcataagaatacttttaaaggccgtagaagattttaatcctgatcttgtaggcgttgcctttgatagacctgaacctacttttaggcatgtgatttataaagagtataaggctaagagaccacctatgaaggatgatttgaaagcgcagataccatggataagagaatttctaaggttaaatgatatacctctattggaagagcctggctatgaagcggatgatataatagctactatagtgaataaatataaggatgatttaaaatatattctctctggagatttagatcttttgcaattagtctcggacaaaacctttctaatacatcctcaaaagggaattactgagtttactatttatgatccaaaagctgtaaaggataggtttggagtagagccctataagattcccttatacaaagtattagtaggggacgaatctgataatattccaggagtaaatggaataggtcctaaaaaggcctcaaagattcttgagaaaatttcaagtgtagatgaatttaaaagtaaaataaaagttttggatagtgatttaagggagcttattgagaaaaattggaatattattgaaagaaatttagaacttgttactttaaaaaatatagataaggatcttattcttaaacccttcgagattaaaagagatgaaaaagtaatagattttttgaagagatatgaacttaagagtattcttcaaaagttatttcctgatcttcaagaggaagaaaatatagagattaaagatgtcgaagagatcaattttaatgaggtagaaaaagaaggctactttgcctttaaatgtcttggagatagggcttttgagggtatttctctttccttcaaggagggggaaggatattttatatctccttttgatttcaataatgagataagaaagaagattgaaaatataatttcttcagagaatgttaaaaaaattggctcttatattcaaagagatttacattttttaaactgtaaaataaagggcgatgtatttgatgttagtctcgcatcttatcttttgaaccctgaaagacaaaatcactctcttgatattttgataggagagtatctaaataaaacctcttttattcctcaaaaatacgctggttatctttttccgttaaagtctattcttgaggagaggataaagaatgaagggttagaatttgtactttataacatagagattccattaatccctgtactttactccatggagaagtgggggataaaggtagataaggaatatttaaaacagctttctgatgaattctgcgagagaattaaaaaattggaagaagagatatatgaacttgcaggaaccagatttaatctcaattctccaaaacaactttctgaagttttatttgagaggttaaaacttccttctggtaagaaaggaaaaacaggatattctacgtcgtcttctgtgcttcaaaacttaataaatgctcatcctatagtgagaaaaatcctccaatatagagaactctataaattgaagagtacttatgtggatgctattcctaatctggttaatccacaaacaggtagagttcatacaaaatttaatcctacaggtacagctacaggaagaataagtagtagtgaacctaatcttcagaatattcctataaaaagtgaagaaggtagaaagataagaagagccttcgtgtcagaagatggatattttcttgtatctcttgattattctcagatagagctaaggattatggctcatctttctcaggagcctaaattaatatctgccttccaaaaaggagaggatattcatagaagaacagcatcggagatttttggagtgccagaggaagaagttgatgatcttttaaggtcaagggcaaaggccgttaattttggaattatttatggtatctcttcttttggactttctgagactgtaagtattacaccagaagaggcagagaaatttatagactcgtattttaagcactatccaagagtgaagctttttatagataagactattcatgaggcaagagaaaaactgtacgttaaaaccttatttggcagaaaaagatatattcctgagattaagagcataaataaacaggtaaggaatgcctatgaaatgatagcaataaatgcgccaattcagggaacagctgctgatattataaaacttgccatgatagaaatttacaaggagattgaaaataaaaatctcaagtcaagaatactccttcaaattcatgatgagcttattcttgaagtgccagaggaggagatggaatttactcctttaatggcaaaggaaaaaatggaaaaggtggtagaactttcggttcctcttgtagttgaaatctcggtaggtaaaaatcttgctgaattaaaatgagctataagattggtcgac

SEQ ID NO: 2264 - DNA, 2673 bp, Artificial Sequence
  Description of Artificial Sequence: Synthetic DNA sequence of Dictyoglomus thermophilum DNA R797F
atgaaatacctgctgccgaccgctgctgctggtctgctgctcctcgctgcccagccggcgatggccatggatatcggaattaattcggatccgaaatctctgtgggatctttttcaagaaaataccgagaaagagtccaaaaggaagattctgattattgatggctcaagcctcatatacagggtttattacgcccttccccctttaaagacaaaaaatggtgaattaactaatgctctttatggcttcataagaatacttttaaaggccgtagaagattttaatcctgatcttgtaggcgttgcctttgatagacctgaacctacttttaggcatgtgatttataaagagtataaggctaagagaccacctatgaaggatgatttgaaagcgcagataccatggataagagaatttctaaggttaaatgatatacctctattggaagagcctggctatgaagcggatgatataatagctactatagtgaataaatataaggatgatttaaaatatattctctctggagatttagatcttttgcaattagtctcggacaaaacctttctaatacatcctcaaaagggaattactgagtttactatttatgatccaaaagctgtaaaggataggtttggagtagagccctataagattcccttatacaaagtattagtaggggacgaatctgataatattccaggagtaaatggaataggtcctaaaaaggcctcaaagattcttgagaaaatttcaagtgtagatgaatttaaaagtaaaataaaagttttggatagtgatttaagggagcttattgagaaaaattggaatattattgaaagaaatttagaacttgttactttaaaaaatatagataaggatcttattcttaaacccttcgagattaaaagagatgaaaaagtaatagattttttgaagagatatgaacttaagagtattcttcaaaagttatttcctgatcttcaagaggaagaaaatatagagattaaagatgtcgaagagatcaattttaatgaggtagaaaaagaaggctactttgcctttaaatgtcttggagatagggcttttgagggtatttctctttccttcaaggagggggaaggatattttatatctccttttgatttcaataatgagataagaaagaagattgaaaatataatttcttcagagaatgttaaaaaaattggctcttatattcaaagagatttacattttttaaactgtaaaataaagggcgatgtatttgatgttagtctcgcatcttatcttttgaaccctgaaagacaaaatcactctcttgatattttgataggagagtatctaaataaaacctcttttattcctcaaaaatacgctggttatctttttccgttaaagtctattcttgaggagaggataaagaatgaagggttagaatttgtactttataacatagagattccattaatccctgtactttactccatggagaagtgggggataaaggtagataaggaatatttaaaacagctttctgatgaattctgcgagagaattaaaaaattggaagaagagatatatgaacttgcaggaaccagatttaatctcaattctccaaaacaactttctgaagttttatttgagaggttaaaacttccttctggtaagaaaggaaaaacaggatattctacgtcgtcttctgtgcttcaaaacttaataaatgctcatcctatagtgagaaaaatcctccaatatagagaactctataaattgaagagtacttatgtggatgctattcctaatctggttaatccacaaacaggtagagttcatacaaaatttaatcctacaggtacagctacaggaagaataagtagtagtgaacctaatcttcagaatattcctataaaaagtgaagaaggtagaaagataagaagagccttcgtgtcagaagatggatattttcttgtatctcttgattattctcagatagagctaaggattatggctcatctttctcaggagcctaaattaatatctgccttccaaaaaggagaggatattcatagaagaacagcatcggagatttttggagtgccagaggaagaagttgatgatcttttaaggtcaagggcaaaggccgttaattttggaattatttatggtatctcttcttttggactttctgagactgtaagtattacaccagaagaggcagagaaatttatagactcgtattttaagcactatccaagagtgaagctttttatagataagactattcatgaggcaagagaaaaactgtacgttaaaaccttatttggcagaaaaagatatattcctgagattaagagcataaataaacaggtaaggaatgcctatgaatttatagcaataaatgcgccaattcagggaacagctgctgatattataaaacttgccatgatagaaatttacaaggagattgaaaataaaaatctcaagtcaagaatactccttcaaattcatgatgagcttattcttgaagtgccagaggaggagatggaatttactcctttaatggcaaaggaaaaaatggaaaaggtggtagaactttcggttcctcttgtagttgaaatctcggtaggtaaaaatcttgctgaattaaaatgagctataagattggtcgac

SEQ ID NO: 2265 - DNA, 2673 bp, Artificial Sequence
  Description of Artificial Sequence: Synthetic DNA sequence of Dictyoglomus thermophilum DNA R797P
atgaaatacctgctgccgaccgctgctgctggtctgctgctcctcgctgcccagccggcgatggccatggatatcggaattaattcggatccgaaatctctgtgggatctttttcaagaaaataccgagaaagagtccaaaaggaagattctgattattgatggctcaagcctcatatacagggtttattacgcccttccccctttaaagacaaaaaatggtgaattaactaatgctctttatggcttcataagaatacttttaaaggccgtagaagattttaatcctgatcttgtaggcgttgcctttgatagacctgaacctacttttaggcatgtgatttataaagagtataaggctaagagaccacctatgaaggatgatttgaaagcgcagataccatggataagagaatttctaaggttaaatgatatacctctattggaagagcctggctatgaagcggatgatataatagctactatagtgaataaatataaggatgatttaaaatatattctctctggagatttagatcttttgcaattagtctcggacaaaacctttctaatacatcctcaaaagggaattactgagtttactatttatgatccaaaagctgtaaaggataggtttggagtagagccctataagattcccttatacaaagtattagtaggggacgaatctgataatattccaggagtaaatggaataggtcctaaaaaggcctcaaagattcttgagaaaatttcaagtgtagatgaatttaaaagtaaaataaaagttttggatagtgatttaagggagcttattgagaaaaattggaatattattgaaagaaatttagaacttgttactttaaaaaatatagataaggatcttattcttaaacccttcgagattaaaagagatgaaaaagtaatagattttttgaagagatatgaacttaagagtattcttcaaaagttatttcctgatcttcaagaggaagaaaatatagagattaaagatgtcgaagagatcaattttaatgaggtagaaaaagaaggctactttgcctttaaatgtcttggagatagggcttttgagggtatttctctttccttcaaggagggggaaggatattttatatctccttttgatttcaataatgagataagaaagaagattgaaaatataatttcttcagagaatgttaaaaaaattggctcttatattcaaagagatttacattttttaaactgtaaaataaagggcgatgtatttgatgttagtctcgcatcttatcttttgaaccctgaaagacaaaatcactctcttgatattttgataggagagtatctaaataaaacctcttttattcctcaaaaatacgctggttatctttttccgttaaagtctattcttgaggagaggataaagaatgaagggttagaatttgtactttataacatagagattccattaatccctgtactttactccatggagaagtgggggataaaggtagataaggaatatttaaaacagctttctgatgaattctgcgagagaattaaaaaattggaagaagagatatatgaacttgcaggaaccagatttaatctcaattctccaaaacaactttctgaagttttatttgagaggttaaaacttccttctggtaagaaaggaaaaacaggatattctacgtcgtcttctgtgcttcaaaacttaataaatgctcatcctatagtgagaaaaatcctccaatatagagaactctataaattgaagagtacttatgtggatgctattcctaatctggttaatccacaaacaggtagagttcatacaaaatttaatcctacaggtacagctacaggaagaataagtagtagtgaacctaatcttcagaatattcctataaaaagtgaagaaggtagaaagataagaagagccttcgtgtcagaagatggatattttcttgtatctcttgattattctcagatagagctaaggattatggctcatctttctcaggagcctaaattaatatctgccttccaaaaaggagaggatattcatagaagaacagcatcggagatttttggagtgccagaggaagaagttgatgatcttttaaggtcaagggcaaaggccgttaattttggaattatttatggtatctcttcttttggactttctgagactgtaagtattacaccagaagaggcagagaaatttatagactcgtattttaagcactatccaagagtgaagctttttatagataagactattcatgaggcaagagaaaaactgtacgttaaaaccttatttggcagaaaaagatatattcctgagattaagagcataaataaacaggtaaggaatgcctatgaacctatagcaataaatgcgccaattcagggaacagctgctgatattataaaacttgccatgatagaaatttacaaggagattgaaaataaaaatctcaagtcaagaatactccttcaaattcatgatgagcttattcttgaagtgccagaggaggagatggaatttactcctttaatggcaaaggaaaaaatggaaaaggtggtagaactttcggttcctcttgtagttgaaatctcggtaggtaaaaatcttgctgaattaaaatgagctataagattggtcgac

SEQ ID NO: 2266 - DNA, 2673 bp, Artificial Sequence
  Description of Artificial Sequence: Synthetic DNA sequence of Dictyoglomus thermophilum DNA R797S
atgaaatacctgctgccgaccgctgctgctggtctgctgctcctcgctgcccagccggcgatggccatggatatcggaattaattcggatccgaaatctctgtgggatctttttcaagaaaataccgagaaagagtccaaaaggaagattctgattattgatggctcaagcctcatatacagggtttattacgcccttccccctttaaagacaaaaaatggtgaattaactaatgctctttatggcttcataagaatacttttaaaggccgtagaagattttaatcctgatcttgtaggcgttgcctttgatagacctgaacctacttttaggcatgtgatttataaagagtataaggctaagagaccacctatgaaggatgatttgaaagcgcagataccatggataagagaatttctaaggttaaatgatatacctctattggaagagcctggctatgaagcggatgatataatagctactatagtgaataaatataaggatgatttaaaatatattctctctggagatttagatcttttgcaattagtctcggacaaaacctttctaatacatcctcaaaagggaattactgagtttactatttatgatccaaaagctgtaaaggataggtttggagtagagccctataagattcccttatacaaagtattagtaggggacgaatctgataatattccaggagtaaatggaataggtcctaaaaaggcctcaaagattcttgagaaaatttcaagtgtagatgaatttaaaagtaaaataaaagttttggatagtgatttaagggagcttattgagaaaaattggaatattattgaaagaaatttagaacttgttactttaaaaaatatagataaggatcttattcttaaacccttcgagattaaaagagatgaaaaagtaatagattttttgaagagatatgaacttaagagtattcttcaaaagttatttcctgatcttcaagaggaagaaaatatagagattaaagatgtcgaagagatcaattttaatgaggtagaaaaagaaggctactttgcctttaaatgtcttggagatagggcttttgagggtatttctctttccttcaaggagggggaaggatattttatatctccttttgatttcaataatgagataagaaagaagattgaaaatataatttcttcagagaatgttaaaaaaattggctcttatattcaaagagatttacattttttaaactgtaaaataaagggcgatgtatttgatgttagtctcgcatcttatcttttgaaccctgaaagacaaaatcactctcttgatattttgataggagagtatctaaataaaacctcttttattcctcaaaaatacgctggttatctttttccgttaaagtctattcttgaggagaggataaagaatgaagggttagaatttgtactttataacatagagattccattaatccctgtactttactccatggagaagtgggggataaaggtagataaggaatatttaaaacagctttctgatgaattctgcgagagaattaaaaaattggaagaagagatatatgaacttgcaggaaccagatttaatctcaattctccaaaacaactttctgaagttttatttgagaggttaaaacttccttctggtaagaaaggaaaaacaggatattctacgtcgtcttctgtgcttcaaaacttaataaatgctcatcctatagtgagaaaaatcctccaatatagagaactctataaattgaagagtacttatgtggatgctattcctaatctggttaatccacaaacaggtagagttcatacaaaatttaatcctacaggtacagctacaggaagaataagtagtagtgaacctaatcttcagaatattcctataaaaagtgaagaaggtagaaagataagaagagccttcgtgtcagaagatggatattttcttgtatctcttgattattctcagatagagctaaggattatggctcatctttctcaggagcctaaattaatatctgccttccaaaaaggagaggatattcatagaagaacagcatcggagatttttggagtgccagaggaagaagttgatgatcttttaaggtcaagggcaaaggccgttaattttggaattatttatggtatctcttcttttggactttctgagactgtaagtattacaccagaagaggcagagaaatttatagactcgtattttaagcactatccaagagtgaagctttttatagataagactattcatgaggcaagagaaaaactgtacgttaaaaccttatttggcagaaaaagatatattcctgagattaagagcataaataaacaggtaaggaatgcctatgaatctatagcaataaatgcgccaattcagggaacagctgctgatattataaaacttgccatgatagaaatttacaaggagattgaaaataaaaatctcaagtcaagaatactccttcaaattcatgatgagcttattcttgaagtgccagaggaggagatggaatttactcctttaatggcaaaggaaaaaatggaaaaggtggtagaactttcggttcctcttgtagttgaaatctcggtaggtaaaaatcttgctgaattaaaatgagctataagattggtcgac

SEQ ID NO: 2267 - DNA, 2673 bp, Artificial Sequence
  Description of Artificial Sequence: Synthetic DNA sequence of Dictyoglomus thermophilum DNA R797T
atgaaatacctgctgccgaccgctgctgctggtctgctgctcctcgctgcccagccggcgatggccatggatatcggaattaattcggatccgaaatctctgtgggatctttttcaagaaaataccgagaaagagtccaaaaggaagattctgattattgatggctcaagcctcatatacagggtttattacgcccttccccctttaaagacaaaaaatggtgaattaactaatgctctttatggcttcataagaatacttttaaaggccgtagaagattttaatcctgatcttgtaggcgttgcctttgatagacctgaacctacttttaggcatgtgatttataaagagtataaggctaagagaccacctatgaaggatgatttgaaagcgcagataccatggataagagaatttctaaggttaaatgatatacctctattggaagagcctggctatgaagcggatgatataatagctactatagtgaataaatataaggatgatttaaaatatattctctctggagatttagatcttttgcaattagtctcggacaaaacctttctaatacatcctcaaaagggaattactgagtttactatttatgatccaaaagctgtaaaggataggtttggagtagagccctataagattcccttatacaaagtattagtaggggacgaatctgataatattccaggagtaaatggaataggtcctaaaaaggcctcaaagattcttgagaaaatttcaagtgtagatgaatttaaaagtaaaataaaagttttggatagtgatttaagggagcttattgagaaaaattggaatattattgaaagaaatttagaacttgttactttaaaaaatatagataaggatcttattcttaaacccttcgagattaaaagagatgaaaaagtaatagattttttgaagagatatgaacttaagagtattcttcaaaagttatttcctgatcttcaagaggaagaaaatatagagattaaagatgtcgaagagatcaattttaatgaggtagaaaaagaaggctactttgcctttaaatgtcttggagatagggcttttgagggtatttctctttccttcaaggagggggaaggatattttatatctccttttgatttcaataatgagataagaaagaagattgaaaatataatttcttcagagaatgttaaaaaaattggctcttatattcaaagagatttacattttttaaactgtaaaataaagggcgatgtatttgatgttagtctcgcatcttatcttttgaaccctgaaagacaaaatcactctcttgatattttgataggagagtatctaaataaaacctcttttattcctcaaaaatacgctggttatctttttccgttaaagtctattcttgaggagaggataaagaatgaagggttagaatttgtactttataacatagagattccattaatccctgtactttactccatggagaagtgggggataaaggtagataaggaatatttaaaacagctttctgatgaattctgcgagagaattaaaaaattggaagaagagatatatgaacttgcaggaaccagatttaatctcaattctccaaaacaactttctgaagttttatttgagaggttaaaacttccttctggtaagaaaggaaaaacaggatattctacgtcgtcttctgtgcttcaaaacttaataaatgctcatcctatagtgagaaaaatcctccaatatagagaactctataaattgaagagtacttatgtggatgctattcctaatctggttaatccacaaacaggtagagttcatacaaaatttaatcctacaggtacagctacaggaagaataagtagtagtgaacctaatcttcagaatattcctataaaaagtgaagaaggtagaaagataagaagagccttcgtgtcagaagatggatattttcttgtatctcttgattattctcagatagagctaaggattatggctcatctttctcaggagcctaaattaatatctgccttccaaaaaggagaggatattcatagaagaacagcatcggagatttttggagtgccagaggaagaagttgatgatcttttaaggtcaagggcaaaggccgttaattttggaattatttatggtatctcttcttttggactttctgagactgtaagtattacaccagaagaggcagagaaatttatagactcgtattttaagcactatccaagagtgaagctttttatagataagactattcatgaggcaagagaaaaactgtacgttaaaaccttatttggcagaaaaagatatattcctgagattaagagcataaataaacaggtaaggaatgcctatgaaactatagcaataaatgcgccaattcagggaacagctgctgatattataaaacttgccatgatagaaatttacaaggagattgaaaataaaaatctcaagtcaagaatactccttcaaattcatgatgagcttattcttgaagtgccagaggaggagatggaatttactcctttaatggcaaaggaaaaaatggaaaaggtggtagaactttcggttcctcttgtagttgaaatctcggtaggtaaaaatcttgctgaattaaaatgagctataagattggtcgac

SEQ ID NO: 2268 - DNA, 2673 bp, Artificial Sequence
  Description of Artificial Sequence: Synthetic DNA sequence of Dictyoglomus thermophilum DNA R797W
atgaaatacctgctgccgaccgctgctgctggtctgctgctcctcgctgcccagccggcgatggccatggatatcggaattaattcggatccgaaatctctgtgggatctttttcaagaaaataccgagaaagagtccaaaaggaagattctgattattgatggctcaagcctcatatacagggtttattacgcccttccccctttaaagacaaaaaatggtgaattaactaatgctctttatggcttcataagaatacttttaaaggccgtagaagattttaatcctgatcttgtaggcgttgcctttgatagacctgaacctacttttaggcatgtgatttataaagagtataaggctaagagaccacctatgaaggatgatttgaaagcgcagataccatggataagagaatttctaaggttaaatgatatacctctattggaagagcctggctatgaagcggatgatataatagctactatagtgaataaatataaggatgatttaaaatatattctctctggagatttagatcttttgcaattagtctcggacaaaacctttctaatacatcctcaaaagggaattactgagtttactatttatgatccaaaagctgtaaaggataggtttggagtagagccctataagattcccttatacaaagtattagtaggggacgaatctgataatattccaggagtaaatggaataggtcctaaaaaggcctcaaagattcttgagaaaatttcaagtgtagatgaatttaaaagtaaaataaaagttttggatagtgatttaagggagcttattgagaaaaattggaatattattgaaagaaatttagaacttgttactttaaaaaatatagataaggatcttattcttaaacccttcgagattaaaagagatgaaaaagtaatagattttttgaagagatatgaacttaagagtattcttcaaaagttatttcctgatcttcaagaggaagaaaatatagagattaaagatgtcgaagagatcaattttaatgaggtagaaaaagaaggctactttgcctttaaatgtcttggagatagggcttttgagggtatttctctttccttcaaggagggggaaggatattttatatctccttttgatttcaataatgagataagaaagaagattgaaaatataatttcttcagagaatgttaaaaaaattggctcttatattcaaagagatttacattttttaaactgtaaaataaagggcgatgtatttgatgttagtctcgcatcttatcttttgaaccctgaaagacaaaatcactctcttgatattttgataggagagtatctaaataaaacctcttttattcctcaaaaatacgctggttatctttttccgttaaagtctattcttgaggagaggataaagaatgaagggttagaatttgtactttataacatagagattccattaatccctgtactttactccatggagaagtgggggataaaggtagataaggaatatttaaaacagctttctgatgaattctgcgagagaattaaaaaattggaagaagagatatatgaacttgcaggaaccagatttaatctcaattctccaaaacaactttctgaagttttatttgagaggttaaaacttccttctggtaagaaaggaaaaacaggatattctacgtcgtcttctgtgcttcaaaacttaataaatgctcatcctatagtgagaaaaatcctccaatatagagaactctataaattgaagagtacttatgtggatgctattcctaatctggttaatccacaaacaggtagagttcatacaaaatttaatcctacaggtacagctacaggaagaataagtagtagtgaacctaatcttcagaatattcctataaaaagtgaagaaggtagaaagataagaagagccttcgtgtcagaagatggatattttcttgtatctcttgattattctcagatagagctaaggattatggctcatctttctcaggagcctaaattaatatctgccttccaaaaaggagaggatattcatagaagaacagcatcggagatttttggagtgccagaggaagaagttgatgatcttttaaggtcaagggcaaaggccgttaattttggaattatttatggtatctcttcttttggactttctgagactgtaagtattacaccagaagaggcagagaaatttatagactcgtattttaagcactatccaagagtgaagctttttatagataagactattcatgaggcaagagaaaaactgtacgttaaaaccttatttggcagaaaaagatatattcctgagattaagagcataaataaacaggtaaggaatgcctatgaatggatagcaataaatgcgccaattcagggaacagctgctgatattataaaacttgccatgatagaaatttacaaggagattgaaaataaaaatctcaagtcaagaatactccttcaaattcatgatgagcttattcttgaagtgccagaggaggagatggaatttactcctttaatggcaaaggaaaaaatggaaaaggtggtagaactttcggttcctcttgtagttgaaatctcggtaggtaaaaatcttgctgaattaaaatgagctataagattggtcgac

SEQ ID NO: 2269 - DNA, 2673 bp, Artificial Sequence
  Description of Artificial Sequence: Synthetic DNA sequence of Dictyoglomus thermophilum DNA R797Y
atgaaatacctgctgccgaccgctgctgctggtctgctgctcctcgctgcccagccggcgatggccatggatatcggaattaattcggatccgaaatctctgtgggatctttttcaagaaaataccgagaaagagtccaaaaggaagattctgattattgatggctcaagcctcatatacagggtttattacgcccttccccctttaaagacaaaaaatggtgaattaactaatgctctttatggcttcataagaatacttttaaaggccgtagaagattttaatcctgatcttgtaggcgttgcctttgatagacctgaacctacttttaggcatgtgatttataaagagtataaggctaagagaccacctatgaaggatgatttgaaagcgcagataccatggataagagaatttctaaggttaaatgatatacctctattggaagagcctggctatgaagcggatgatataatagctactatagtgaataaatataaggatgatttaaaatatattctctctggagatttagatcttttgcaattagtctcggacaaaacctttctaatacatcctcaaaagggaattactgagtttactatttatgatccaaaagctgtaaaggataggtttggagtagagccctataagattcccttatacaaagtattagtaggggacgaatctgataatattccaggagtaaatggaataggtcctaaaaaggcctcaaagattcttgagaaaatttcaagtgtagatgaatttaaaagtaaaataaaagttttggatagtgatttaagggagcttattgagaaaaattggaatattattgaaagaaatttagaacttgttactttaaaaaatatagataaggatcttattcttaaacccttcgagattaaaagagatgaaaaagtaatagattttttgaagagatatgaacttaagagtattcttcaaaagttatttcctgatcttcaagaggaagaaaatatagagattaaagatgtcgaagagatcaattttaatgaggtagaaaaagaaggctactttgcctttaaatgtcttggagatagggcttttgagggtatttctctttccttcaaggagggggaaggatattttatatctccttttgatttcaataatgagataagaaagaagattgaaaatataatttcttcagagaatgttaaaaaaattggctcttatattcaaagagatttacattttttaaactgtaaaataaagggcgatgtatttgatgttagtctcgcatcttatcttttgaaccctgaaagacaaaatcactctcttgatattttgataggagagtatctaaataaaacctcttttattcctcaaaaatacgctggttatctttttccgttaaagtctattcttgaggagaggataaagaatgaagggttagaatttgtactttataacatagagattccattaatccctgtactttactccatggagaagtgggggataaaggtagataaggaatatttaaaacagctttctgatgaattctgcgagagaattaaaaaattggaagaagagatatatgaacttgcaggaaccagatttaatctcaattctccaaaacaactttctgaagttttatttgagaggttaaaacttccttctggtaagaaaggaaaaacaggatattctacgtcgtcttctgtgcttcaaaacttaataaatgctcatcctatagtgagaaaaatcctccaatatagagaactctataaattgaagagtacttatgtggatgctattcctaatctggttaatccacaaacaggtagagttcatacaaaatttaatcctacaggtacagctacaggaagaataagtagtagtgaacctaatcttcagaatattcctataaaaagtgaagaaggtagaaagataagaagagccttcgtgtcagaagatggatattttcttgtatctcttgattattctcagatagagctaaggattatggctcatctttctcaggagcctaaattaatatctgccttccaaaaaggagaggatattcatagaagaacagcatcggagatttttggagtgccagaggaagaagttgatgatcttttaaggtcaagggcaaaggccgttaattttggaattatttatggtatctcttcttttggactttctgagactgtaagtattacaccagaagaggcagagaaatttatagactcgtattttaagcactatccaagagtgaagctttttatagataagactattcatgaggcaagagaaaaactgtacgttaaaaccttatttggcagaaaaagatatattcctgagattaagagcataaataaacaggtaaggaatgcctatgaatatatagcaataaatgcgccaattcagggaacagctgctgatattataaaacttgccatgatagaaatttacaaggagattgaaaataaaaatctcaagtcaagaatactccttcaaattcatgatgagcttattcttgaagtgccagaggaggagatggaatttactcctttaatggcaaaggaaaaaatggaaaaggtggtagaactttcggttcctcttgtagttgaaatctcggtaggtaaaaatcttgctgaattaaaatgagctataagattggtcgac

SEQ ID NO: 2270 - DNA, 2673 bp, Artificial Sequence
  Description of Artificial Sequence: Synthetic DNA sequence of Dictyoglomus thermophilum DNA R797V
atgaaatacctgctgccgaccgctgctgctggtctgctgctcctcgctgcccagccggcgatggccatggatatcggaattaattcggatccgaaatctctgtgggatctttttcaagaaaataccgagaaagagtccaaaaggaagattctgattattgatggctcaagcctcatatacagggtttattacgcccttccccctttaaagacaaaaaatggtgaattaactaatgctctttatggcttcataagaatacttttaaaggccgtagaagattttaatcctgatcttgtaggcgttgcctttgatagacctgaacctacttttaggcatgtgatttataaagagtataaggctaagagaccacctatgaaggatgatttgaaagcgcagataccatggataagagaatttctaaggttaaatgatatacctctattggaagagcctggctatgaagcggatgatataatagctactatagtgaataaatataaggatgatttaaaatatattctctctggagatttagatcttttgcaattagtctcggacaaaacctttctaatacatcctcaaaagggaattactgagtttactatttatgatccaaaagctgtaaaggataggtttggagtagagccctataagattcccttatacaaagtattagtaggggacgaatctgataatattccaggagtaaatggaataggtcctaaaaaggcctcaaagattcttgagaaaatttcaagtgtagatgaatttaaaagtaaaataaaagttttggatagtgatttaagggagcttattgagaaaaattggaatattattgaaagaaatttagaacttgttactttaaaaaatatagataaggatcttattcttaaacccttcgagattaaaagagatgaaaaagtaatagattttttgaagagatatgaacttaagagtattcttcaaaagttatttcctgatcttcaagaggaagaaaatatagagattaaagatgtcgaagagatcaattttaatgaggtagaaaaagaaggctactttgcctttaaatgtcttggagatagggcttttgagggtatttctctttccttcaaggagggggaaggatattttatatctccttttgatttcaataatgagataagaaagaagattgaaaatataatttcttcagagaatgttaaaaaaattggctcttatattcaaagagatttacattttttaaactgtaaaataaagggcgatgtatttgatgttagtctcgcatcttatcttttgaaccctgaaagacaaaatcactctcttgatattttgataggagagtatctaaataaaacctcttttattcctcaaaaatacgctggttatctttttccgttaaagtctattcttgaggagaggataaagaatgaagggttagaatttgtactttataacatagagattccattaatccctgtactttactccatggagaagtgggggataaaggtagataaggaatatttaaaacagctttctgatgaattctgcgagagaattaaaaaattggaagaagagatatatgaacttgcaggaaccagatttaatctcaattctccaaaacaactttctgaagttttatttgagaggttaaaacttccttctggtaagaaaggaaaaacaggatattctacgtcgtcttctgtgcttcaaaacttaataaatgctcatcctatagtgagaaaaatcctccaatatagagaactctataaattgaagagtacttatgtggatgctattcctaatctggttaatccacaaacaggtagagttcatacaaaatttaatcctacaggtacagctacaggaagaataagtagtagtgaacctaatcttcagaatattcctataaaaagtgaagaaggtagaaagataagaagagccttcgtgtcagaagatggatattttcttgtatctcttgattattctcagatagagctaaggattatggctcatctttctcaggagcctaaattaatatctgccttccaaaaaggagaggatattcatagaagaacagcatcggagatttttggagtgccagaggaagaagttgatgatcttttaaggtcaagggcaaaggccgttaattttggaattatttatggtatctcttcttttggactttctgagactgtaagtattacaccagaagaggcagagaaatttatagactcgtattttaagcactatccaagagtgaagctttttatagataagactattcatgaggcaagagaaaaactgtacgttaaaaccttatttggcagaaaaagatatattcctgagattaagagcataaataaacaggtaaggaatgcctatgaagttatagcaataaatgcgccaattcagggaacagctgctgatattataaaacttgccatgatagaaatttacaaggagattgaaaataaaaatctcaagtcaagaatactccttcaaattcatgatgagcttattcttgaagtgccagaggaggagatggaatttactcctttaatggcaaaggaaaaaatggaaaaggtggtagaactttcggttcctcttgtagttgaaatctcggtaggtaaaaatcttgctgaattaaaatgagctataagattggtcgac

SEQ ID NO: 2271 - DNA, 2712 bp, Artificial Sequence
  Description of Artificial Sequence: Synthetic DNA sequence of Bacillus caldolyticus EA1 DNA polymerase R795A
atgaaatacctgctgccgaccgctgctgctggtctgctgctcctcgctgcccagccggcgatggccatgggattgaaaaaaaagcttgttttaatcgacggcagcagcgtggcgtaccgcgcctttttcgccttgccgcttttgcataacgacaaaggcatccatacgaacgccgtctacgggtttacgatgatgttgaataaaattttggcggaagaagagccaactcatatgcttgtcgcgtttgacgccgggaaaacgacgttccggcatgaagcgtttcaagagtataaaggtgggcgccagcagacgccaccggagctgtcggagcagtttccgctgttgcgcgagctgctgagggcgtatcgcatccccgcctatgaactcgagaactacgaagcggacgatattatcggaacgcttgccgcccgcgctgagcaggaagggtttgaggtgaaagtcatttccggcgaccgcgatctgacccagctcgcctccccccatgtgacggtggacattacgaaaaaagggattaccgatatcgaaccgtacacgccggaggcggtccgcgaaaaatacggcttaactccggaacaaatcgttgatttgaaaggattgatgggcgacaaatcggacaacattcccggagtgccgggcatcggggaaaagacggcggtcaagctgctcaagcaattcggcacggtcgaaaacgtgcttgcctccattgacgagatcaaaggcgaaaagttgaaagaaacgctgcgccaacaccgggagatggcgctgttaagcaaaaagctcgccgccattcgccgcgacgccccggtcgagctctcgcttgatgacatcgtctatcaaggggaagaccgggagaaagtggtcgctttatttaaagagcttgggtttcaatcgtttttagagaaaatggaatcgccgtcatcagaagaggaaaaaccgcttgccaagatggcatttacgcttgctgaccgcgtgacggaggagatgcttgccgacaaggcggcgcttgtcgttgaagtggtcgaggaaaattatcatgatgcgccgatcgtcggcatcgctgtggtcaacgaacatggacggtttttcctgcgcccggagacggcgcttgccgatccgcagtttgtcgcctggcttggtgatgaaacgaagaaaaaaagcatgtttgactcaaagcgcgcggcagtcgccttgaaatggaaaggaattgagctatgcggcgtttcctttgatttattgctggccgcctatttgcttgatccggcgcaaggtgttgatgatgtggctgccgcagcaaaaatgaagcaatacgaagcggtgcgctcggatgaagcggtgtatggcaaaggggcgaagcgggccgtgccggatgagccagtgctcgccgagcatctcgtccgcaaggcggcggcgatttgggcgctcgaacgtccgtttttggatgagctgcgccgcaacgaacaagatcggttgctcgtcgagctcgagcagccgttgtcttcgattttggcggaaatggaatttgccggagtgaaagtggatacgaagcggctcgaacagatgggcgaagagctcgccgagcagctgcgcacggtcgagcagcgcatttatgagctcgccggccaagaattcaacatcaattcaccgaaacagctcggcgtcattttatttgaaaaactgcagctgcccgtcttgaaaaaaacgaaaaccggctactccacttcggcggatgtgcttgaaaaacttgcgccttatcacgagatcgtggaaaacattttgcattaccgccagcttggcaagttgcagtcgacgtatattgaaggattgctgaaagtcgtgcgacccgatacaaagaaggtgcatacgattttcaatcaggcgttgacgcaaaccggacggctcagctcgacggagccgaacttgcaaaacattccgattcggcttgaggaaggacggaaaatccgccaagcgttcgtgccgtcggagtctgattggctcattttcgctgccgactactcgcaaattgagttgcgcgtcctcgcccatattgcggaagatgacaatttaatggaagcgttccgccgcgatttggatatccatacgaaaacagcgatggacattttccaagtgagcgaggacgaagtgacgcccaacatgcgccgtcaggcgaaggcggtcaactttgggatcgtttacgggatcagtgattacggcttggcgcaaaacttaaatatttcacgcaaagaggccgctgaattcatcgagcgctacttcgaaagcttccctggcgtgaagcggtatatggaaaacattgtgcaagaagcaaaacagaaagggtatgtgacgacgctgctgcatcggcgcgcttatttgccggatatcacgagccgcaacttcaacgtccgcagctttgctgaacggatggcgatgaacacgccgattcaagggagcgccgctgacattattaaaaaggcgatgatcgatctgaacgctagactgaaggaagagcggctgcaagcgcgccttttgctacaggtgcatgacgagctcattttggaggcgccgaaagaagagatggagcggctgtgccggctcgttccggaagtgatggagcaagcggtcacacttcgcgtgccgctcaaagtcgattaccattatggctcgacgtggtatgacgcgaaataaaaaggatcc

SEQ ID NO: 2272 - DNA, 2712 bp, Artificial Sequence
  Description of Artificial Sequence: Synthetic DNA sequence of Bacillus caldolyticus EA1 DNA polymerase R795T
atgaaatacctgctgccgaccgctgctgctggtctgctgctcctcgctgcccagccggcgatggccatgggattgaaaaaaaagcttgttttaatcgacggcagcagcgtggcgtaccgcgcctttttcgccttgccgcttttgcataacgacaaaggcatccatacgaacgccgtctacgggtttacgatgatgttgaataaaattttggcggaagaagagccaactcatatgcttgtcgcgtttgacgccgggaaaacgacgttccggcatgaagcgtttcaagagtataaaggtgggcgccagcagacgccaccggagctgtcggagcagtttccgctgttgcgcgagctgctgagggcgtatcgcatccccgcctatgaactcgagaactacgaagcggacgatattatcggaacgcttgccgcccgcgctgagcaggaagggtttgaggtgaaagtcatttccggcgaccgcgatctgacccagctcgcctccccccatgtgacggtggacattacgaaaaaagggattaccgatatcgaaccgtacacgccggaggcggtccgcgaaaaatacggcttaactccggaacaaatcgttgatttgaaaggattgatgggcgacaaatcggacaacattcccggagtgccgggcatcggggaaaagacggcggtcaagctgctcaagcaattcggcacggtcgaaaacgtgcttgcctccattgacgagatcaaaggcgaaaagttgaaagaaacgctgcgccaacaccgggagatggcgctgttaagcaaaaagctcgccgccattcgccgcgacgccccggtcgagctctcgcttgatgacatcgtctatcaaggggaagaccgggagaaagtggtcgctttatttaaagagcttgggtttcaatcgtttttagagaaaatggaatcgccgtcatcagaagaggaaaaaccgcttgccaagatggcatttacgcttgctgaccgcgtgacggaggagatgcttgccgacaaggcggcgcttgtcgttgaagtggtcgaggaaaattatcatgatgcgccgatcgtcggcatcgctgtggtcaacgaacatggacggtttttcctgcgcccggagacggcgcttgccgatccgcagtttgtcgcctggcttggtgatgaaacgaagaaaaaaagcatgtttgactcaaagcgcgcggcagtcgccttgaaatggaaaggaattgagctatgcggcgtttcctttgatttattgctggccgcctatttgcttgatccggcgcaaggtgttgatgatgtggctgccgcagcaaaaatgaagcaatacgaagcggtgcgctcggatgaagcggtgtatggcaaaggggcgaagcgggccgtgccggatgagccagtgctcgccgagcatctcgtccgcaaggcggcggcgatttgggcgctcgaacgtccgtttttggatgagctgcgccgcaacgaacaagatcggttgctcgtcgagctcgagcagccgttgtcttcgattttggcggaaatggaatttgccggagtgaaagtggatacgaagcggctcgaacagatgggcgaagagctcgccgagcagctgcgcacggtcgagcagcgcatttatgagctcgccggccaagaattcaacatcaattcaccgaaacagctcggcgtcattttatttgaaaaactgcagctgcccgtcttgaaaaaaacgaaaaccggctactccacttcggcggatgtgcttgaaaaacttgcgccttatcacgagatcgtggaaaacattttgcattaccgccagcttggcaagttgcagtcgacgtatattgaaggattgctgaaagtcgtgcgacccgatacaaagaaggtgcatacgattttcaatcaggcgttgacgcaaaccggacggctcagctcgacggagccgaacttgcaaaacattccgattcggcttgaggaaggacggaaaatccgccaagcgttcgtgccgtcggagtctgattggctcattttcgctgccgactactcgcaaattgagttgcgcgtcctcgcccatattgcggaagatgacaatttaatggaagcgttccgccgcgatttggatatccatacgaaaacagcgatggacattttccaagtgagcgaggacgaagtgacgcccaacatgcgccgtcaggcgaaggcggtcaactttgggatcgtttacgggatcagtgattacggcttggcgcaaaacttaaatatttcacgcaaagaggccgctgaattcatcgagcgctacttcgaaagcttccctggcgtgaagcggtatatggaaaacattgtgcaagaagcaaaacagaaagggtatgtgacgacgctgctgcatcggcgcacttatttgccggatatcacgagccgcaacttcaacgtccgcagctttgctgaacggatggcgatgaacacgccgattcaagggagcgccgctgacattattaaaaaggcgatgatcgatctgaacgctagactgaaggaagagcggctgcaagcgcgccttttgctacaggtgcatgacgagctcattttggaggcgccgaaagaagagatggagcggctgtgccggctcgttccggaagtgatggagcaagcggtcacacttcgcgtgccgctcaaagtcgattaccattatggctcgacgtggtatgacgcgaaataaaaaggatcc

SEQ ID NO: 2273 - DNA, 2712 bp, Artificial Sequence
  Description of Artificial Sequence: Synthetic DNA sequence of Bacillus caldolyticus EA1 DNA polymerase R795C
atgaaatacctgctgccgaccgctgctgctggtctgctgctcctcgctgcccagccggcgatggccatgggattgaaaaaaaagcttgttttaatcgacggcagcagcgtggcgtaccgcgcctttttcgccttgccgcttttgcataacgacaaaggcatccatacgaacgccgtctacgggtttacgatgatgttgaataaaattttggcggaagaagagccaactcatatgcttgtcgcgtttgacgccgggaaaacgacgttccggcatgaagcgtttcaagagtataaaggtgggcgccagcagacgccaccggagctgtcggagcagtttccgctgttgcgcgagctgctgagggcgtatcgcatccccgcctatgaactcgagaactacgaagcggacgatattatcggaacgcttgccgcccgcgctgagcaggaagggtttgaggtgaaagtcatttccggcgaccgcgatctgacccagctcgcctccccccatgtgacggtggacattacgaaaaaagggattaccgatatcgaaccgtacacgccggaggcggtccgcgaaaaatacggcttaactccggaacaaatcgttgatttgaaaggattgatgggcgacaaatcggacaacattcccggagtgccgggcatcggggaaaagacggcggtcaagctgctcaagcaattcggcacggtcgaaaacgtgcttgcctccattgacgagatcaaaggcgaaaagttgaaagaaacgctgcgccaacaccgggagatggcgctgttaagcaaaaagctcgccgccattcgccgcgacgccccggtcgagctctcgcttgatgacatcgtctatcaaggggaagaccgggagaaagtggtcgctttatttaaagagcttgggtttcaatcgtttttagagaaaatggaatcgccgtcatcagaagaggaaaaaccgcttgccaagatggcatttacgcttgctgaccgcgtgacggaggagatgcttgccgacaaggcggcgcttgtcgttgaagtggtcgaggaaaattatcatgatgcgccgatcgtcggcatcgctgtggtcaacgaacatggacggtttttcctgcgcccggagacggcgcttgccgatccgcagtttgtcgcctggcttggtgatgaaacgaagaaaaaaagcatgtttgactcaaagcgcgcggcagtcgccttgaaatggaaaggaattgagctatgcggcgtttcctttgatttattgctggccgcctatttgcttgatccggcgcaaggtgttgatgatgtggctgccgcagcaaaaatgaagcaatacgaagcggtgcgctcggatgaagcggtgtatggcaaaggggcgaagcgggccgtgccggatgagccagtgctcgccgagcatctcgtccgcaaggcggcggcgatttgggcgctcgaacgtccgtttttggatgagctgcgccgcaacgaacaagatcggttgctcgtcgagctcgagcagccgttgtcttcgattttggcggaaatggaatttgccggagtgaaagtggatacgaagcggctcgaacagatgggcgaagagctcgccgagcagctgcgcacggtcgagcagcgcatttatgagctcgccggccaagaattcaacatcaattcaccgaaacagctcggcgtcattttatttgaaaaactgcagctgcccgtcttgaaaaaaacgaaaaccggctactccacttcggcggatgtgcttgaaaaacttgcgccttatcacgagatcgtggaaaacattttgcattaccgccagcttggcaagttgcagtcgacgtatattgaaggattgctgaaagtcgtgcgacccgatacaaagaaggtgcatacgattttcaatcaggcgttgacgcaaaccggacggctcagctcgacggagccgaacttgcaaaacattccgattcggcttgaggaaggacggaaaatccgccaagcgttcgtgccgtcggagtctgattggctcattttcgctgccgactactcgcaaattgagttgcgcgtcctcgcccatattgcggaagatgacaatttaatggaagcgttccgccgcgatttggatatccatacgaaaacagcgatggacattttccaagtgagcgaggacgaagtgacgcccaacatgcgccgtcaggcgaaggcggtcaactttgggatcgtttacgggatcagtgattacggcttggcgcaaaacttaaatatttcacgcaaagaggccgctgaattcatcgagcgctacttcgaaagcttccctggcgtgaagcggtatatggaaaacattgtgcaagaagcaaaacagaaagggtatgtgacgacgctgctgcatcggcgctgttatttgccggatatcacgagccgcaacttcaacgtccgcagctttgctgaacggatggcgatgaacacgccgattcaagggagcgccgctgacattattaaaaaggcgatgatcgatctgaacgctagactgaaggaagagcggctgcaagcgcgccttttgctacaggtgcatgacgagctcattttggaggcgccgaaagaagagatggagcggctgtgccggctcgttccggaagtgatggagcaagcggtcacacttcgcgtgccgctcaaagtcgattaccattatggctcgacgtggtatgacgcgaaataaaaaggatcc

SEQ ID NO: 2274 - DNA, 2712 bp, Artificial Sequence
  Description of Artificial Sequence: Synthetic DNA sequence of Bacillus caldolyticus EA1 DNA polymerase R795G
atgaaatacctgctgccgaccgctgctgctggtctgctgctcctcgctgcccagccggcgatggccatgggattgaaaaaaaagcttgttttaatcgacggcagcagcgtggcgtaccgcgcctttttcgccttgccgcttttgcataacgacaaaggcatccatacgaacgccgtctacgggtttacgatgatgttgaataaaattttggcggaagaagagccaactcatatgcttgtcgcgtttgacgccgggaaaacgacgttccggcatgaagcgtttcaagagtataaaggtgggcgccagcagacgccaccggagctgtcggagcagtttccgctgttgcgcgagctgctgagggcgtatcgcatccccgcctatgaactcgagaactacgaagcggacgatattatcggaacgcttgccgcccgcgctgagcaggaagggtttgaggtgaaagtcatttccggcgaccgcgatctgacccagctcgcctccccccatgtgacggtggacattacgaaaaaagggattaccgatatcgaaccgtacacgccggaggcggtccgcgaaaaatacggcttaactccggaacaaatcgttgatttgaaaggattgatgggcgacaaatcggacaacattcccggagtgccgggcatcggggaaaagacggcggtcaagctgctcaagcaattcggcacggtcgaaaacgtgcttgcctccattgacgagatcaaaggcgaaaagttgaaagaaacgctgcgccaacaccgggagatggcgctgttaagcaaaaagctcgccgccattcgccgcgacgccccggtcgagctctcgcttgatgacatcgtctatcaaggggaagaccgggagaaagtggtcgctttatttaaagagcttgggtttcaatcgtttttagagaaaatggaatcgccgtcatcagaagaggaaaaaccgcttgccaagatggcatttacgcttgctgaccgcgtgacggaggagatgcttgccgacaaggcggcgcttgtcgttgaagtggtcgaggaaaattatcatgatgcgccgatcgtcggcatcgctgtggtcaacgaacatggacggtttttcctgcgcccggagacggcgcttgccgatccgcagtttgtcgcctggcttggtgatgaaacgaagaaaaaaagcatgtttgactcaaagcgcgcggcagtcgccttgaaatggaaaggaattgagctatgcggcgtttcctttgatttattgctggccgcctatttgcttgatccggcgcaaggtgttgatgatgtggctgccgcagcaaaaatgaagcaatacgaagcggtgcgctcggatgaagcggtgtatggcaaaggggcgaagcgggccgtgccggatgagccagtgctcgccgagcatctcgtccgcaaggcggcggcgatttgggcgctcgaacgtccgtttttggatgagctgcgccgcaacgaacaagatcggttgctcgtcgagctcgagcagccgttgtcttcgattttggcggaaatggaatttgccggagtgaaagtggatacgaagcggctcgaacagatgggcgaagagctcgccgagcagctgcgcacggtcgagcagcgcatttatgagctcgccggccaagaattcaacatcaattcaccgaaacagctcggcgtcattttatttgaaaaactgcagctgcccgtcttgaaaaaaacgaaaaccggctactccacttcggcggatgtgcttgaaaaacttgcgccttatcacgagatcgtggaaaacattttgcattaccgccagcttggcaagttgcagtcgacgtatattgaaggattgctgaaagtcgtgcgacccgatacaaagaaggtgcatacgattttcaatcaggcgttgacgcaaaccggacggctcagctcgacggagccgaacttgcaaaacattccgattcggcttgaggaaggacggaaaatccgccaagcgttcgtgccgtcggagtctgattggctcattttcgctgccgactactcgcaaattgagttgcgcgtcctcgcccatattgcggaagatgacaatttaatggaagcgttccgccgcgatttggatatccatacgaaaacagcgatggacattttccaagtgagcgaggacgaagtgacgcccaacatgcgccgtcaggcgaaggcggtcaactttgggatcgtttacgggatcagtgattacggcttggcgcaaaacttaaatatttcacgcaaagaggccgctgaattcatcgagcgctacttcgaaagcttccctggcgtgaagcggtatatggaaaacattgtgcaagaagcaaaacagaaagggtatgtgacgacgctgctgcatcggcgcggttatttgccggatatcacgagccgcaacttcaacgtccgcagctttgctgaacggatggcgatgaacacgccgattcaagggagcgccgctgacattattaaaaaggcgatgatcgatctgaacgctagactgaaggaagagcggctgcaagcgcgccttttgctacaggtgcatgacgagctcattttggaggcgccgaaagaagagatggagcggctgtgccggctcgttccggaagtgatggagcaagcggtcacacttcgcgtgccgctcaaagtcgattaccattatggctcgacgtggtatgacgcgaaataaaaaggatcc

SEQ ID NO: 2275 - DNA, 2712 bp, Artificial Sequence
  Description of Artificial Sequence: Synthetic DNA sequence of Bacillus caldolyticus EA1 DNA polymerase R795Q
atgaaatacctgctgccgaccgctgctgctggtctgctgctcctcgctgcccagccggcgatggccatgggattgaaaaaaaagcttgttttaatcgacggcagcagcgtggcgtaccgcgcctttttcgccttgccgcttttgcataacgacaaaggcatccatacgaacgccgtctacgggtttacgatgatgttgaataaaattttggcggaagaagagccaactcatatgcttgtcgcgtttgacgccgggaaaacgacgttccggcatgaagcgtttcaagagtataaaggtgggcgccagcagacgccaccggagctgtcggagcagtttccgctgttgcgcgagctgctgagggcgtatcgcatccccgcctatgaactcgagaactacgaagcggacgatattatcggaacgcttgccgcccgcgctgagcaggaagggtttgaggtgaaagtcatttccggcgaccgcgatctgacccagctcgcctccccccatgtgacggtggacattacgaaaaaagggattaccgatatcgaaccgtacacgccggaggcggtccgcgaaaaatacggcttaactccggaacaaatcgttgatttgaaaggattgatgggcgacaaatcggacaacattcccggagtgccgggcatcggggaaaagacggcggtcaagctgctcaagcaattcggcacggtcgaaaacgtgcttgcctccattgacgagatcaaaggcgaaaagttgaaagaaacgctgcgccaacaccgggagatggcgctgttaagcaaaaagctcgccgccattcgccgcgacgccccggtcgagctctcgcttgatgacatcgtctatcaaggggaagaccgggagaaagtggtcgctttatttaaagagcttgggtttcaatcgtttttagagaaaatggaatcgccgtcatcagaagaggaaaaaccgcttgccaagatggcatttacgcttgctgaccgcgtgacggaggagatgcttgccgacaaggcggcgcttgtcgttgaagtggtcgaggaaaattatcatgatgcgccgatcgtcggcatcgctgtggtcaacgaacatggacggtttttcctgcgcccggagacggcgcttgccgatccgcagtttgtcgcctggcttggtgatgaaacgaagaaaaaaagcatgtttgactcaaagcgcgcggcagtcgccttgaaatggaaaggaattgagctatgcggcgtttcctttgatttattgctggccgcctatttgcttgatccggcgcaaggtgttgatgatgtggctgccgcagcaaaaatgaagcaatacgaagcggtgcgctcggatgaagcggtgtatggcaaaggggcgaagcgggccgtgccggatgagccagtgctcgccgagcatctcgtccgcaaggcggcggcgatttgggcgctcgaacgtccgtttttggatgagctgcgccgcaacgaacaagatcggttgctcgtcgagctcgagcagccgttgtcttcgattttggcggaaatggaatttgccggagtgaaagtggatacgaagcggctcgaacagatgggcgaagagctcgccgagcagctgcgcacggtcgagcagcgcatttatgagctcgccggccaagaattcaacatcaattcaccgaaacagctcggcgtcattttatttgaaaaactgcagctgcccgtcttgaaaaaaacgaaaaccggctactccacttcggcggatgtgcttgaaaaacttgcgccttatcacgagatcgtggaaaacattttgcattaccgccagcttggcaagttgcagtcgacgtatattgaaggattgctgaaagtcgtgcgacccgatacaaagaaggtgcatacgattttcaatcaggcgttgacgcaaaccggacggctcagctcgacggagccgaacttgcaaaacattccgattcggcttgaggaaggacggaaaatccgccaagcgttcgtgccgtcggagtctgattggctcattttcgctgccgactactcgcaaattgagttgcgcgtcctcgcccatattgcggaagatgacaatttaatggaagcgttccgccgcgatttggatatccatacgaaaacagcgatggacattttccaagtgagcgaggacgaagtgacgcccaacatgcgccgtcaggcgaaggcggtcaactttgggatcgtttacgggatcagtgattacggcttggcgcaaaacttaaatatttcacgcaaagaggccgctgaattcatcgagcgctacttcgaaagcttccctggcgtgaagcggtatatggaaaacattgtgcaagaagcaaaacagaaagggtatgtgacgacgctgctgcatcggcgccaatatttgccggatatcacgagccgcaacttcaacgtccgcagctttgctgaacggatggcgatgaacacgccgattcaagggagcgccgctgacattattaaaaaggcgatgatcgatctgaacgctagactgaaggaagagcggctgcaagcgcgccttttgctacaggtgcatgacgagctcattttggaggcgccgaaagaagagatggagcggctgtgccggctcgttccggaagtgatggagcaagcggtcacacttcgcgtgccgctcaaagtcgattaccattatggctcgacgtggtatgacgcgaaataaaaaggatcc

SEQ ID NO: 2276 - DNA, 2712 bp, Artificial Sequence
  Description of Artificial Sequence: Synthetic DNA sequence of Bacillus caldolyticus EA1 DNA polymerase R795H
atgaaatacctgctgccgaccgctgctgctggtctgctgctcctcgctgcccagccggcgatggccatgggattgaaaaaaaagcttgttttaatcgacggcagcagcgtggcgtaccgcgcctttttcgccttgccgcttttgcataacgacaaaggcatccatacgaacgccgtctacgggtttacgatgatgttgaataaaattttggcggaagaagagccaactcatatgcttgtcgcgtttgacgccgggaaaacgacgttccggcatgaagcgtttcaagagtataaaggtgggcgccagcagacgccaccggagctgtcggagcagtttccgctgttgcgcgagctgctgagggcgtatcgcatccccgcctatgaactcgagaactacgaagcggacgatattatcggaacgcttgccgcccgcgctgagcaggaagggtttgaggtgaaagtcatttccggcgaccgcgatctgacccagctcgcctccccccatgtgacggtggacattacgaaaaaagggattaccgatatcgaaccgtacacgccggaggcggtccgcgaaaaatacggcttaactccggaacaaatcgttgatttgaaaggattgatgggcgacaaatcggacaacattcccggagtgccgggcatcggggaaaagacggcggtcaagctgctcaagcaattcggcacggtcgaaaacgtgcttgcctccattgacgagatcaaaggcgaaaagttgaaagaaacgctgcgccaacaccgggagatggcgctgttaagcaaaaagctcgccgccattcgccgcgacgccccggtcgagctctcgcttgatgacatcgtctatcaaggggaagaccgggagaaagtggtcgctttatttaaagagcttgggtttcaatcgtttttagagaaaatggaatcgccgtcatcagaagaggaaaaaccgcttgccaagatggcatttacgcttgctgaccgcgtgacggaggagatgcttgccgacaaggcggcgcttgtcgttgaagtggtcgaggaaaattatcatgatgcgccgatcgtcggcatcgctgtggtcaacgaacatggacggtttttcctgcgcccggagacggcgcttgccgatccgcagtttgtcgcctggcttggtgatgaaacgaagaaaaaaagcatgtttgactcaaagcgcgcggcagtcgccttgaaatggaaaggaattgagctatgcggcgtttcctttgatttattgctggccgcctatttgcttgatccggcgcaaggtgttgatgatgtggctgccgcagcaaaaatgaagcaatacgaagcggtgcgctcggatgaagcggtgtatggcaaaggggcgaagcgggccgtgccggatgagccagtgctcgccgagcatctcgtccgcaaggcggcggcgatttgggcgctcgaacgtccgtttttggatgagctgcgccgcaacgaacaagatcggttgctcgtcgagctcgagcagccgttgtcttcgattttggcggaaatggaatttgccggagtgaaagtggatacgaagcggctcgaacagatgggcgaagagctcgccgagcagctgcgcacggtcgagcagcgcatttatgagctcgccggccaagaattcaacatcaattcaccgaaacagctcggcgtcattttatttgaaaaactgcagctgcccgtcttgaaaaaaacgaaaaccggctactccacttcggcggatgtgcttgaaaaacttgcgccttatcacgagatcgtggaaaacattttgcattaccgccagcttggcaagttgcagtcgacgtatattgaaggattgctgaaagtcgtgcgacccgatacaaagaaggtgcatacgattttcaatcaggcgttgacgcaaaccggacggctcagctcgacggagccgaacttgcaaaacattccgattcggcttgaggaaggacggaaaatccgccaagcgttcgtgccgtcggagtctgattggctcattttcgctgccgactactcgcaaattgagttgcgcgtcctcgcccatattgcggaagatgacaatttaatggaagcgttccgccgcgatttggatatccatacgaaaacagcgatggacattttccaagtgagcgaggacgaagtgacgcccaacatgcgccgtcaggcgaaggcggtcaactttgggatcgtttacgggatcagtgattacggcttggcgcaaaacttaaatatttcacgcaaagaggccgctgaattcatcgagcgctacttcgaaagcttccctggcgtgaagcggtatatggaaaacattgtgcaagaagcaaaacagaaagggtatgtgacgacgctgctgcatcggcgccattatttgccggatatcacgagccgcaacttcaacgtccgcagctttgctgaacggatggcgatgaacacgccgattcaagggagcgccgctgacattattaaaaaggcgatgatcgatctgaacgctagactgaaggaagagcggctgcaagcgcgccttttgctacaggtgcatgacgagctcattttggaggcgccgaaagaagagatggagcggctgtgccggctcgttccggaagtgatggagcaagcggtcacacttcgcgtgccgctcaaagtcgattaccattatggctcgacgtggtatgacgcgaaataaaaaggatcc

SEQ ID NO: 2277 - DNA, 2712 bp, Artificial Sequence
  Description of Artificial Sequence: Synthetic DNA sequence of Bacillus caldolyticus EA1 DNA polymerase R795I
atgaaatacctgctgccgaccgctgctgctggtctgctgctcctcgctgcccagccggcgatggccatgggattgaaaaaaaagcttgttttaatcgacggcagcagcgtggcgtaccgcgcctttttcgccttgccgcttttgcataacgacaaaggcatccatacgaacgccgtctacgggtttacgatgatgttgaataaaattttggcggaagaagagccaactcatatgcttgtcgcgtttgacgccgggaaaacgacgttccggcatgaagcgtttcaagagtataaaggtgggcgccagcagacgccaccggagctgtcggagcagtttccgctgttgcgcgagctgctgagggcgtatcgcatccccgcctatgaactcgagaactacgaagcggacgatattatcggaacgcttgccgcccgcgctgagcaggaagggtttgaggtgaaagtcatttccggcgaccgcgatctgacccagctcgcctccccccatgtgacggtggacattacgaaaaaagggattaccgatatcgaaccgtacacgccggaggcggtccgcgaaaaatacggcttaactccggaacaaatcgttgatttgaaaggattgatgggcgacaaatcggacaacattcccggagtgccgggcatcggggaaaagacggcggtcaagctgctcaagcaattcggcacggtcgaaaacgtgcttgcctccattgacgagatcaaaggcgaaaagttgaaagaaacgctgcgccaacaccgggagatggcgctgttaagcaaaaagctcgccgccattcgccgcgacgccccggtcgagctctcgcttgatgacatcgtctatcaaggggaagaccgggagaaagtggtcgctttatttaaagagcttgggtttcaatcgtttttagagaaaatggaatcgccgtcatcagaagaggaaaaaccgcttgccaagatggcatttacgcttgctgaccgcgtgacggaggagatgcttgccgacaaggcggcgcttgtcgttgaagtggtcgaggaaaattatcatgatgcgccgatcgtcggcatcgctgtggtcaacgaacatggacggtttttcctgcgcccggagacggcgcttgccgatccgcagtttgtcgcctggcttggtgatgaaacgaagaaaaaaagcatgtttgactcaaagcgcgcggcagtcgccttgaaatggaaaggaattgagctatgcggcgtttcctttgatttattgctggccgcctatttgcttgatccggcgcaaggtgttgatgatgtggctgccgcagcaaaaatgaagcaatacgaagcggtgcgctcggatgaagcggtgtatggcaaaggggcgaagcgggccgtgccggatgagccagtgctcgccgagcatctcgtccgcaaggcggcggcgatttgggcgctcgaacgtccgtttttggatgagctgcgccgcaacgaacaagatcggttgctcgtcgagctcgagcagccgttgtcttcgattttggcggaaatggaatttgccggagtgaaagtggatacgaagcggctcgaacagatgggcgaagagctcgccgagcagctgcgcacggtcgagcagcgcatttatgagctcgccggccaagaattcaacatcaattcaccgaaacagctcggcgtcattttatttgaaaaactgcagctgcccgtcttgaaaaaaacgaaaaccggctactccacttcggcggatgtgcttgaaaaacttgcgccttatcacgagatcgtggaaaacattttgcattaccgccagcttggcaagttgcagtcgacgtatattgaaggattgctgaaagtcgtgcgacccgatacaaagaaggtgcatacgattttcaatcaggcgttgacgcaaaccggacggctcagctcgacggagccgaacttgcaaaacattccgattcggcttgaggaaggacggaaaatccgccaagcgttcgtgccgtcggagtctgattggctcattttcgctgccgactactcgcaaattgagttgcgcgtcctcgcccatattgcggaagatgacaatttaatggaagcgttccgccgcgatttggatatccatacgaaaacagcgatggacattttccaagtgagcgaggacgaagtgacgcccaacatgcgccgtcaggcgaaggcggtcaactttgggatcgtttacgggatcagtgattacggcttggcgcaaaacttaaatatttcacgcaaagaggccgctgaattcatcgagcgctacttcgaaagcttccctggcgtgaagcggtatatggaaaacattgtgcaagaagcaaaacagaaagggtatgtgacgacgctgctgcatcggcgcatttatttgccggatatcacgagccgcaacttcaacgtccgcagctttgctgaacggatggcgatgaacacgccgattcaagggagcgccgctgacattattaaaaaggcgatgatcgatctgaacgctagactgaaggaagagcggctgcaagcgcgccttttgctacaggtgcatgacgagctcattttggaggcgccgaaagaagagatggagcggctgtgccggctcgttccggaagtgatggagcaagcggtcacacttcgcgtgccgctcaaagtcgattaccattatggctcgacgtggtatgacgcgaaataaaaaggatcc

SEQ ID NO: 2278 - DNA, 2712 bp, Artificial Sequence
  Description of Artificial Sequence: Synthetic DNA sequence of Bacillus caldolyticus EA1 DNA polymerase R795L
atgaaatacctgctgccgaccgctgctgctggtctgctgctcctcgctgcccagccggcgatggccatgggattgaaaaaaaagcttgttttaatcgacggcagcagcgtggcgtaccgcgcctttttcgccttgccgcttttgcataacgacaaaggcatccatacgaacgccgtctacgggtttacgatgatgttgaataaaattttggcggaagaagagccaactcatatgcttgtcgcgtttgacgccgggaaaacgacgttccggcatgaagcgtttcaagagtataaaggtgggcgccagcagacgccaccggagctgtcggagcagtttccgctgttgcgcgagctgctgagggcgtatcgcatccccgcctatgaactcgagaactacgaagcggacgatattatcggaacgcttgccgcccgcgctgagcaggaagggtttgaggtgaaagtcatttccggcgaccgcgatctgacccagctcgcctccccccatgtgacggtggacattacgaaaaaagggattaccgatatcgaaccgtacacgccggaggcggtccgcgaaaaatacggcttaactccggaacaaatcgttgatttgaaaggattgatgggcgacaaatcggacaacattcccggagtgccgggcatcggggaaaagacggcggtcaagctgctcaagcaattcggcacggtcgaaaacgtgcttgcctccattgacgagatcaaaggcgaaaagttgaaagaaacgctgcgccaacaccgggagatggcgctgttaagcaaaaagctcgccgccattcgccgcgacgccccggtcgagctctcgcttgatgacatcgtctatcaaggggaagaccgggagaaagtggtcgctttatttaaagagcttgggtttcaatcgtttttagagaaaatggaatcgccgtcatcagaagaggaaaaaccgcttgccaagatggcatttacgcttgctgaccgcgtgacggaggagatgcttgccgacaaggcggcgcttgtcgttgaagtggtcgaggaaaattatcatgatgcgccgatcgtcggcatcgctgtggtcaacgaacatggacggtttttcctgcgcccggagacggcgcttgccgatccgcagtttgtcgcctggcttggtgatgaaacgaagaaaaaaagcatgtttgactcaaagcgcgcggcagtcgccttgaaatggaaaggaattgagctatgcggcgtttcctttgatttattgctggccgcctatttgcttgatccggcgcaaggtgttgatgatgtggctgccgcagcaaaaatgaagcaatacgaagcggtgcgctcggatgaagcggtgtatggcaaaggggcgaagcgggccgtgccggatgagccagtgctcgccgagcatctcgtccgcaaggcggcggcgatttgggcgctcgaacgtccgtttttggatgagctgcgccgcaacgaacaagatcggttgctcgtcgagctcgagcagccgttgtcttcgattttggcggaaatggaatttgccggagtgaaagtggatacgaagcggctcgaacagatgggcgaagagctcgccgagcagctgcgcacggtcgagcagcgcatttatgagctcgccggccaagaattcaacatcaattcaccgaaacagctcggcgtcattttatttgaaaaactgcagctgcccgtcttgaaaaaaacgaaaaccggctactccacttcggcggatgtgcttgaaaaacttgcgccttatcacgagatcgtggaaaacattttgcattaccgccagcttggcaagttgcagtcgacgtatattgaaggattgctgaaagtcgtgcgacccgatacaaagaaggtgcatacgattttcaatcaggcgttgacgcaaaccggacggctcagctcgacggagccgaacttgcaaaacattccgattcggcttgaggaaggacggaaaatccgccaagcgttcgtgccgtcggagtctgattggctcattttcgctgccgactactcgcaaattgagttgcgcgtcctcgcccatattgcggaagatgacaatttaatggaagcgttccgccgcgatttggatatccatacgaaaacagcgatggacattttccaagtgagcgaggacgaagtgacgcccaacatgcgccgtcaggcgaaggcggtcaactttgggatcgtttacgggatcagtgattacggcttggcgcaaaacttaaatatttcacgcaaagaggccgctgaattcatcgagcgctacttcgaaagcttccctggcgtgaagcggtatatggaaaacattgtgcaagaagcaaaacagaaagggtatgtgacgacgctgctgcatcggcgcttatatttgccggatatcacgagccgcaacttcaacgtccgcagctttgctgaacggatggcgatgaacacgccgattcaagggagcgccgctgacattattaaaaaggcgatgatcgatctgaacgctagactgaaggaagagcggctgcaagcgcgccttttgctacaggtgcatgacgagctcattttggaggcgccgaaagaagagatggagcggctgtgccggctcgttccggaagtgatggagcaagcggtcacacttcgcgtgccgctcaaagtcgattaccattatggctcgacgtggtatgacgcgaaataaaaaggatcc

SEQ ID NO: 2279 - DNA, 2712 bp, Artificial Sequence
  Description of Artificial Sequence: Synthetic DNA sequence of Bacillus caldolyticus EA1 DNA polymerase R795K
atgaaatacctgctgccgaccgctgctgctggtctgctgctcctcgctgcccagccggcgatggccatgggattgaaaaaaaagcttgttttaatcgacggcagcagcgtggcgtaccgcgcctttttcgccttgccgcttttgcataacgacaaaggcatccatacgaacgccgtctacgggtttacgatgatgttgaataaaattttggcggaagaagagccaactcatatgcttgtcgcgtttgacgccgggaaaacgacgttccggcatgaagcgtttcaagagtataaaggtgggcgccagcagacgccaccggagctgtcggagcagtttccgctgttgcgcgagctgctgagggcgtatcgcatccccgcctatgaactcgagaactacgaagcggacgatattatcggaacgcttgccgcccgcgctgagcaggaagggtttgaggtgaaagtcatttccggcgaccgcgatctgacccagctcgcctccccccatgtgacggtggacattacgaaaaaagggattaccgatatcgaaccgtacacgccggaggcggtccgcgaaaaatacggcttaactccggaacaaatcgttgatttgaaaggattgatgggcgacaaatcggacaacattcccggagtgccgggcatcggggaaaagacggcggtcaagctgctcaagcaattcggcacggtcgaaaacgtgcttgcctccattgacgagatcaaaggcgaaaagttgaaagaaacgctgcgccaacaccgggagatggcgctgttaagcaaaaagctcgccgccattcgccgcgacgccccggtcgagctctcgcttgatgacatcgtctatcaaggggaagaccgggagaaagtggtcgctttatttaaagagcttgggtttcaatcgtttttagagaaaatggaatcgccgtcatcagaagaggaaaaaccgcttgccaagatggcatttacgcttgctgaccgcgtgacggaggagatgcttgccgacaaggcggcgcttgtcgttgaagtggtcgaggaaaattatcatgatgcgccgatcgtcggcatcgctgtggtcaacgaacatggacggtttttcctgcgcccggagacggcgcttgccgatccgcagtttgtcgcctggcttggtgatgaaacgaagaaaaaaagcatgtttgactcaaagcgcgcggcagtcgccttgaaatggaaaggaattgagctatgcggcgtttcctttgatttattgctggccgcctatttgcttgatccggcgcaaggtgttgatgatgtggctgccgcagcaaaaatgaagcaatacgaagcggtgcgctcggatgaagcggtgtatggcaaaggggcgaagcgggccgtgccggatgagccagtgctcgccgagcatctcgtccgcaaggcggcggcgatttgggcgctcgaacgtccgtttttggatgagctgcgccgcaacgaacaagatcggttgctcgtcgagctcgagcagccgttgtcttcgattttggcggaaatggaatttgccggagtgaaagtggatacgaagcggctcgaacagatgggcgaagagctcgccgagcagctgcgcacggtcgagcagcgcatttatgagctcgccggccaagaattcaacatcaattcaccgaaacagctcggcgtcattttatttgaaaaactgcagctgcccgtcttgaaaaaaacgaaaaccggctactccacttcggcggatgtgcttgaaaaacttgcgccttatcacgagatcgtggaaaacattttgcattaccgccagcttggcaagttgcagtcgacgtatattgaaggattgctgaaagtcgtgcgacccgatacaaagaaggtgcatacgattttcaatcaggcgttgacgcaaaccggacggctcagctcgacggagccgaacttgcaaaacattccgattcggcttgaggaaggacggaaaatccgccaagcgttcgtgccgtcggagtctgattggctcattttcgctgccgactactcgcaaattgagttgcgcgtcctcgcccatattgcggaagatgacaatttaatggaagcgttccgccgcgatttggatatccatacgaaaacagcgatggacattttccaagtgagcgaggacgaagtgacgcccaacatgcgccgtcaggcgaaggcggtcaactttgggatcgtttacgggatcagtgattacggcttggcgcaaaacttaaatatttcacgcaaagaggccgctgaattcatcgagcgctacttcgaaagcttccctggcgtgaagcggtatatggaaaacattgtgcaagaagcaaaacagaaagggtatgtgacgacgctgctgcatcggcgcaaatatttgccggatatcacgagccgcaacttcaacgtccgcagctttgctgaacggatggcgatgaacacgccgattcaagggagcgccgctgacattattaaaaaggcgatgatcgatctgaacgctagactgaaggaagagcggctgcaagcgcgccttttgctacaggtgcatgacgagctcattttggaggcgccgaaagaagagatggagcggctgtgccggctcgttccggaagtgatggagcaagcggtcacacttcgcgtgccgctcaaagtcgattaccattatggctcgacgtggtatgacgcgaaataaaaaggatcc

SEQ ID NO: 2280 - DNA, 2712 bp, Artificial Sequence
  Description of Artificial Sequence: Synthetic DNA sequence of Bacillus caldolyticus EA1 DNA polymerase R795E
atgaaatacctgctgccgaccgctgctgctggtctgctgctcctcgctgcccagccggcgatggccatgggattgaaaaaaaagcttgttttaatcgacggcagcagcgtggcgtaccgcgcctttttcgccttgccgcttttgcataacgacaaaggcatccatacgaacgccgtctacgggtttacgatgatgttgaataaaattttggcggaagaagagccaactcatatgcttgtcgcgtttgacgccgggaaaacgacgttccggcatgaagcgtttcaagagtataaaggtgggcgccagcagacgccaccggagctgtcggagcagtttccgctgttgcgcgagctgctgagggcgtatcgcatccccgcctatgaactcgagaactacgaagcggacgatattatcggaacgcttgccgcccgcgctgagcaggaagggtttgaggtgaaagtcatttccggcgaccgcgatctgacccagctcgcctccccccatgtgacggtggacattacgaaaaaagggattaccgatatcgaaccgtacacgccggaggcggtccgcgaaaaatacggcttaactccggaacaaatcgttgatttgaaaggattgatgggcgacaaatcggacaacattcccggagtgccgggcatcggggaaaagacggcggtcaagctgctcaagcaattcggcacggtcgaaaacgtgcttgcctccattgacgagatcaaaggcgaaaagttgaaagaaacgctgcgccaacaccgggagatggcgctgttaagcaaaaagctcgccgccattcgccgcgacgccccggtcgagctctcgcttgatgacatcgtctatcaaggggaagaccgggagaaagtggtcgctttatttaaagagcttgggtttcaatcgtttttagagaaaatggaatcgccgtcatcagaagaggaaaaaccgcttgccaagatggcatttacgcttgctgaccgcgtgacggaggagatgcttgccgacaaggcggcgcttgtcgttgaagtggtcgaggaaaattatcatgatgcgccgatcgtcggcatcgctgtggtcaacgaacatggacggtttttcctgcgcccggagacggcgcttgccgatccgcagtttgtcgcctggcttggtgatgaaacgaagaaaaaaagcatgtttgactcaaagcgcgcggcagtcgccttgaaatggaaaggaattgagctatgcggcgtttcctttgatttattgctggccgcctatttgcttgatccggcgcaaggtgttgatgatgtggctgccgcagcaaaaatgaagcaatacgaagcggtgcgctcggatgaagcggtgtatggcaaaggggcgaagcgggccgtgccggatgagccagtgctcgccgagcatctcgtccgcaaggcggcggcgatttgggcgctcgaacgtccgtttttggatgagctgcgccgcaacgaacaagatcggttgctcgtcgagctcgagcagccgttgtcttcgattttggcggaaatggaatttgccggagtgaaagtggatacgaagcggctcgaacagatgggcgaagagctcgccgagcagctgcgcacggtcgagcagcgcatttatgagctcgccggccaagaattcaacatcaattcaccgaaacagctcggcgtcattttatttgaaaaactgcagctgcccgtcttgaaaaaaacgaaaaccggctactccacttcggcggatgtgcttgaaaaacttgcgccttatcacgagatcgtggaaaacattttgcattaccgccagcttggcaagttgcagtcgacgtatattgaaggattgctgaaagtcgtgcgacccgatacaaagaaggtgcatacgattttcaatcaggcgttgacgcaaaccggacggctcagctcgacggagccgaacttgcaaaacattccgattcggcttgaggaaggacggaaaatccgccaagcgttcgtgccgtcggagtctgattggctcattttcgctgccgactactcgcaaattgagttgcgcgtcctcgcccatattgcggaagatgacaatttaatggaagcgttccgccgcgatttggatatccatacgaaaacagcgatggacattttccaagtgagcgaggacgaagtgacgcccaacatgcgccgtcaggcgaaggcggtcaactttgggatcgtttacgggatcagtgattacggcttggcgcaaaacttaaatatttcacgcaaagaggccgctgaattcatcgagcgctacttcgaaagcttccctggcgtgaagcggtatatggaaaacattgtgcaagaagcaaaacagaaagggtatgtgacgacgctgctgcatcggcgcgaatatttgccggatatcacgagccgcaacttcaacgtccgcagctttgctgaacggatggcgatgaacacgccgattcaagggagcgccgctgacattattaaaaaggcgatgatcgatctgaacgctagactgaaggaagagcggctgcaagcgcgccttttgctacaggtgcatgacgagctcattttggaggcgccgaaagaagagatggagcggctgtgccggctcgttccggaagtgatggagcaagcggtcacacttcgcgtgccgctcaaagtcgattaccattatggctcgacgtggtatgacgcgaaataaaaaggatcc

SEQ ID NO: 2281 - DNA, 2712 bp, Artificial Sequence
  Description of Artificial Sequence: Synthetic DNA sequence of Bacillus caldolyticus EA1 DNA polymerase R795D
atgaaatacctgctgccgaccgctgctgctggtctgctgctcctcgctgcccagccggcgatggccatgggattgaaaaaaaagcttgttttaatcgacggcagcagcgtggcgtaccgcgcctttttcgccttgccgcttttgcataacgacaaaggcatccatacgaacgccgtctacgggtttacgatgatgttgaataaaattttggcggaagaagagccaactcatatgcttgtcgcgtttgacgccgggaaaacgacgttccggcatgaagcgtttcaagagtataaaggtgggcgccagcagacgccaccggagctgtcggagcagtttccgctgttgcgcgagctgctgagggcgtatcgcatccccgcctatgaactcgagaactacgaagcggacgatattatcggaacgcttgccgcccgcgctgagcaggaagggtttgaggtgaaagtcatttccggcgaccgcgatctgacccagctcgcctccccccatgtgacggtggacattacgaaaaaagggattaccgatatcgaaccgtacacgccggaggcggtccgcgaaaaatacggcttaactccggaacaaatcgttgatttgaaaggattgatgggcgacaaatcggacaacattcccggagtgccgggcatcggggaaaagacggcggtcaagctgctcaagcaattcggcacggtcgaaaacgtgcttgcctccattgacgagatcaaaggcgaaaagttgaaagaaacgctgcgccaacaccgggagatggcgctgttaagcaaaaagctcgccgccattcgccgcgacgccccggtcgagctctcgcttgatgacatcgtctatcaaggggaagaccgggagaaagtggtcgctttatttaaagagcttgggtttcaatcgtttttagagaaaatggaatcgccgtcatcagaagaggaaaaaccgcttgccaagatggcatttacgcttgctgaccgcgtgacggaggagatgcttgccgacaaggcggcgcttgtcgttgaagtggtcgaggaaaattatcatgatgcgccgatcgtcggcatcgctgtggtcaacgaacatggacggtttttcctgcgcccggagacggcgcttgccgatccgcagtttgtcgcctggcttggtgatgaaacgaagaaaaaaagcatgtttgactcaaagcgcgcggcagtcgccttgaaatggaaaggaattgagctatgcggcgtttcctttgatttattgctggccgcctatttgcttgatccggcgcaaggtgttgatgatgtggctgccgcagcaaaaatgaagcaatacgaagcggtgcgctcggatgaagcggtgtatggcaaaggggcgaagcgggccgtgccggatgagccagtgctcgccgagcatctcgtccgcaaggcggcggcgatttgggcgctcgaacgtccgtttttggatgagctgcgccgcaacgaacaagatcggttgctcgtcgagctcgagcagccgttgtcttcgattttggcggaaatggaatttgccggagtgaaagtggatacgaagcggctcgaacagatgggcgaagagctcgccgagcagctgcgcacggtcgagcagcgcatttatgagctcgccggccaagaattcaacatcaattcaccgaaacagctcggcgtcattttatttgaaaaactgcagctgcccgtcttgaaaaaaacgaaaaccggctactccacttcggcggatgtgcttgaaaaacttgcgccttatcacgagatcgtggaaaacattttgcattaccgccagcttggcaagttgcagtcgacgtatattgaaggattgctgaaagtcgtgcgacccgatacaaagaaggtgcatacgattttcaatcaggcgttgacgcaaaccggacggctcagctcgacggagccgaacttgcaaaacattccgattcggcttgaggaaggacggaaaatccgccaagcgttcgtgccgtcggagtctgattggctcattttcgctgccgactactcgcaaattgagttgcgcgtcctcgcccatattgcggaagatgacaatttaatggaagcgttccgccgcgatttggatatccatacgaaaacagcgatggacattttccaagtgagcgaggacgaagtgacgcccaacatgcgccgtcaggcgaaggcggtcaactttgggatcgtttacgggatcagtgattacggcttggcgcaaaacttaaatatttcacgcaaagaggccgctgaattcatcgagcgctacttcgaaagcttccctggcgtgaagcggtatatggaaaacattgtgcaagaagcaaaacagaaagggtatgtgacgacgctgctgcatcggcgcgattatttgccggatatcacgagccgcaacttcaacgtccgcagctttgctgaacggatggcgatgaacacgccgattcaagggagcgccgctgacattattaaaaaggcgatgatcgatctgaacgctagactgaaggaagagcggctgcaagcgcgccttttgctacaggtgcatgacgagctcattttggaggcgccgaaagaagagatggagcggctgtgccggctcgttccggaagtgatggagcaagcggtcacacttcgcgtgccgctcaaagtcgattaccattatggctcgacgtggtatgacgcgaaataaaaaggatcc

SEQ ID NO: 2282 - DNA, 2712 bp, Artificial Sequence
  Description of Artificial Sequence: Synthetic DNA sequence of Bacillus caldolyticus EA1 DNA polymerase R795F
atgaaatacctgctgccgaccgctgctgctggtctgctgctcctcgctgcccagccggcgatggccatgggattgaaaaaaaagcttgttttaatcgacggcagcagcgtggcgtaccgcgcctttttcgccttgccgcttttgcataacgacaaaggcatccatacgaacgccgtctacgggtttacgatgatgttgaataaaattttggcggaagaagagccaactcatatgcttgtcgcgtttgacgccgggaaaacgacgttccggcatgaagcgtttcaagagtataaaggtgggcgccagcagacgccaccggagctgtcggagcagtttccgctgttgcgcgagctgctgagggcgtatcgcatccccgcctatgaactcgagaactacgaagcggacgatattatcggaacgcttgccgcccgcgctgagcaggaagggtttgaggtgaaagtcatttccggcgaccgcgatctgacccagctcgcctccccccatgtgacggtggacattacgaaaaaagggattaccgatatcgaaccgtacacgccggaggcggtccgcgaaaaatacggcttaactccggaacaaatcgttgatttgaaaggattgatgggcgacaaatcggacaacattcccggagtgccgggcatcggggaaaagacggcggtcaagctgctcaagcaattcggcacggtcgaaaacgtgcttgcctccattgacgagatcaaaggcgaaaagttgaaagaaacgctgcgccaacaccgggagatggcgctgttaagcaaaaagctcgccgccattcgccgcgacgccccggtcgagctctcgcttgatgacatcgtctatcaaggggaagaccgggagaaagtggtcgctttatttaaagagcttgggtttcaatcgtttttagagaaaatggaatcgccgtcatcagaagaggaaaaaccgcttgccaagatggcatttacgcttgctgaccgcgtgacggaggagatgcttgccgacaaggcggcgcttgtcgttgaagtggtcgaggaaaattatcatgatgcgccgatcgtcggcatcgctgtggtcaacgaacatggacggtttttcctgcgcccggagacggcgcttgccgatccgcagtttgtcgcctggcttggtgatgaaacgaagaaaaaaagcatgtttgactcaaagcgcgcggcagtcgccttgaaatggaaaggaattgagctatgcggcgtttcctttgatttattgctggccgcctatttgcttgatccggcgcaaggtgttgatgatgtggctgccgcagcaaaaatgaagcaatacgaagcggtgcgctcggatgaagcggtgtatggcaaaggggcgaagcgggccgtgccggatgagccagtgctcgccgagcatctcgtccgcaaggcggcggcgatttgggcgctcgaacgtccgtttttggatgagctgcgccgcaacgaacaagatcggttgctcgtcgagctcgagcagccgttgtcttcgattttggcggaaatggaatttgccggagtgaaagtggatacgaagcggctcgaacagatgggcgaagagctcgccgagcagctgcgcacggtcgagcagcgcatttatgagctcgccggccaagaattcaacatcaattcaccgaaacagctcggcgtcattttatttgaaaaactgcagctgcccgtcttgaaaaaaacgaaaaccggctactccacttcggcggatgtgcttgaaaaacttgcgccttatcacgagatcgtggaaaacattttgcattaccgccagcttggcaagttgcagtcgacgtatattgaaggattgctgaaagtcgtgcgacccgatacaaagaaggtgcatacgattttcaatcaggcgttgacgcaaaccggacggctcagctcgacggagccgaacttgcaaaacattccgattcggcttgaggaaggacggaaaatccgccaagcgttcgtgccgtcggagtctgattggctcattttcgctgccgactactcgcaaattgagttgcgcgtcctcgcccatattgcggaagatgacaatttaatggaagcgttccgccgcgatttggatatccatacgaaaacagcgatggacattttccaagtgagcgaggacgaagtgacgcccaacatgcgccgtcaggcgaaggcggtcaactttgggatcgtttacgggatcagtgattacggcttggcgcaaaacttaaatatttcacgcaaagaggccgctgaattcatcgagcgctacttcgaaagcttccctggcgtgaagcggtatatggaaaacattgtgcaagaagcaaaacagaaagggtatgtgacgacgctgctgcatcggcgcttttatttgccggatatcacgagccgcaacttcaacgtccgcagctttgctgaacggatggcgatgaacacgccgattcaagggagcgccgctgacattattaaaaaggcgatgatcgatctgaacgctagactgaaggaagagcggctgcaagcgcgccttttgctacaggtgcatgacgagctcattttggaggcgccgaaagaagagatggagcggctgtgccggctcgttccggaagtgatggagcaagcggtcacacttcgcgtgccgctcaaagtcgattaccattatggctcgacgtggtatgacgcgaaataaaaaggatcc

SEQ ID NO: 2283 - DNA, 2712 bp, Artificial Sequence
  Description of Artificial Sequence: Synthetic DNA sequence of Bacillus caldolyticus EA1 DNA polymerase R795S
atgaaatacctgctgccgaccgctgctgctggtctgctgctcctcgctgcccagccggcgatggccatgggattgaaaaaaaagcttgttttaatcgacggcagcagcgtggcgtaccgcgcctttttcgccttgccgcttttgcataacgacaaaggcatccatacgaacgccgtctacgggtttacgatgatgttgaataaaattttggcggaagaagagccaactcatatgcttgtcgcgtttgacgccgggaaaacgacgttccggcatgaagcgtttcaagagtataaaggtgggcgccagcagacgccaccggagctgtcggagcagtttccgctgttgcgcgagctgctgagggcgtatcgcatccccgcctatgaactcgagaactacgaagcggacgatattatcggaacgcttgccgcccgcgctgagcaggaagggtttgaggtgaaagtcatttccggcgaccgcgatctgacccagctcgcctccccccatgtgacggtggacattacgaaaaaagggattaccgatatcgaaccgtacacgccggaggcggtccgcgaaaaatacggcttaactccggaacaaatcgttgatttgaaaggattgatgggcgacaaatcggacaacattcccggagtgccgggcatcggggaaaagacggcggtcaagctgctcaagcaattcggcacggtcgaaaacgtgcttgcctccattgacgagatcaaaggcgaaaagttgaaagaaacgctgcgccaacaccgggagatggcgctgttaagcaaaaagctcgccgccattcgccgcgacgccccggtcgagctctcgcttgatgacatcgtctatcaaggggaagaccgggagaaagtggtcgctttatttaaagagcttgggtttcaatcgtttttagagaaaatggaatcgccgtcatcagaagaggaaaaaccgcttgccaagatggcatttacgcttgctgaccgcgtgacggaggagatgcttgccgacaaggcggcgcttgtcgttgaagtggtcgaggaaaattatcatgatgcgccgatcgtcggcatcgctgtggtcaacgaacatggacggtttttcctgcgcccggagacggcgcttgccgatccgcagtttgtcgcctggcttggtgatgaaacgaagaaaaaaagcatgtttgactcaaagcgcgcggcagtcgccttgaaatggaaaggaattgagctatgcggcgtttcctttgatttattgctggccgcctatttgcttgatccggcgcaaggtgttgatgatgtggctgccgcagcaaaaatgaagcaatacgaagcggtgcgctcggatgaagcggtgtatggcaaaggggcgaagcgggccgtgccggatgagccagtgctcgccgagcatctcgtccgcaaggcggcggcgatttgggcgctcgaacgtccgtttttggatgagctgcgccgcaacgaacaagatcggttgctcgtcgagctcgagcagccgttgtcttcgattttggcggaaatggaatttgccggagtgaaagtggatacgaagcggctcgaacagatgggcgaagagctcgccgagcagctgcgcacggtcgagcagcgcatttatgagctcgccggccaagaattcaacatcaattcaccgaaacagctcggcgtcattttatttgaaaaactgcagctgcccgtcttgaaaaaaacgaaaaccggctactccacttcggcggatgtgcttgaaaaacttgcgccttatcacgagatcgtggaaaacattttgcattaccgccagcttggcaagttgcagtcgacgtatattgaaggattgctgaaagtcgtgcgacccgatacaaagaaggtgcatacgattttcaatcaggcgttgacgcaaaccggacggctcagctcgacggagccgaacttgcaaaacattccgattcggcttgaggaaggacggaaaatccgccaagcgttcgtgccgtcggagtctgattggctcattttcgctgccgactactcgcaaattgagttgcgcgtcctcgcccatattgcggaagatgacaatttaatggaagcgttccgccgcgatttggatatccatacgaaaacagcgatggacattttccaagtgagcgaggacgaagtgacgcccaacatgcgccgtcaggcgaaggcggtcaactttgggatcgtttacgggatcagtgattacggcttggcgcaaaacttaaatatttcacgcaaagaggccgctgaattcatcgagcgctacttcgaaagcttccctggcgtgaagcggtatatggaaaacattgtgcaagaagcaaaacagaaagggtatgtgacgacgctgctgcatcggcgctcttatttgccggatatcacgagccgcaacttcaacgtccgcagctttgctgaacggatggcgatgaacacgccgattcaagggagcgccgctgacattattaaaaaggcgatgatcgatctgaacgctagactgaaggaagagcggctgcaagcgcgccttttgctacaggtgcatgacgagctcattttggaggcgccgaaagaagagatggagcggctgtgccggctcgttccggaagtgatggagcaagcggtcacacttcgcgtgccgctcaaagtcgattaccattatggctcgacgtggtatgacgcgaaataaaaaggatcc

SEQ ID NO: 2284 - DNA, 2712 bp, Artificial Sequence
  Description of Artificial Sequence: Synthetic DNA sequence of Bacillus caldolyticus EA1 DNA polymerase R795Y
atgaaatacctgctgccgaccgctgctgctggtctgctgctcctcgctgcccagccggcgatggccatgggattgaaaaaaaagcttgttttaatcgacggcagcagcgtggcgtaccgcgcctttttcgccttgccgcttttgcataacgacaaaggcatccatacgaacgccgtctacgggtttacgatgatgttgaataaaattttggcggaagaagagccaactcatatgcttgtcgcgtttgacgccgggaaaacgacgttccggcatgaagcgtttcaagagtataaaggtgggcgccagcagacgccaccggagctgtcggagcagtttccgctgttgcgcgagctgctgagggcgtatcgcatccccgcctatgaactcgagaactacgaagcggacgatattatcggaacgcttgccgcccgcgctgagcaggaagggtttgaggtgaaagtcatttccggcgaccgcgatctgacccagctcgcctccccccatgtgacggtggacattacgaaaaaagggattaccgatatcgaaccgtacacgccggaggcggtccgcgaaaaatacggcttaactccggaacaaatcgttgatttgaaaggattgatgggcgacaaatcggacaacattcccggagtgccgggcatcggggaaaagacggcggtcaagctgctcaagcaattcggcacggtcgaaaacgtgcttgcctccattgacgagatcaaaggcgaaaagttgaaagaaacgctgcgccaacaccgggagatggcgctgttaagcaaaaagctcgccgccattcgccgcgacgccccggtcgagctctcgcttgatgacatcgtctatcaaggggaagaccgggagaaagtggtcgctttatttaaagagcttgggtttcaatcgtttttagagaaaatggaatcgccgtcatcagaagaggaaaaaccgcttgccaagatggcatttacgcttgctgaccgcgtgacggaggagatgcttgccgacaaggcggcgcttgtcgttgaagtggtcgaggaaaattatcatgatgcgccgatcgtcggcatcgctgtggtcaacgaacatggacggtttttcctgcgcccggagacggcgcttgccgatccgcagtttgtcgcctggcttggtgatgaaacgaagaaaaaaagcatgtttgactcaaagcgcgcggcagtcgccttgaaatggaaaggaattgagctatgcggcgtttcctttgatttattgctggccgcctatttgcttgatccggcgcaaggtgttgatgatgtggctgccgcagcaaaaatgaagcaatacgaagcggtgcgctcggatgaagcggtgtatggcaaaggggcgaagcgggccgtgccggatgagccagtgctcgccgagcatctcgtccgcaaggcggcggcgatttgggcgctcgaacgtccgtttttggatgagctgcgccgcaacgaacaagatcggttgctcgtcgagctcgagcagccgttgtcttcgattttggcggaaatggaatttgccggagtgaaagtggatacgaagcggctcgaacagatgggcgaagagctcgccgagcagctgcgcacggtcgagcagcgcatttatgagctcgccggccaagaattcaacatcaattcaccgaaacagctcggcgtcattttatttgaaaaactgcagctgcccgtcttgaaaaaaacgaaaaccggctactccacttcggcggatgtgcttgaaaaacttgcgccttatcacgagatcgtggaaaacattttgcattaccgccagcttggcaagttgcagtcgacgtatattgaaggattgctgaaagtcgtgcgacccgatacaaagaaggtgcatacgattttcaatcaggcgttgacgcaaaccggacggctcagctcgacggagccgaacttgcaaaacattccgattcggcttgaggaaggacggaaaatccgccaagcgttcgtgccgtcggagtctgattggctcattttcgctgccgactactcgcaaattgagttgcgcgtcctcgcccatattgcggaagatgacaatttaatggaagcgttccgccgcgatttggatatccatacgaaaacagcgatggacattttccaagtgagcgaggacgaagtgacgcccaacatgcgccgtcaggcgaaggcggtcaactttgggatcgtttacgggatcagtgattacggcttggcgcaaaacttaaatatttcacgcaaagaggccgctgaattcatcgagcgctacttcgaaagcttccctggcgtgaagcggtatatggaaaacattgtgcaagaagcaaaacagaaagggtatgtgacgacgctgctgcatcggcgctattatttgccggatatcacgagccgcaacttcaacgtccgcagctttgctgaacggatggcgatgaacacgccgattcaagggagcgccgctgacattattaaaaaggcgatgatcgatctgaacgctagactgaaggaagagcggctgcaagcgcgccttttgctacaggtgcatgacgagctcattttggaggcgccgaaagaagagatggagcggctgtgccggctcgttccggaagtgatggagcaagcggtcacacttcgcgtgccgctcaaagtcgattaccattatggctcgacgtggtatgacgcgaaataaaaaggatcc

SEQ ID NO: 2285 - DNA, 2712 bp, Artificial Sequence
  Description of Artificial Sequence: Synthetic DNA sequence of Bacillus caldolyticus EA1 DNA polymerase R795W
atgaaatacctgctgccgaccgctgctgctggtctgctgctcctcgctgcccagccggcgatggccatgggattgaaaaaaaagcttgttttaatcgacggcagcagcgtggcgtaccgcgcctttttcgccttgccgcttttgcataacgacaaaggcatccatacgaacgccgtctacgggtttacgatgatgttgaataaaattttggcggaagaagagccaactcatatgcttgtcgcgtttgacgccgggaaaacgacgttccggcatgaagcgtttcaagagtataaaggtgggcgccagcagacgccaccggagctgtcggagcagtttccgctgttgcgcgagctgctgagggcgtatcgcatccccgcctatgaactcgagaactacgaagcggacgatattatcggaacgcttgccgcccgcgctgagcaggaagggtttgaggtgaaagtcatttccggcgaccgcgatctgacccagctcgcctccccccatgtgacggtggacattacgaaaaaagggattaccgatatcgaaccgtacacgccggaggcggtccgcgaaaaatacggcttaactccggaacaaatcgttgatttgaaaggattgatgggcgacaaatcggacaacattcccggagtgccgggcatcggggaaaagacggcggtcaagctgctcaagcaattcggcacggtcgaaaacgtgcttgcctccattgacgagatcaaaggcgaaaagttgaaagaaacgctgcgccaacaccgggagatggcgctgttaagcaaaaagctcgccgccattcgccgcgacgccccggtcgagctctcgcttgatgacatcgtctatcaaggggaagaccgggagaaagtggtcgctttatttaaagagcttgggtttcaatcgtttttagagaaaatggaatcgccgtcatcagaagaggaaaaaccgcttgccaagatggcatttacgcttgctgaccgcgtgacggaggagatgcttgccgacaaggcggcgcttgtcgttgaagtggtcgaggaaaattatcatgatgcgccgatcgtcggcatcgctgtggtcaacgaacatggacggtttttcctgcgcccggagacggcgcttgccgatccgcagtttgtcgcctggcttggtgatgaaacgaagaaaaaaagcatgtttgactcaaagcgcgcggcagtcgccttgaaatggaaaggaattgagctatgcggcgtttcctttgatttattgctggccgcctatttgcttgatccggcgcaaggtgttgatgatgtggctgccgcagcaaaaatgaagcaatacgaagcggtgcgctcggatgaagcggtgtatggcaaaggggcgaagcgggccgtgccggatgagccagtgctcgccgagcatctcgtccgcaaggcggcggcgatttgggcgctcgaacgtccgtttttggatgagctgcgccgcaacgaacaagatcggttgctcgtcgagctcgagcagccgttgtcttcgattttggcggaaatggaatttgccggagtgaaagtggatacgaagcggctcgaacagatgggcgaagagctcgccgagcagctgcgcacggtcgagcagcgcatttatgagctcgccggccaagaattcaacatcaattcaccgaaacagctcggcgtcattttatttgaaaaactgcagctgcccgtcttgaaaaaaacgaaaaccggctactccacttcggcggatgtgcttgaaaaacttgcgccttatcacgagatcgtggaaaacattttgcattaccgccagcttggcaagttgcagtcgacgtatattgaaggattgctgaaagtcgtgcgacccgatacaaagaaggtgcatacgattttcaatcaggcgttgacgcaaaccggacggctcagctcgacggagccgaacttgcaaaacattccgattcggcttgaggaaggacggaaaatccgccaagcgttcgtgccgtcggagtctgattggctcattttcgctgccgactactcgcaaattgagttgcgcgtcctcgcccatattgcggaagatgacaatttaatggaagcgttccgccgcgatttggatatccatacgaaaacagcgatggacattttccaagtgagcgaggacgaagtgacgcccaacatgcgccgtcaggcgaaggcggtcaactttgggatcgtttacgggatcagtgattacggcttggcgcaaaacttaaatatttcacgcaaagaggccgctgaattcatcgagcgctacttcgaaagcttccctggcgtgaagcggtatatggaaaacattgtgcaagaagcaaaacagaaagggtatgtgacgacgctgctgcatcggcgctggtatttgccggatatcacgagccgcaacttcaacgtccgcagctttgctgaacggatggcgatgaacacgccgattcaagggagcgccgctgacattattaaaaaggcgatgatcgatctgaacgctagactgaaggaagagcggctgcaagcgcgccttttgctacaggtgcatgacgagctcattttggaggcgccgaaagaagagatggagcggctgtgccggctcgttccggaagtgatggagcaagcggtcacacttcgcgtgccgctcaaagtcgattaccattatggctcgacgtggtatgacgcgaaataaaaaggatcc

SEQ ID NO: 2286 - DNA, 2712 bp, Artificial Sequence
  Description of Artificial Sequence: Synthetic DNA sequence of Bacillus caldolyticus EA1 DNA polymerase R795P
atgaaatacctgctgccgaccgctgctgctggtctgctgctcctcgctgcccagccggcgatggccatgggattgaaaaaaaagcttgttttaatcgacggcagcagcgtggcgtaccgcgcctttttcgccttgccgcttttgcataacgacaaaggcatccatacgaacgccgtctacgggtttacgatgatgttgaataaaattttggcggaagaagagccaactcatatgcttgtcgcgtttgacgccgggaaaacgacgttccggcatgaagcgtttcaagagtataaaggtgggcgccagcagacgccaccggagctgtcggagcagtttccgctgttgcgcgagctgctgagggcgtatcgcatccccgcctatgaactcgagaactacgaagcggacgatattatcggaacgcttgccgcccgcgctgagcaggaagggtttgaggtgaaagtcatttccggcgaccgcgatctgacccagctcgcctccccccatgtgacggtggacattacgaaaaaagggattaccgatatcgaaccgtacacgccggaggcggtccgcgaaaaatacggcttaactccggaacaaatcgttgatttgaaaggattgatgggcgacaaatcggacaacattcccggagtgccgggcatcggggaaaagacggcggtcaagctgctcaagcaattcggcacggtcgaaaacgtgcttgcctccattgacgagatcaaaggcgaaaagttgaaagaaacgctgcgccaacaccgggagatggcgctgttaagcaaaaagctcgccgccattcgccgcgacgccccggtcgagctctcgcttgatgacatcgtctatcaaggggaagaccgggagaaagtggtcgctttatttaaagagcttgggtttcaatcgtttttagagaaaatggaatcgccgtcatcagaagaggaaaaaccgcttgccaagatggcatttacgcttgctgaccgcgtgacggaggagatgcttgccgacaaggcggcgcttgtcgttgaagtggtcgaggaaaattatcatgatgcgccgatcgtcggcatcgctgtggtcaacgaacatggacggtttttcctgcgcccggagacggcgcttgccgatccgcagtttgtcgcctggcttggtgatgaaacgaagaaaaaaagcatgtttgactcaaagcgcgcggcagtcgccttgaaatggaaaggaattgagctatgcggcgtttcctttgatttattgctggccgcctatttgcttgatccggcgcaaggtgttgatgatgtggctgccgcagcaaaaatgaagcaatacgaagcggtgcgctcggatgaagcggtgtatggcaaaggggcgaagcgggccgtgccggatgagccagtgctcgccgagcatctcgtccgcaaggcggcggcgatttgggcgctcgaacgtccgtttttggatgagctgcgccgcaacgaacaagatcggttgctcgtcgagctcgagcagccgttgtcttcgattttggcggaaatggaatttgccggagtgaaagtggatacgaagcggctcgaacagatgggcgaagagctcgccgagcagctgcgcacggtcgagcagcgcatttatgagctcgccggccaagaattcaacatcaattcaccgaaacagctcggcgtcattttatttgaaaaactgcagctgcccgtcttgaaaaaaacgaaaaccggctactccacttcggcggatgtgcttgaaaaacttgcgccttatcacgagatcgtggaaaacattttgcattaccgccagcttggcaagttgcagtcgacgtatattgaaggattgctgaaagtcgtgcgacccgatacaaagaaggtgcatacgattttcaatcaggcgttgacgcaaaccggacggctcagctcgacggagccgaacttgcaaaacattccgattcggcttgaggaaggacggaaaatccgccaagcgttcgtgccgtcggagtctgattggctcattttcgctgccgactactcgcaaattgagttgcgcgtcctcgcccatattgcggaagatgacaatttaatggaagcgttccgccgcgatttggatatccatacgaaaacagcgatggacattttccaagtgagcgaggacgaagtgacgcccaacatgcgccgtcaggcgaaggcggtcaactttgggatcgtttacgggatcagtgattacggcttggcgcaaaacttaaatatttcacgcaaagaggccgctgaattcatcgagcgctacttcgaaagcttccctggcgtgaagcggtatatggaaaacattgtgcaagaagcaaaacagaaagggtatgtgacgacgctgctgcatcggcgcccttatttgccggatatcacgagccgcaacttcaacgtccgcagctttgctgaacggatggcgatgaacacgccgattcaagggagcgccgctgacattattaaaaaggcgatgatcgatctgaacgctagactgaaggaagagcggctgcaagcgcgccttttgctacaggtgcatgacgagctcattttggaggcgccgaaagaagagatggagcggctgtgccggctcgttccggaagtgatggagcaagcggtcacacttcgcgtgccgctcaaagtcgattaccattatggctcgacgtggtatgacgcgaaataaaaaggatcc

SEQ ID NO: 2287 - DNA, 2712 bp, Artificial Sequence
  Description of Artificial Sequence: Synthetic DNA sequence of Bacillus caldolyticus EA1 DNA polymerase R795M
atgaaatacctgctgccgaccgctgctgctggtctgctgctcctcgctgcccagccggcgatggccatgggattgaaaaaaaagcttgttttaatcgacggcagcagcgtggcgtaccgcgcctttttcgccttgccgcttttgcataacgacaaaggcatccatacgaacgccgtctacgggtttacgatgatgttgaataaaattttggcggaagaagagccaactcatatgcttgtcgcgtttgacgccgggaaaacgacgttccggcatgaagcgtttcaagagtataaaggtgggcgccagcagacgccaccggagctgtcggagcagtttccgctgttgcgcgagctgctgagggcgtatcgcatccccgcctatgaactcgagaactacgaagcggacgatattatcggaacgcttgccgcccgcgctgagcaggaagggtttgaggtgaaagtcatttccggcgaccgcgatctgacccagctcgcctccccccatgtgacggtggacattacgaaaaaagggattaccgatatcgaaccgtacacgccggaggcggtccgcgaaaaatacggcttaactccggaacaaatcgttgatttgaaaggattgatgggcgacaaatcggacaacattcccggagtgccgggcatcggggaaaagacggcggtcaagctgctcaagcaattcggcacggtcgaaaacgtgcttgcctccattgacgagatcaaaggcgaaaagttgaaagaaacgctgcgccaacaccgggagatggcgctgttaagcaaaaagctcgccgccattcgccgcgacgccccggtcgagctctcgcttgatgacatcgtctatcaaggggaagaccgggagaaagtggtcgctttatttaaagagcttgggtttcaatcgtttttagagaaaatggaatcgccgtcatcagaagaggaaaaaccgcttgccaagatggcatttacgcttgctgaccgcgtgacggaggagatgcttgccgacaaggcggcgcttgtcgttgaagtggtcgaggaaaattatcatgatgcgccgatcgtcggcatcgctgtggtcaacgaacatggacggtttttcctgcgcccggagacggcgcttgccgatccgcagtttgtcgcctggcttggtgatgaaacgaagaaaaaaagcatgtttgactcaaagcgcgcggcagtcgccttgaaatggaaaggaattgagctatgcggcgtttcctttgatttattgctggccgcctatttgcttgatccggcgcaaggtgttgatgatgtggctgccgcagcaaaaatgaagcaatacgaagcggtgcgctcggatgaagcggtgtatggcaaaggggcgaagcgggccgtgccggatgagccagtgctcgccgagcatctcgtccgcaaggcggcggcgatttgggcgctcgaacgtccgtttttggatgagctgcgccgcaacgaacaagatcggttgctcgtcgagctcgagcagccgttgtcttcgattttggcggaaatggaatttgccggagtgaaagtggatacgaagcggctcgaacagatgggcgaagagctcgccgagcagctgcgcacggtcgagcagcgcatttatgagctcgccggccaagaattcaacatcaattcaccgaaacagctcggcgtcattttatttgaaaaactgcagctgcccgtcttgaaaaaaacgaaaaccggctactccacttcggcggatgtgcttgaaaaacttgcgccttatcacgagatcgtggaaaacattttgcattaccgccagcttggcaagttgcagtcgacgtatattgaaggattgctgaaagtcgtgcgacccgatacaaagaaggtgcatacgattttcaatcaggcgttgacgcaaaccggacggctcagctcgacggagccgaacttgcaaaacattccgattcggcttgaggaaggacggaaaatccgccaagcgttcgtgccgtcggagtctgattggctcattttcgctgccgactactcgcaaattgagttgcgcgtcctcgcccatattgcggaagatgacaatttaatggaagcgttccgccgcgatttggatatccatacgaaaacagcgatggacattttccaagtgagcgaggacgaagtgacgcccaacatgcgccgtcaggcgaaggcggtcaactttgggatcgtttacgggatcagtgattacggcttggcgcaaaacttaaatatttcacgcaaagaggccgctgaattcatcgagcgctacttcgaaagcttccctggcgtgaagcggtatatggaaaacattgtgcaagaagcaaaacagaaagggtatgtgacgacgctgctgcatcggcgcatgtatttgccggatatcacgagccgcaacttcaacgtccgcagctttgctgaacggatggcgatgaacacgccgattcaagggagcgccgctgacattattaaaaaggcgatgatcgatctgaacgctagactgaaggaagagcggctgcaagcgcgccttttgctacaggtgcatgacgagctcattttggaggcgccgaaagaagagatggagcggctgtgccggctcgttccggaagtgatggagcaagcggtcacacttcgcgtgccgctcaaagtcgattaccattatggctcgacgtggtatgacgcgaaataaaaaggatcc

SEQ ID NO: 2288 - DNA, 2712 bp, Artificial Sequence
  Description of Artificial Sequence: Synthetic DNA sequence of Bacillus caldolyticus EA1 DNA polymerase R795N
atgaaatacctgctgccgaccgctgctgctggtctgctgctcctcgctgcccagccggcgatggccatgggattgaaaaaaaagcttgttttaatcgacggcagcagcgtggcgtaccgcgcctttttcgccttgccgcttttgcataacgacaaaggcatccatacgaacgccgtctacgggtttacgatgatgttgaataaaattttggcggaagaagagccaactcatatgcttgtcgcgtttgacgccgggaaaacgacgttccggcatgaagcgtttcaagagtataaaggtgggcgccagcagacgccaccggagctgtcggagcagtttccgctgttgcgcgagctgctgagggcgtatcgcatccccgcctatgaactcgagaactacgaagcggacgatattatcggaacgcttgccgcccgcgctgagcaggaagggtttgaggtgaaagtcatttccggcgaccgcgatctgacccagctcgcctccccccatgtgacggtggacattacgaaaaaagggattaccgatatcgaaccgtacacgccggaggcggtccgcgaaaaatacggcttaactccggaacaaatcgttgatttgaaaggattgatgggcgacaaatcggacaacattcccggagtgccgggcatcggggaaaagacggcggtcaagctgctcaagcaattcggcacggtcgaaaacgtgcttgcctccattgacgagatcaaaggcgaaaagttgaaagaaacgctgcgccaacaccgggagatggcgctgttaagcaaaaagctcgccgccattcgccgcgacgccccggtcgagctctcgcttgatgacatcgtctatcaaggggaagaccgggagaaagtggtcgctttatttaaagagcttgggtttcaatcgtttttagagaaaatggaatcgccgtcatcagaagaggaaaaaccgcttgccaagatggcatttacgcttgctgaccgcgtgacggaggagatgcttgccgacaaggcggcgcttgtcgttgaagtggtcgaggaaaattatcatgatgcgccgatcgtcggcatcgctgtggtcaacgaacatggacggtttttcctgcgcccggagacggcgcttgccgatccgcagtttgtcgcctggcttggtgatgaaacgaagaaaaaaagcatgtttgactcaaagcgcgcggcagtcgccttgaaatggaaaggaattgagctatgcggcgtttcctttgatttattgctggccgcctatttgcttgatccggcgcaaggtgttgatgatgtggctgccgcagcaaaaatgaagcaatacgaagcggtgcgctcggatgaagcggtgtatggcaaaggggcgaagcgggccgtgccggatgagccagtgctcgccgagcatctcgtccgcaaggcggcggcgatttgggcgctcgaacgtccgtttttggatgagctgcgccgcaacgaacaagatcggttgctcgtcgagctcgagcagccgttgtcttcgattttggcggaaatggaatttgccggagtgaaagtggatacgaagcggctcgaacagatgggcgaagagctcgccgagcagctgcgcacggtcgagcagcgcatttatgagctcgccggccaagaattcaacatcaattcaccgaaacagctcggcgtcattttatttgaaaaactgcagctgcccgtcttgaaaaaaacgaaaaccggctactccacttcggcggatgtgcttgaaaaacttgcgccttatcacgagatcgtggaaaacattttgcattaccgccagcttggcaagttgcagtcgacgtatattgaaggattgctgaaagtcgtgcgacccgatacaaagaaggtgcatacgattttcaatcaggcgttgacgcaaaccggacggctcagctcgacggagccgaacttgcaaaacattccgattcggcttgaggaaggacggaaaatccgccaagcgttcgtgccgtcggagtctgattggctcattttcgctgccgactactcgcaaattgagttgcgcgtcctcgcccatattgcggaagatgacaatttaatggaagcgttccgccgcgatttggatatccatacgaaaacagcgatggacattttccaagtgagcgaggacgaagtgacgcccaacatgcgccgtcaggcgaaggcggtcaactttgggatcgtttacgggatcagtgattacggcttggcgcaaaacttaaatatttcacgcaaagaggccgctgaattcatcgagcgctacttcgaaagcttccctggcgtgaagcggtatatggaaaacattgtgcaagaagcaaaacagaaagggtatgtgacgacgctgctgcatcggcgcaattatttgccggatatcacgagccgcaacttcaacgtccgcagctttgctgaacggatggcgatgaacacgccgattcaagggagcgccgctgacattattaaaaaggcgatgatcgatctgaacgctagactgaaggaagagcggctgcaagcgcgccttttgctacaggtgcatgacgagctcattttggaggcgccgaaagaagagatggagcggctgtgccggctcgttccggaagtgatggagcaagcggtcacacttcgcgtgccgctcaaagtcgattaccattatggctcgacgtggtatgacgcgaaataaaaaggatcc

SEQ ID NO: 2289 - DNA, 2712 bp, Artificial Sequence
  Description of Artificial Sequence: Synthetic DNA sequence of Bacillus caldolyticus EA1 DNA polymerase R795V
atgaaatacctgctgccgaccgctgctgctggtctgctgctcctcgctgcccagccggcgatggccatgggattgaaaaaaaagcttgttttaatcgacggcagcagcgtggcgtaccgcgcctttttcgccttgccgcttttgcataacgacaaaggcatccatacgaacgccgtctacgggtttacgatgatgttgaataaaattttggcggaagaagagccaactcatatgcttgtcgcgtttgacgccgggaaaacgacgttccggcatgaagcgtttcaagagtataaaggtgggcgccagcagacgccaccggagctgtcggagcagtttccgctgttgcgcgagctgctgagggcgtatcgcatccccgcctatgaactcgagaactacgaagcggacgatattatcggaacgcttgccgcccgcgctgagcaggaagggtttgaggtgaaagtcatttccggcgaccgcgatctgacccagctcgcctccccccatgtgacggtggacattacgaaaaaagggattaccgatatcgaaccgtacacgccggaggcggtccgcgaaaaatacggcttaactccggaacaaatcgttgatttgaaaggattgatgggcgacaaatcggacaacattcccggagtgccgggcatcggggaaaagacggcggtcaagctgctcaagcaattcggcacggtcgaaaacgtgcttgcctccattgacgagatcaaaggcgaaaagttgaaagaaacgctgcgccaacaccgggagatggcgctgttaagcaaaaagctcgccgccattcgccgcgacgccccggtcgagctctcgcttgatgacatcgtctatcaaggggaagaccgggagaaagtggtcgctttatttaaagagcttgggtttcaatcgtttttagagaaaatggaatcgccgtcatcagaagaggaaaaaccgcttgccaagatggcatttacgcttgctgaccgcgtgacggaggagatgcttgccgacaaggcggcgcttgtcgttgaagtggtcgaggaaaattatcatgatgcgccgatcgtcggcatcgctgtggtcaacgaacatggacggtttttcctgcgcccggagacggcgcttgccgatccgcagtttgtcgcctggcttggtgatgaaacgaagaaaaaaagcatgtttgactcaaagcgcgcggcagtcgccttgaaatggaaaggaattgagctatgcggcgtttcctttgatttattgctggccgcctatttgcttgatccggcgcaaggtgttgatgatgtggctgccgcagcaaaaatgaagcaatacgaagcggtgcgctcggatgaagcggtgtatggcaaaggggcgaagcgggccgtgccggatgagccagtgctcgccgagcatctcgtccgcaaggcggcggcgatttgggcgctcgaacgtccgtttttggatgagctgcgccgcaacgaacaagatcggttgctcgtcgagctcgagcagccgttgtcttcgattttggcggaaatggaatttgccggagtgaaagtggatacgaagcggctcgaacagatgggcgaagagctcgccgagcagctgcgcacggtcgagcagcgcatttatgagctcgccggccaagaattcaacatcaattcaccgaaacagctcggcgtcattttatttgaaaaactgcagctgcccgtcttgaaaaaaacgaaaaccggctactccacttcggcggatgtgcttgaaaaacttgcgccttatcacgagatcgtggaaaacattttgcattaccgccagcttggcaagttgcagtcgacgtatattgaaggattgctgaaagtcgtgcgacccgatacaaagaaggtgcatacgattttcaatcaggcgttgacgcaaaccggacggctcagctcgacggagccgaacttgcaaaacattccgattcggcttgaggaaggacggaaaatccgccaagcgttcgtgccgtcggagtctgattggctcattttcgctgccgactactcgcaaattgagttgcgcgtcctcgcccatattgcggaagatgacaatttaatggaagcgttccgccgcgatttggatatccatacgaaaacagcgatggacattttccaagtgagcgaggacgaagtgacgcccaacatgcgccgtcaggcgaaggcggtcaactttgggatcgtttacgggatcagtgattacggcttggcgcaaaacttaaatatttcacgcaaagaggccgctgaattcatcgagcgctacttcgaaagcttccctggcgtgaagcggtatatggaaaacattgtgcaagaagcaaaacagaaagggtatgtgacgacgctgctgcatcggcgcgtctatttgccggatatcacgagccgcaacttcaacgtccgcagctttgctgaacggatggcgatgaacacgccgattcaagggagcgccgctgacattattaaaaaggcgatgatcgatctgaacgctagactgaaggaagagcggctgcaagcgcgccttttgctacaggtgcatgacgagctcattttggaggcgccgaaagaagagatggagcggctgtgccggctcgttccggaagtgatggagcaagcggtcacacttcgcgtgccgctcaaagtcgattaccattatggctcgacgtggtatgacgcgaaataaaaaggatcc

SEQ ID NO: 2290 - DNA, 2712 bp, Artificial Sequence
  Description of Artificial Sequence: Synthetic DNA sequence of Bacillus caldolyticus EA1 DNA polymerase Y796A
atgaaatacctgctgccgaccgctgctgctggtctgctgctcctcgctgcccagccggcgatggccatgggattgaaaaaaaagcttgttttaatcgacggcagcagcgtggcgtaccgcgcctttttcgccttgccgcttttgcataacgacaaaggcatccatacgaacgccgtctacgggtttacgatgatgttgaataaaattttggcggaagaagagccaactcatatgcttgtcgcgtttgacgccgggaaaacgacgttccggcatgaagcgtttcaagagtataaaggtgggcgccagcagacgccaccggagctgtcggagcagtttccgctgttgcgcgagctgctgagggcgtatcgcatccccgcctatgaactcgagaactacgaagcggacgatattatcggaacgcttgccgcccgcgctgagcaggaagggtttgaggtgaaagtcatttccggcgaccgcgatctgacccagctcgcctccccccatgtgacggtggacattacgaaaaaagggattaccgatatcgaaccgtacacgccggaggcggtccgcgaaaaatacggcttaactccggaacaaatcgttgatttgaaaggattgatgggcgacaaatcggacaacattcccggagtgccgggcatcggggaaaagacggcggtcaagctgctcaagcaattcggcacggtcgaaaacgtgcttgcctccattgacgagatcaaaggcgaaaagttgaaagaaacgctgcgccaacaccgggagatggcgctgttaagcaaaaagctcgccgccattcgccgcgacgccccggtcgagctctcgcttgatgacatcgtctatcaaggggaagaccgggagaaagtggtcgctttatttaaagagcttgggtttcaatcgtttttagagaaaatggaatcgccgtcatcagaagaggaaaaaccgcttgccaagatggcatttacgcttgctgaccgcgtgacggaggagatgcttgccgacaaggcggcgcttgtcgttgaagtggtcgaggaaaattatcatgatgcgccgatcgtcggcatcgctgtggtcaacgaacatggacggtttttcctgcgcccggagacggcgcttgccgatccgcagtttgtcgcctggcttggtgatgaaacgaagaaaaaaagcatgtttgactcaaagcgcgcggcagtcgccttgaaatggaaaggaattgagctatgcggcgtttcctttgatttattgctggccgcctatttgcttgatccggcgcaaggtgttgatgatgtggctgccgcagcaaaaatgaagcaatacgaagcggtgcgctcggatgaagcggtgtatggcaaaggggcgaagcgggccgtgccggatgagccagtgctcgccgagcatctcgtccgcaaggcggcggcgatttgggcgctcgaacgtccgtttttggatgagctgcgccgcaacgaacaagatcggttgctcgtcgagctcgagcagccgttgtcttcgattttggcggaaatggaatttgccggagtgaaagtggatacgaagcggctcgaacagatgggcgaagagctcgccgagcagctgcgcacggtcgagcagcgcatttatgagctcgccggccaagaattcaacatcaattcaccgaaacagctcggcgtcattttatttgaaaaactgcagctgcccgtcttgaaaaaaacgaaaaccggctactccacttcggcggatgtgcttgaaaaacttgcgccttatcacgagatcgtggaaaacattttgcattaccgccagcttggcaagttgcagtcgacgtatattgaaggattgctgaaagtcgtgcgacccgatacaaagaaggtgcatacgattttcaatcaggcgttgacgcaaaccggacggctcagctcgacggagccgaacttgcaaaacattccgattcggcttgaggaaggacggaaaatccgccaagcgttcgtgccgtcggagtctgattggctcattttcgctgccgactactcgcaaattgagttgcgcgtcctcgcccatattgcggaagatgacaatttaatggaagcgttccgccgcgatttggatatccatacgaaaacagcgatggacattttccaagtgagcgaggacgaagtgacgcccaacatgcgccgtcaggcgaaggcggtcaactttgggatcgtttacgggatcagtgattacggcttggcgcaaaacttaaatatttcacgcaaagaggccgctgaattcatcgagcgctacttcgaaagcttccctggcgtgaagcggtatatggaaaacattgtgcaagaagcaaaacagaaagggtatgtgacgacgctgctgcatcggcgccgcgctttgccggatatcacgagccgcaacttcaacgtccgcagctttgctgaacggatggcgatgaacacgccgattcaagggagcgccgctgacattattaaaaaggcgatgatcgatctgaacgctagactgaaggaagagcggctgcaagcgcgccttttgctacaggtgcatgacgagctcattttggaggcgccgaaagaagagatggagcggctgtgccggctcgttccggaagtgatggagcaagcggtcacacttcgcgtgccgctcaaagtcgattaccattatggctcgacgtggtatgacgcgaaataaaaaggatcc

SEQ ID NO: 2291 - DNA, 2712 bp, Artificial Sequence
  Description of Artificial Sequence: Synthetic DNA sequence of Bacillus caldolyticus EA1 DNA polymerase Y796R
atgaaatacctgctgccgaccgctgctgctggtctgctgctcctcgctgcccagccggcgatggccatgggattgaaaaaaaagcttgttttaatcgacggcagcagcgtggcgtaccgcgcctttttcgccttgccgcttttgcataacgacaaaggcatccatacgaacgccgtctacgggtttacgatgatgttgaataaaattttggcggaagaagagccaactcatatgcttgtcgcgtttgacgccgggaaaacgacgttccggcatgaagcgtttcaagagtataaaggtgggcgccagcagacgccaccggagctgtcggagcagtttccgctgttgcgcgagctgctgagggcgtatcgcatccccgcctatgaactcgagaactacgaagcggacgatattatcggaacgcttgccgcccgcgctgagcaggaagggtttgaggtgaaagtcatttccggcgaccgcgatctgacccagctcgcctccccccatgtgacggtggacattacgaaaaaagggattaccgatatcgaaccgtacacgccggaggcggtccgcgaaaaatacggcttaactccggaacaaatcgttgatttgaaaggattgatgggcgacaaatcggacaacattcccggagtgccgggcatcggggaaaagacggcggtcaagctgctcaagcaattcggcacggtcgaaaacgtgcttgcctccattgacgagatcaaaggcgaaaagttgaaagaaacgctgcgccaacaccgggagatggcgctgttaagcaaaaagctcgccgccattcgccgcgacgccccggtcgagctctcgcttgatgacatcgtctatcaaggggaagaccgggagaaagtggtcgctttatttaaagagcttgggtttcaatcgtttttagagaaaatggaatcgccgtcatcagaagaggaaaaaccgcttgccaagatggcatttacgcttgctgaccgcgtgacggaggagatgcttgccgacaaggcggcgcttgtcgttgaagtggtcgaggaaaattatcatgatgcgccgatcgtcggcatcgctgtggtcaacgaacatggacggtttttcctgcgcccggagacggcgcttgccgatccgcagtttgtcgcctggcttggtgatgaaacgaagaaaaaaagcatgtttgactcaaagcgcgcggcagtcgccttgaaatggaaaggaattgagctatgcggcgtttcctttgatttattgctggccgcctatttgcttgatccggcgcaaggtgttgatgatgtggctgccgcagcaaaaatgaagcaatacgaagcggtgcgctcggatgaagcggtgtatggcaaaggggcgaagcgggccgtgccggatgagccagtgctcgccgagcatctcgtccgcaaggcggcggcgatttgggcgctcgaacgtccgtttttggatgagctgcgccgcaacgaacaagatcggttgctcgtcgagctcgagcagccgttgtcttcgattttggcggaaatggaatttgccggagtgaaagtggatacgaagcggctcgaacagatgggcgaagagctcgccgagcagctgcgcacggtcgagcagcgcatttatgagctcgccggccaagaattcaacatcaattcaccgaaacagctcggcgtcattttatttgaaaaactgcagctgcccgtcttgaaaaaaacgaaaaccggctactccacttcggcggatgtgcttgaaaaacttgcgccttatcacgagatcgtggaaaacattttgcattaccgccagcttggcaagttgcagtcgacgtatattgaaggattgctgaaagtcgtgcgacccgatacaaagaaggtgcatacgattttcaatcaggcgttgacgcaaaccggacggctcagctcgacggagccgaacttgcaaaacattccgattcggcttgaggaaggacggaaaatccgccaagcgttcgtgccgtcggagtctgattggctcattttcgctgccgactactcgcaaattgagttgcgcgtcctcgcccatattgcggaagatgacaatttaatggaagcgttccgccgcgatttggatatccatacgaaaacagcgatggacattttccaagtgagcgaggacgaagtgacgcccaacatgcgccgtcaggcgaaggcggtcaactttgggatcgtttacgggatcagtgattacggcttggcgcaaaacttaaatatttcacgcaaagaggccgctgaattcatcgagcgctacttcgaaagcttccctggcgtgaagcggtatatggaaaacattgtgcaagaagcaaaacagaaagggtatgtgacgacgctgctgcatcggcgccgccgattgccggatatcacgagccgcaacttcaacgtccgcagctttgctgaacggatggcgatgaacacgccgattcaagggagcgccgctgacattattaaaaaggcgatgatcgatctgaacgctagactgaaggaagagcggctgcaagcgcgccttttgctacaggtgcatgacgagctcattttggaggcgccgaaagaagagatggagcggctgtgccggctcgttccggaagtgatggagcaagcggtcacacttcgcgtgccgctcaaagtcgattaccattatggctcgacgtggtatgacgcgaaataaaaaggatcc

SEQ ID NO: 2292 - DNA, 2712 bp, Artificial Sequence
  Description of Artificial Sequence: Synthetic DNA sequence of Bacillus caldolyticus EA1 DNA polymerase Y796C
atgaaatacctgctgccgaccgctgctgctggtctgctgctcctcgctgcccagccggcgatggccatgggattgaaaaaaaagcttgttttaatcgacggcagcagcgtggcgtaccgcgcctttttcgccttgccgcttttgcataacgacaaaggcatccatacgaacgccgtctacgggtttacgatgatgttgaataaaattttggcggaagaagagccaactcatatgcttgtcgcgtttgacgccgggaaaacgacgttccggcatgaagcgtttcaagagtataaaggtgggcgccagcagacgccaccggagctgtcggagcagtttccgctgttgcgcgagctgctgagggcgtatcgcatccccgcctatgaactcgagaactacgaagcggacgatattatcggaacgcttgccgcccgcgctgagcaggaagggtttgaggtgaaagtcatttccggcgaccgcgatctgacccagctcgcctccccccatgtgacggtggacattacgaaaaaagggattaccgatatcgaaccgtacacgccggaggcggtccgcgaaaaatacggcttaactccggaacaaatcgttgatttgaaaggattgatgggcgacaaatcggacaacattcccggagtgccgggcatcggggaaaagacggcggtcaagctgctcaagcaattcggcacggtcgaaaacgtgcttgcctccattgacgagatcaaaggcgaaaagttgaaagaaacgctgcgccaacaccgggagatggcgctgttaagcaaaaagctcgccgccattcgccgcgacgccccggtcgagctctcgcttgatgacatcgtctatcaaggggaagaccgggagaaagtggtcgctttatttaaagagcttgggtttcaatcgtttttagagaaaatggaatcgccgtcatcagaagaggaaaaaccgcttgccaagatggcatttacgcttgctgaccgcgtgacggaggagatgcttgccgacaaggcggcgcttgtcgttgaagtggtcgaggaaaattatcatgatgcgccgatcgtcggcatcgctgtggtcaacgaacatggacggtttttcctgcgcccggagacggcgcttgccgatccgcagtttgtcgcctggcttggtgatgaaacgaagaaaaaaagcatgtttgactcaaagcgcgcggcagtcgccttgaaatggaaaggaattgagctatgcggcgtttcctttgatttattgctggccgcctatttgcttgatccggcgcaaggtgttgatgatgtggctgccgcagcaaaaatgaagcaatacgaagcggtgcgctcggatgaagcggtgtatggcaaaggggcgaagcgggccgtgccggatgagccagtgctcgccgagcatctcgtccgcaaggcggcggcgatttgggcgctcgaacgtccgtttttggatgagctgcgccgcaacgaacaagatcggttgctcgtcgagctcgagcagccgttgtcttcgattttggcggaaatggaatttgccggagtgaaagtggatacgaagcggctcgaacagatgggcgaagagctcgccgagcagctgcgcacggtcgagcagcgcatttatgagctcgccggccaagaattcaacatcaattcaccgaaacagctcggcgtcattttatttgaaaaactgcagctgcccgtcttgaaaaaaacgaaaaccggctactccacttcggcggatgtgcttgaaaaacttgcgccttatcacgagatcgtggaaaacattttgcattaccgccagcttggcaagttgcagtcgacgtatattgaaggattgctgaaagtcgtgcgacccgatacaaagaaggtgcatacgattttcaatcaggcgttgacgcaaaccggacggctcagctcgacggagccgaacttgcaaaacattccgattcggcttgaggaaggacggaaaatccgccaagcgttcgtgccgtcggagtctgattggctcattttcgctgccgactactcgcaaattgagttgcgcgtcctcgcccatattgcggaagatgacaatttaatggaagcgttccgccgcgatttggatatccatacgaaaacagcgatggacattttccaagtgagcgaggacgaagtgacgcccaacatgcgccgtcaggcgaaggcggtcaactttgggatcgtttacgggatcagtgattacggcttggcgcaaaacttaaatatttcacgcaaagaggccgctgaattcatcgagcgctacttcgaaagcttccctggcgtgaagcggtatatggaaaacattgtgcaagaagcaaaacagaaagggtatgtgacgacgctgctgcatcggcgccgctgtttgccggatatcacgagccgcaacttcaacgtccgcagctttgctgaacggatggcgatgaacacgccgattcaagggagcgccgctgacattattaaaaaggcgatgatcgatctgaacgctagactgaaggaagagcggctgcaagcgcgccttttgctacaggtgcatgacgagctcattttggaggcgccgaaagaagagatggagcggctgtgccggctcgttccggaagtgatggagcaagcggtcacacttcgcgtgccgctcaaagtcgattaccattatggctcgacgtggtatgacgcgaaataaaaaggatcc

SEQ ID NO: 2293 - DNA, 2712 bp, Artificial Sequence
  Description of Artificial Sequence: Synthetic DNA sequence of Bacillus caldolyticus EA1 DNA polymerase Y796G
atgaaatacctgctgccgaccgctgctgctggtctgctgctcctcgctgcccagccggcgatggccatgggattgaaaaaaaagcttgttttaatcgacggcagcagcgtggcgtaccgcgcctttttcgccttgccgcttttgcataacgacaaaggcatccatacgaacgccgtctacgggtttacgatgatgttgaataaaattttggcggaagaagagccaactcatatgcttgtcgcgtttgacgccgggaaaacgacgttccggcatgaagcgtttcaagagtataaaggtgggcgccagcagacgccaccggagctgtcggagcagtttccgctgttgcgcgagctgctgagggcgtatcgcatccccgcctatgaactcgagaactacgaagcggacgatattatcggaacgcttgccgcccgcgctgagcaggaagggtttgaggtgaaagtcatttccggcgaccgcgatctgacccagctcgcctccccccatgtgacggtggacattacgaaaaaagggattaccgatatcgaaccgtacacgccggaggcggtccgcgaaaaatacggcttaactccggaacaaatcgttgatttgaaaggattgatgggcgacaaatcggacaacattcccggagtgccgggcatcggggaaaagacggcggtcaagctgctcaagcaattcggcacggtcgaaaacgtgcttgcctccattgacgagatcaaaggcgaaaagttgaaagaaacgctgcgccaacaccgggagatggcgctgttaagcaaaaagctcgccgccattcgccgcgacgccccggtcgagctctcgcttgatgacatcgtctatcaaggggaagaccgggagaaagtggtcgctttatttaaagagcttgggtttcaatcgtttttagagaaaatggaatcgccgtcatcagaagaggaaaaaccgcttgccaagatggcatttacgcttgctgaccgcgtgacggaggagatgcttgccgacaaggcggcgcttgtcgttgaagtggtcgaggaaaattatcatgatgcgccgatcgtcggcatcgctgtggtcaacgaacatggacggtttttcctgcgcccggagacggcgcttgccgatccgcagtttgtcgcctggcttggtgatgaaacgaagaaaaaaagcatgtttgactcaaagcgcgcggcagtcgccttgaaatggaaaggaattgagctatgcggcgtttcctttgatttattgctggccgcctatttgcttgatccggcgcaaggtgttgatgatgtggctgccgcagcaaaaatgaagcaatacgaagcggtgcgctcggatgaagcggtgtatggcaaaggggcgaagcgggccgtgccggatgagccagtgctcgccgagcatctcgtccgcaaggcggcggcgatttgggcgctcgaacgtccgtttttggatgagctgcgccgcaacgaacaagatcggttgctcgtcgagctcgagcagccgttgtcttcgattttggcggaaatggaatttgccggagtgaaagtggatacgaagcggctcgaacagatgggcgaagagctcgccgagcagctgcgcacggtcgagcagcgcatttatgagctcgccggccaagaattcaacatcaattcaccgaaacagctcggcgtcattttatttgaaaaactgcagctgcccgtcttgaaaaaaacgaaaaccggctactccacttcggcggatgtgcttgaaaaacttgcgccttatcacgagatcgtggaaaacattttgcattaccgccagcttggcaagttgcagtcgacgtatattgaaggattgctgaaagtcgtgcgacccgatacaaagaaggtgcatacgattttcaatcaggcgttgacgcaaaccggacggctcagctcgacggagccgaacttgcaaaacattccgattcggcttgaggaaggacggaaaatccgccaagcgttcgtgccgtcggagtctgattggctcattttcgctgccgactactcgcaaattgagttgcgcgtcctcgcccatattgcggaagatgacaatttaatggaagcgttccgccgcgatttggatatccatacgaaaacagcgatggacattttccaagtgagcgaggacgaagtgacgcccaacatgcgccgtcaggcgaaggcggtcaactttgggatcgtttacgggatcagtgattacggcttggcgcaaaacttaaatatttcacgcaaagaggccgctgaattcatcgagcgctacttcgaaagcttccctggcgtgaagcggtatatggaaaacattgtgcaagaagcaaaacagaaagggtatgtgacgacgctgctgcatcggcgccgcggtttgccggatatcacgagccgcaacttcaacgtccgcagctttgctgaacggatggcgatgaacacgccgattcaagggagcgccgctgacattattaaaaaggcgatgatcgatctgaacgctagactgaaggaagagcggctgcaagcgcgccttttgctacaggtgcatgacgagctcattttggaggcgccgaaagaagagatggagcggctgtgccggctcgttccggaagtgatggagcaagcggtcacacttcgcgtgccgctcaaagtcgattaccattatggctcgacgtggtatgacgcgaaataaaaaggatcc

SEQ ID NO: 2294 - DNA, 2712 bp, Artificial Sequence
  Description of Artificial Sequence: Synthetic DNA sequence of Bacillus caldolyticus EA1 DNA polymerase Y796Q
atgaaatacctgctgccgaccgctgctgctggtctgctgctcctcgctgcccagccggcgatggccatgggattgaaaaaaaagcttgttttaatcgacggcagcagcgtggcgtaccgcgcctttttcgccttgccgcttttgcataacgacaaaggcatccatacgaacgccgtctacgggtttacgatgatgttgaataaaattttggcggaagaagagccaactcatatgcttgtcgcgtttgacgccgggaaaacgacgttccggcatgaagcgtttcaagagtataaaggtgggcgccagcagacgccaccggagctgtcggagcagtttccgctgttgcgcgagctgctgagggcgtatcgcatccccgcctatgaactcgagaactacgaagcggacgatattatcggaacgcttgccgcccgcgctgagcaggaagggtttgaggtgaaagtcatttccggcgaccgcgatctgacccagctcgcctccccccatgtgacggtggacattacgaaaaaagggattaccgatatcgaaccgtacacgccggaggcggtccgcgaaaaatacggcttaactccggaacaaatcgttgatttgaaaggattgatgggcgacaaatcggacaacattcccggagtgccgggcatcggggaaaagacggcggtcaagctgctcaagcaattcggcacggtcgaaaacgtgcttgcctccattgacgagatcaaaggcgaaaagttgaaagaaacgctgcgccaacaccgggagatggcgctgttaagcaaaaagctcgccgccattcgccgcgacgccccggtcgagctctcgcttgatgacatcgtctatcaaggggaagaccgggagaaagtggtcgctttatttaaagagcttgggtttcaatcgtttttagagaaaatggaatcgccgtcatcagaagaggaaaaaccgcttgccaagatggcatttacgcttgctgaccgcgtgacggaggagatgcttgccgacaaggcggcgcttgtcgttgaagtggtcgaggaaaattatcatgatgcgccgatcgtcggcatcgctgtggtcaacgaacatggacggtttttcctgcgcccggagacggcgcttgccgatccgcagtttgtcgcctggcttggtgatgaaacgaagaaaaaaagcatgtttgactcaaagcgcgcggcagtcgccttgaaatggaaaggaattgagctatgcggcgtttcctttgatttattgctggccgcctatttgcttgatccggcgcaaggtgttgatgatgtggctgccgcagcaaaaatgaagcaatacgaagcggtgcgctcggatgaagcggtgtatggcaaaggggcgaagcgggccgtgccggatgagccagtgctcgccgagcatctcgtccgcaaggcggcggcgatttgggcgctcgaacgtccgtttttggatgagctgcgccgcaacgaacaagatcggttgctcgtcgagctcgagcagccgttgtcttcgattttggcggaaatggaatttgccggagtgaaagtggatacgaagcggctcgaacagatgggcgaagagctcgccgagcagctgcgcacggtcgagcagcgcatttatgagctcgccggccaagaattcaacatcaattcaccgaaacagctcggcgtcattttatttgaaaaactgcagctgcccgtcttgaaaaaaacgaaaaccggctactccacttcggcggatgtgcttgaaaaacttgcgccttatcacgagatcgtggaaaacattttgcattaccgccagcttggcaagttgcagtcgacgtatattgaaggattgctgaaagtcgtgcgacccgatacaaagaaggtgcatacgattttcaatcaggcgttgacgcaaaccggacggctcagctcgacggagccgaacttgcaaaacattccgattcggcttgaggaaggacggaaaatccgccaagcgttcgtgccgtcggagtctgattggctcattttcgctgccgactactcgcaaattgagttgcgcgtcctcgcccatattgcggaagatgacaatttaatggaagcgttccgccgcgatttggatatccatacgaaaacagcgatggacattttccaagtgagcgaggacgaagtgacgcccaacatgcgccgtcaggcgaaggcggtcaactttgggatcgtttacgggatcagtgattacggcttggcgcaaaacttaaatatttcacgcaaagaggccgctgaattcatcgagcgctacttcgaaagcttccctggcgtgaagcggtatatggaaaacattgtgcaagaagcaaaacagaaagggtatgtgacgacgctgctgcatcggcgccgccaattgccggatatcacgagccgcaacttcaacgtccgcagctttgctgaacggatggcgatgaacacgccgattcaagggagcgccgctgacattattaaaaaggcgatgatcgatctgaacgctagactgaaggaagagcggctgcaagcgcgccttttgctacaggtgcatgacgagctcattttggaggcgccgaaagaagagatggagcggctgtgccggctcgttccggaagtgatggagcaagcggtcacacttcgcgtgccgctcaaagtcgattaccattatggctcgacgtggtatgacgcgaaataaaaaggatcc

SEQ ID NO: 2295 - DNA, 2712 bp, Artificial Sequence
  Description of Artificial Sequence: Synthetic DNA sequence of Bacillus caldolyticus EA1 DNA polymerase Y796H
atgaaatacctgctgccgaccgctgctgctggtctgctgctcctcgctgcccagccggcgatggccatgggattgaaaaaaaagcttgttttaatcgacggcagcagcgtggcgtaccgcgcctttttcgccttgccgcttttgcataacgacaaaggcatccatacgaacgccgtctacgggtttacgatgatgttgaataaaattttggcggaagaagagccaactcatatgcttgtcgcgtttgacgccgggaaaacgacgttccggcatgaagcgtttcaagagtataaaggtgggcgccagcagacgccaccggagctgtcggagcagtttccgctgttgcgcgagctgctgagggcgtatcgcatccccgcctatgaactcgagaactacgaagcggacgatattatcggaacgcttgccgcccgcgctgagcaggaagggtttgaggtgaaagtcatttccggcgaccgcgatctgacccagctcgcctccccccatgtgacggtggacattacgaaaaaagggattaccgatatcgaaccgtacacgccggaggcggtccgcgaaaaatacggcttaactccggaacaaatcgttgatttgaaaggattgatgggcgacaaatcggacaacattcccggagtgccgggcatcggggaaaagacggcggtcaagctgctcaagcaattcggcacggtcgaaaacgtgcttgcctccattgacgagatcaaaggcgaaaagttgaaagaaacgctgcgccaacaccgggagatggcgctgttaagcaaaaagctcgccgccattcgccgcgacgccccggtcgagctctcgcttgatgacatcgtctatcaaggggaagaccgggagaaagtggtcgctttatttaaagagcttgggtttcaatcgtttttagagaaaatggaatcgccgtcatcagaagaggaaaaaccgcttgccaagatggcatttacgcttgctgaccgcgtgacggaggagatgcttgccgacaaggcggcgcttgtcgttgaagtggtcgaggaaaattatcatgatgcgccgatcgtcggcatcgctgtggtcaacgaacatggacggtttttcctgcgcccggagacggcgcttgccgatccgcagtttgtcgcctggcttggtgatgaaacgaagaaaaaaagcatgtttgactcaaagcgcgcggcagtcgccttgaaatggaaaggaattgagctatgcggcgtttcctttgatttattgctggccgcctatttgcttgatccggcgcaaggtgttgatgatgtggctgccgcagcaaaaatgaagcaatacgaagcggtgcgctcggatgaagcggtgtatggcaaaggggcgaagcgggccgtgccggatgagccagtgctcgccgagcatctcgtccgcaaggcggcggcgatttgggcgctcgaacgtccgtttttggatgagctgcgccgcaacgaacaagatcggttgctcgtcgagctcgagcagccgttgtcttcgattttggcggaaatggaatttgccggagtgaaagtggatacgaagcggctcgaacagatgggcgaagagctcgccgagcagctgcgcacggtcgagcagcgcatttatgagctcgccggccaagaattcaacatcaattcaccgaaacagctcggcgtcattttatttgaaaaactgcagctgcccgtcttgaaaaaaacgaaaaccggctactccacttcggcggatgtgcttgaaaaacttgcgccttatcacgagatcgtggaaaacattttgcattaccgccagcttggcaagttgcagtcgacgtatattgaaggattgctgaaagtcgtgcgacccgatacaaagaaggtgcatacgattttcaatcaggcgttgacgcaaaccggacggctcagctcgacggagccgaacttgcaaaacattccgattcggcttgaggaaggacggaaaatccgccaagcgttcgtgccgtcggagtctgattggctcattttcgctgccgactactcgcaaattgagttgcgcgtcctcgcccatattgcggaagatgacaatttaatggaagcgttccgccgcgatttggatatccatacgaaaacagcgatggacattttccaagtgagcgaggacgaagtgacgcccaacatgcgccgtcaggcgaaggcggtcaactttgggatcgtttacgggatcagtgattacggcttggcgcaaaacttaaatatttcacgcaaagaggccgctgaattcatcgagcgctacttcgaaagcttccctggcgtgaagcggtatatggaaaacattgtgcaagaagcaaaacagaaagggtatgtgacgacgctgctgcatcggcgccgccatttgccggatatcacgagccgcaacttcaacgtccgcagctttgctgaacggatggcgatgaacacgccgattcaagggagcgccgctgacattattaaaaaggcgatgatcgatctgaacgctagactgaaggaagagcggctgcaagcgcgccttttgctacaggtgcatgacgagctcattttggaggcgccgaaagaagagatggagcggctgtgccggctcgttccggaagtgatggagcaagcggtcacacttcgcgtgccgctcaaagtcgattaccattatggctcgacgtggtatgacgcgaaataaaaaggatcc

SEQ ID NO: 2296 - DNA, 2712 bp, Artificial Sequence
  Description of Artificial Sequence: Synthetic DNA sequence of Bacillus caldolyticus EA1 DNA polymerase Y796I
atgaaatacctgctgccgaccgctgctgctggtctgctgctcctcgctgcccagccggcgatggccatgggattgaaaaaaaagcttgttttaatcgacggcagcagcgtggcgtaccgcgcctttttcgccttgccgcttttgcataacgacaaaggcatccatacgaacgccgtctacgggtttacgatgatgttgaataaaattttggcggaagaagagccaactcatatgcttgtcgcgtttgacgccgggaaaacgacgttccggcatgaagcgtttcaagagtataaaggtgggcgccagcagacgccaccggagctgtcggagcagtttccgctgttgcgcgagctgctgagggcgtatcgcatccccgcctatgaactcgagaactacgaagcggacgatattatcggaacgcttgccgcccgcgctgagcaggaagggtttgaggtgaaagtcatttccggcgaccgcgatctgacccagctcgcctccccccatgtgacggtggacattacgaaaaaagggattaccgatatcgaaccgtacacgccggaggcggtccgcgaaaaatacggcttaactccggaacaaatcgttgatttgaaaggattgatgggcgacaaatcggacaacattcccggagtgccgggcatcggggaaaagacggcggtcaagctgctcaagcaattcggcacggtcgaaaacgtgcttgcctccattgacgagatcaaaggcgaaaagttgaaagaaacgctgcgccaacaccgggagatggcgctgttaagcaaaaagctcgccgccattcgccgcgacgccccggtcgagctctcgcttgatgacatcgtctatcaaggggaagaccgggagaaagtggtcgctttatttaaagagcttgggtttcaatcgtttttagagaaaatggaatcgccgtcatcagaagaggaaaaaccgcttgccaagatggcatttacgcttgctgaccgcgtgacggaggagatgcttgccgacaaggcggcgcttgtcgttgaagtggtcgaggaaaattatcatgatgcgccgatcgtcggcatcgctgtggtcaacgaacatggacggtttttcctgcgcccggagacggcgcttgccgatccgcagtttgtcgcctggcttggtgatgaaacgaagaaaaaaagcatgtttgactcaaagcgcgcggcagtcgccttgaaatggaaaggaattgagctatgcggcgtttcctttgatttattgctggccgcctatttgcttgatccggcgcaaggtgttgatgatgtggctgccgcagcaaaaatgaagcaatacgaagcggtgcgctcggatgaagcggtgtatggcaaaggggcgaagcgggccgtgccggatgagccagtgctcgccgagcatctcgtccgcaaggcggcggcgatttgggcgctcgaacgtccgtttttggatgagctgcgccgcaacgaacaagatcggttgctcgtcgagctcgagcagccgttgtcttcgattttggcggaaatggaatttgccggagtgaaagtggatacgaagcggctcgaacagatgggcgaagagctcgccgagcagctgcgcacggtcgagcagcgcatttatgagctcgccggccaagaattcaacatcaattcaccgaaacagctcggcgtcattttatttgaaaaactgcagctgcccgtcttgaaaaaaacgaaaaccggctactccacttcggcggatgtgcttgaaaaacttgcgccttatcacgagatcgtggaaaacattttgcattaccgccagcttggcaagttgcagtcgacgtatattgaaggattgctgaaagtcgtgcgacccgatacaaagaaggtgcatacgattttcaatcaggcgttgacgcaaaccggacggctcagctcgacggagccgaacttgcaaaacattccgattcggcttgaggaaggacggaaaatccgccaagcgttcgtgccgtcggagtctgattggctcattttcgctgccgactactcgcaaattgagttgcgcgtcctcgcccatattgcggaagatgacaatttaatggaagcgttccgccgcgatttggatatccatacgaaaacagcgatggacattttccaagtgagcgaggacgaagtgacgcccaacatgcgccgtcaggcgaaggcggtcaactttgggatcgtttacgggatcagtgattacggcttggcgcaaaacttaaatatttcacgcaaagaggccgctgaattcatcgagcgctacttcgaaagcttccctggcgtgaagcggtatatggaaaacattgtgcaagaagcaaaacagaaagggtatgtgacgacgctgctgcatcggcgccgcattttgccggatatcacgagccgcaacttcaacgtccgcagctttgctgaacggatggcgatgaacacgccgattcaagggagcgccgctgacattattaaaaaggcgatgatcgatctgaacgctagactgaaggaagagcggctgcaagcgcgccttttgctacaggtgcatgacgagctcattttggaggcgccgaaagaagagatggagcggctgtgccggctcgttccggaagtgatggagcaagcggtcacacttcgcgtgccgctcaaagtcgattaccattatggctcgacgtggtatgacgcgaaataaaaaggatcc

SEQ ID NO: 2297 - DNA, 2712 bp, Artificial Sequence
  Description of Artificial Sequence: Synthetic DNA sequence of Bacillus caldolyticus EA1 DNA polymerase Y796L
atgaaatacctgctgccgaccgctgctgctggtctgctgctcctcgctgcccagccggcgatggccatgggattgaaaaaaaagcttgttttaatcgacggcagcagcgtggcgtaccgcgcctttttcgccttgccgcttttgcataacgacaaaggcatccatacgaacgccgtctacgggtttacgatgatgttgaataaaattttggcggaagaagagccaactcatatgcttgtcgcgtttgacgccgggaaaacgacgttccggcatgaagcgtttcaagagtataaaggtgggcgccagcagacgccaccggagctgtcggagcagtttccgctgttgcgcgagctgctgagggcgtatcgcatccccgcctatgaactcgagaactacgaagcggacgatattatcggaacgcttgccgcccgcgctgagcaggaagggtttgaggtgaaagtcatttccggcgaccgcgatctgacccagctcgcctccccccatgtgacggtggacattacgaaaaaagggattaccgatatcgaaccgtacacgccggaggcggtccgcgaaaaatacggcttaactccggaacaaatcgttgatttgaaaggattgatgggcgacaaatcggacaacattcccggagtgccgggcatcggggaaaagacggcggtcaagctgctcaagcaattcggcacggtcgaaaacgtgcttgcctccattgacgagatcaaaggcgaaaagttgaaagaaacgctgcgccaacaccgggagatggcgctgttaagcaaaaagctcgccgccattcgccgcgacgccccggtcgagctctcgcttgatgacatcgtctatcaaggggaagaccgggagaaagtggtcgctttatttaaagagcttgggtttcaatcgtttttagagaaaatggaatcgccgtcatcagaagaggaaaaaccgcttgccaagatggcatttacgcttgctgaccgcgtgacggaggagatgcttgccgacaaggcggcgcttgtcgttgaagtggtcgaggaaaattatcatgatgcgccgatcgtcggcatcgctgtggtcaacgaacatggacggtttttcctgcgcccggagacggcgcttgccgatccgcagtttgtcgcctggcttggtgatgaaacgaagaaaaaaagcatgtttgactcaaagcgcgcggcagtcgccttgaaatggaaaggaattgagctatgcggcgtttcctttgatttattgctggccgcctatttgcttgatccggcgcaaggtgttgatgatgtggctgccgcagcaaaaatgaagcaatacgaagcggtgcgctcggatgaagcggtgtatggcaaaggggcgaagcgggccgtgccggatgagccagtgctcgccgagcatctcgtccgcaaggcggcggcgatttgggcgctcgaacgtccgtttttggatgagctgcgccgcaacgaacaagatcggttgctcgtcgagctcgagcagccgttgtcttcgattttggcggaaatggaatttgccggagtgaaagtggatacgaagcggctcgaacagatgggcgaagagctcgccgagcagctgcgcacggtcgagcagcgcatttatgagctcgccggccaagaattcaacatcaattcaccgaaacagctcggcgtcattttatttgaaaaactgcagctgcccgtcttgaaaaaaacgaaaaccggctactccacttcggcggatgtgcttgaaaaacttgcgccttatcacgagatcgtggaaaacattttgcattaccgccagcttggcaagttgcagtcgacgtatattgaaggattgctgaaagtcgtgcgacccgatacaaagaaggtgcatacgattttcaatcaggcgttgacgcaaaccggacggctcagctcgacggagccgaacttgcaaaacattccgattcggcttgaggaaggacggaaaatccgccaagcgttcgtgccgtcggagtctgattggctcattttcgctgccgactactcgcaaattgagttgcgcgtcctcgcccatattgcggaagatgacaatttaatggaagcgttccgccgcgatttggatatccatacgaaaacagcgatggacattttccaagtgagcgaggacgaagtgacgcccaacatgcgccgtcaggcgaaggcggtcaactttgggatcgtttacgggatcagtgattacggcttggcgcaaaacttaaatatttcacgcaaagaggccgctgaattcatcgagcgctacttcgaaagcttccctggcgtgaagcggtatatggaaaacattgtgcaagaagcaaaacagaaagggtatgtgacgacgctgctgcatcggcgccgcttattgccggatatcacgagccgcaacttcaacgtccgcagctttgctgaacggatggcgatgaacacgccgattcaagggagcgccgctgacattattaaaaaggcgatgatcgatctgaacgctagactgaaggaagagcggctgcaagcgcgccttttgctacaggtgcatgacgagctcattttggaggcgccgaaagaagagatggagcggctgtgccggctcgttccggaagtgatggagcaagcggtcacacttcgcgtgccgctcaaagtcgattaccattatggctcgacgtggtatgacgcgaaataaaaaggatcc

SEQ ID NO: 2298 - DNA, 2712 bp, Artificial Sequence
  Description of Artificial Sequence: Synthetic DNA sequence of Bacillus caldolyticus EA1 DNA polymerase Y796K
atgaaatacctgctgccgaccgctgctgctggtctgctgctcctcgctgcccagccggcgatggccatgggattgaaaaaaaagcttgttttaatcgacggcagcagcgtggcgtaccgcgcctttttcgccttgccgcttttgcataacgacaaaggcatccatacgaacgccgtctacgggtttacgatgatgttgaataaaattttggcggaagaagagccaactcatatgcttgtcgcgtttgacgccgggaaaacgacgttccggcatgaagcgtttcaagagtataaaggtgggcgccagcagacgccaccggagctgtcggagcagtttccgctgttgcgcgagctgctgagggcgtatcgcatccccgcctatgaactcgagaactacgaagcggacgatattatcggaacgcttgccgcccgcgctgagcaggaagggtttgaggtgaaagtcatttccggcgaccgcgatctgacccagctcgcctccccccatgtgacggtggacattacgaaaaaagggattaccgatatcgaaccgtacacgccggaggcggtccgcgaaaaatacggcttaactccggaacaaatcgttgatttgaaaggattgatgggcgacaaatcggacaacattcccggagtgccgggcatcggggaaaagacggcggtcaagctgctcaagcaattcggcacggtcgaaaacgtgcttgcctccattgacgagatcaaaggcgaaaagttgaaagaaacgctgcgccaacaccgggagatggcgctgttaagcaaaaagctcgccgccattcgccgcgacgccccggtcgagctctcgcttgatgacatcgtctatcaaggggaagaccgggagaaagtggtcgctttatttaaagagcttgggtttcaatcgtttttagagaaaatggaatcgccgtcatcagaagaggaaaaaccgcttgccaagatggcatttacgcttgctgaccgcgtgacggaggagatgcttgccgacaaggcggcgcttgtcgttgaagtggtcgaggaaaattatcatgatgcgccgatcgtcggcatcgctgtggtcaacgaacatggacggtttttcctgcgcccggagacggcgcttgccgatccgcagtttgtcgcctggcttggtgatgaaacgaagaaaaaaagcatgtttgactcaaagcgcgcggcagtcgccttgaaatggaaaggaattgagctatgcggcgtttcctttgatttattgctggccgcctatttgcttgatccggcgcaaggtgttgatgatgtggctgccgcagcaaaaatgaagcaatacgaagcggtgcgctcggatgaagcggtgtatggcaaaggggcgaagcgggccgtgccggatgagccagtgctcgccgagcatctcgtccgcaaggcggcggcgatttgggcgctcgaacgtccgtttttggatgagctgcgccgcaacgaacaagatcggttgctcgtcgagctcgagcagccgttgtcttcgattttggcggaaatggaatttgccggagtgaaagtggatacgaagcggctcgaacagatgggcgaagagctcgccgagcagctgcgcacggtcgagcagcgcatttatgagctcgccggccaagaattcaacatcaattcaccgaaacagctcggcgtcattttatttgaaaaactgcagctgcccgtcttgaaaaaaacgaaaaccggctactccacttcggcggatgtgcttgaaaaacttgcgccttatcacgagatcgtggaaaacattttgcattaccgccagcttggcaagttgcagtcgacgtatattgaaggattgctgaaagtcgtgcgacccgatacaaagaaggtgcatacgattttcaatcaggcgttgacgcaaaccggacggctcagctcgacggagccgaacttgcaaaacattccgattcggcttgaggaaggacggaaaatccgccaagcgttcgtgccgtcggagtctgattggctcattttcgctgccgactactcgcaaattgagttgcgcgtcctcgcccatattgcggaagatgacaatttaatggaagcgttccgccgcgatttggatatccatacgaaaacagcgatggacattttccaagtgagcgaggacgaagtgacgcccaacatgcgccgtcaggcgaaggcggtcaactttgggatcgtttacgggatcagtgattacggcttggcgcaaaacttaaatatttcacgcaaagaggccgctgaattcatcgagcgctacttcgaaagcttccctggcgtgaagcggtatatggaaaacattgtgcaagaagcaaaacagaaagggtatgtgacgacgctgctgcatcggcgccgcaaattgccggatatcacgagccgcaacttcaacgtccgcagctttgctgaacggatggcgatgaacacgccgattcaagggagcgccgctgacattattaaaaaggcgatgatcgatctgaacgctagactgaaggaagagcggctgcaagcgcgccttttgctacaggtgcatgacgagctcattttggaggcgccgaaagaagagatggagcggctgtgccggctcgttccggaagtgatggagcaagcggtcacacttcgcgtgccgctcaaagtcgattaccattatggctcgacgtggtatgacgcgaaataaaaaggatcc

SEQ ID NO: 2299 - DNA, 2712 bp, Artificial Sequence
  Description of Artificial Sequence: Synthetic DNA sequence of Bacillus caldolyticus EA1 DNA polymerase Y796E
atgaaatacctgctgccgaccgctgctgctggtctgctgctcctcgctgcccagccggcgatggccatgggattgaaaaaaaagcttgttttaatcgacggcagcagcgtggcgtaccgcgcctttttcgccttgccgcttttgcataacgacaaaggcatccatacgaacgccgtctacgggtttacgatgatgttgaataaaattttggcggaagaagagccaactcatatgcttgtcgcgtttgacgccgggaaaacgacgttccggcatgaagcgtttcaagagtataaaggtgggcgccagcagacgccaccggagctgtcggagcagtttccgctgttgcgcgagctgctgagggcgtatcgcatccccgcctatgaactcgagaactacgaagcggacgatattatcggaacgcttgccgcccgcgctgagcaggaagggtttgaggtgaaagtcatttccggcgaccgcgatctgacccagctcgcctccccccatgtgacggtggacattacgaaaaaagggattaccgatatcgaaccgtacacgccggaggcggtccgcgaaaaatacggcttaactccggaacaaatcgttgatttgaaaggattgatgggcgacaaatcggacaacattcccggagtgccgggcatcggggaaaagacggcggtcaagctgctcaagcaattcggcacggtcgaaaacgtgcttgcctccattgacgagatcaaaggcgaaaagttgaaagaaacgctgcgccaacaccgggagatggcgctgttaagcaaaaagctcgccgccattcgccgcgacgccccggtcgagctctcgcttgatgacatcgtctatcaaggggaagaccgggagaaagtggtcgctttatttaaagagcttgggtttcaatcgtttttagagaaaatggaatcgccgtcatcagaagaggaaaaaccgcttgccaagatggcatttacgcttgctgaccgcgtgacggaggagatgcttgccgacaaggcggcgcttgtcgttgaagtggtcgaggaaaattatcatgatgcgccgatcgtcggcatcgctgtggtcaacgaacatggacggtttttcctgcgcccggagacggcgcttgccgatccgcagtttgtcgcctggcttggtgatgaaacgaagaaaaaaagcatgtttgactcaaagcgcgcggcagtcgccttgaaatggaaaggaattgagctatgcggcgtttcctttgatttattgctggccgcctatttgcttgatccggcgcaaggtgttgatgatgtggctgccgcagcaaaaatgaagcaatacgaagcggtgcgctcggatgaagcggtgtatggcaaaggggcgaagcgggccgtgccggatgagccagtgctcgccgagcatctcgtccgcaaggcggcggcgatttgggcgctcgaacgtccgtttttggatgagctgcgccgcaacgaacaagatcggttgctcgtcgagctcgagcagccgttgtcttcgattttggcggaaatggaatttgccggagtgaaagtggatacgaagcggctcgaacagatgggcgaagagctcgccgagcagctgcgcacggtcgagcagcgcatttatgagctcgccggccaagaattcaacatcaattcaccgaaacagctcggcgtcattttatttgaaaaactgcagctgcccgtcttgaaaaaaacgaaaaccggctactccacttcggcggatgtgcttgaaaaacttgcgccttatcacgagatcgtggaaaacattttgcattaccgccagcttggcaagttgcagtcgacgtatattgaaggattgctgaaagtcgtgcgacccgatacaaagaaggtgcatacgattttcaatcaggcgttgacgcaaaccggacggctcagctcgacggagccgaacttgcaaaacattccgattcggcttgaggaaggacggaaaatccgccaagcgttcgtgccgtcggagtctgattggctcattttcgctgccgactactcgcaaattgagttgcgcgtcctcgcccatattgcggaagatgacaatttaatggaagcgttccgccgcgatttggatatccatacgaaaacagcgatggacattttccaagtgagcgaggacgaagtgacgcccaacatgcgccgtcaggcgaaggcggtcaactttgggatcgtttacgggatcagtgattacggcttggcgcaaaacttaaatatttcacgcaaagaggccgctgaattcatcgagcgctacttcgaaagcttccctggcgtgaagcggtatatggaaaacattgtgcaagaagcaaaacagaaagggtatgtgacgacgctgctgcatcggcgccgcgaattgccggatatcacgagccgcaacttcaacgtccgcagctttgctgaacggatggcgatgaacacgccgattcaagggagcgccgctgacattattaaaaaggcgatgatcgatctgaacgctagactgaaggaagagcggctgcaagcgcgccttttgctacaggtgcatgacgagctcattttggaggcgccgaaagaagagatggagcggctgtgccggctcgttccggaagtgatggagcaagcggtcacacttcgcgtgccgctcaaagtcgattaccattatggctcgacgtggtatgacgcgaaataaaaaggatcc

SEQ ID NO: 2300 - DNA, 2712 bp, Artificial Sequence
  Description of Artificial Sequence: Synthetic DNA sequence of Bacillus caldolyticus EA1 DNA polymerase Y796D
atgaaatacctgctgccgaccgctgctgctggtctgctgctcctcgctgcccagccggcgatggccatgggattgaaaaaaaagcttgttttaatcgacggcagcagcgtggcgtaccgcgcctttttcgccttgccgcttttgcataacgacaaaggcatccatacgaacgccgtctacgggtttacgatgatgttgaataaaattttggcggaagaagagccaactcatatgcttgtcgcgtttgacgccgggaaaacgacgttccggcatgaagcgtttcaagagtataaaggtgggcgccagcagacgccaccggagctgtcggagcagtttccgctgttgcgcgagctgctgagggcgtatcgcatccccgcctatgaactcgagaactacgaagcggacgatattatcggaacgcttgccgcccgcgctgagcaggaagggtttgaggtgaaagtcatttccggcgaccgcgatctgacccagctcgcctccccccatgtgacggtggacattacgaaaaaagggattaccgatatcgaaccgtacacgccggaggcggtccgcgaaaaatacggcttaactccggaacaaatcgttgatttgaaaggattgatgggcgacaaatcggacaacattcccggagtgccgggcatcggggaaaagacggcggtcaagctgctcaagcaattcggcacggtcgaaaacgtgcttgcctccattgacgagatcaaaggcgaaaagttgaaagaaacgctgcgccaacaccgggagatggcgctgttaagcaaaaagctcgccgccattcgccgcgacgccccggtcgagctctcgcttgatgacatcgtctatcaaggggaagaccgggagaaagtggtcgctttatttaaagagcttgggtttcaatcgtttttagagaaaatggaatcgccgtcatcagaagaggaaaaaccgcttgccaagatggcatttacgcttgctgaccgcgtgacggaggagatgcttgccgacaaggcggcgcttgtcgttgaagtggtcgaggaaaattatcatgatgcgccgatcgtcggcatcgctgtggtcaacgaacatggacggtttttcctgcgcccggagacggcgcttgccgatccgcagtttgtcgcctggcttggtgatgaaacgaagaaaaaaagcatgtttgactcaaagcgcgcggcagtcgccttgaaatggaaaggaattgagctatgcggcgtttcctttgatttattgctggccgcctatttgcttgatccggcgcaaggtgttgatgatgtggctgccgcagcaaaaatgaagcaatacgaagcggtgcgctcggatgaagcggtgtatggcaaaggggcgaagcgggccgtgccggatgagccagtgctcgccgagcatctcgtccgcaaggcggcggcgatttgggcgctcgaacgtccgtttttggatgagctgcgccgcaacgaacaagatcggttgctcgtcgagctcgagcagccgttgtcttcgattttggcggaaatggaatttgccggagtgaaagtggatacgaagcggctcgaacagatgggcgaagagctcgccgagcagctgcgcacggtcgagcagcgcatttatgagctcgccggccaagaattcaacatcaattcaccgaaacagctcggcgtcattttatttgaaaaactgcagctgcccgtcttgaaaaaaacgaaaaccggctactccacttcggcggatgtgcttgaaaaacttgcgccttatcacgagatcgtggaaaacattttgcattaccgccagcttggcaagttgcagtcgacgtatattgaaggattgctgaaagtcgtgcgacccgatacaaagaaggtgcatacgattttcaatcaggcgttgacgcaaaccggacggctcagctcgacggagccgaacttgcaaaacattccgattcggcttgaggaaggacggaaaatccgccaagcgttcgtgccgtcggagtctgattggctcattttcgctgccgactactcgcaaattgagttgcgcgtcctcgcccatattgcggaagatgacaatttaatggaagcgttccgccgcgatttggatatccatacgaaaacagcgatggacattttccaagtgagcgaggacgaagtgacgcccaacatgcgccgtcaggcgaaggcggtcaactttgggatcgtttacgggatcagtgattacggcttggcgcaaaacttaaatatttcacgcaaagaggccgctgaattcatcgagcgctacttcgaaagcttccctggcgtgaagcggtatatggaaaacattgtgcaagaagcaaaacagaaagggtatgtgacgacgctgctgcatcggcgccgcgatttgccggatatcacgagccgcaacttcaacgtccgcagctttgctgaacggatggcgatgaacacgccgattcaagggagcgccgctgacattattaaaaaggcgatgatcgatctgaacgctagactgaaggaagagcggctgcaagcgcgccttttgctacaggtgcatgacgagctcattttggaggcgccgaaagaagagatggagcggctgtgccggctcgttccggaagtgatggagcaagcggtcacacttcgcgtgccgctcaaagtcgattaccattatggctcgacgtggtatgacgcgaaataaaaaggatcc

SEQ ID NO: 2301 - DNA, 2712 bp, Artificial Sequence
  Description of Artificial Sequence: Synthetic DNA sequence of Bacillus caldolyticus EA1 DNA polymerase Y796F
atgaaatacctgctgccgaccgctgctgctggtctgctgctcctcgctgcccagccggcgatggccatgggattgaaaaaaaagcttgttttaatcgacggcagcagcgtggcgtaccgcgcctttttcgccttgccgcttttgcataacgacaaaggcatccatacgaacgccgtctacgggtttacgatgatgttgaataaaattttggcggaagaagagccaactcatatgcttgtcgcgtttgacgccgggaaaacgacgttccggcatgaagcgtttcaagagtataaaggtgggcgccagcagacgccaccggagctgtcggagcagtttccgctgttgcgcgagctgctgagggcgtatcgcatccccgcctatgaactcgagaactacgaagcggacgatattatcggaacgcttgccgcccgcgctgagcaggaagggtttgaggtgaaagtcatttccggcgaccgcgatctgacccagctcgcctccccccatgtgacggtggacattacgaaaaaagggattaccgatatcgaaccgtacacgccggaggcggtccgcgaaaaatacggcttaactccggaacaaatcgttgatttgaaaggattgatgggcgacaaatcggacaacattcccggagtgccgggcatcggggaaaagacggcggtcaagctgctcaagcaattcggcacggtcgaaaacgtgcttgcctccattgacgagatcaaaggcgaaaagttgaaagaaacgctgcgccaacaccgggagatggcgctgttaagcaaaaagctcgccgccattcgccgcgacgccccggtcgagctctcgcttgatgacatcgtctatcaaggggaagaccgggagaaagtggtcgctttatttaaagagcttgggtttcaatcgtttttagagaaaatggaatcgccgtcatcagaagaggaaaaaccgcttgccaagatggcatttacgcttgctgaccgcgtgacggaggagatgcttgccgacaaggcggcgcttgtcgttgaagtggtcgaggaaaattatcatgatgcgccgatcgtcggcatcgctgtggtcaacgaacatggacggtttttcctgcgcccggagacggcgcttgccgatccgcagtttgtcgcctggcttggtgatgaaacgaagaaaaaaagcatgtttgactcaaagcgcgcggcagtcgccttgaaatggaaaggaattgagctatgcggcgtttcctttgatttattgctggccgcctatttgcttgatccggcgcaaggtgttgatgatgtggctgccgcagcaaaaatgaagcaatacgaagcggtgcgctcggatgaagcggtgtatggcaaaggggcgaagcgggccgtgccggatgagccagtgctcgccgagcatctcgtccgcaaggcggcggcgatttgggcgctcgaacgtccgtttttggatgagctgcgccgcaacgaacaagatcggttgctcgtcgagctcgagcagccgttgtcttcgattttggcggaaatggaatttgccggagtgaaagtggatacgaagcggctcgaacagatgggcgaagagctcgccgagcagctgcgcacggtcgagcagcgcatttatgagctcgccggccaagaattcaacatcaattcaccgaaacagctcggcgtcattttatttgaaaaactgcagctgcccgtcttgaaaaaaacgaaaaccggctactccacttcggcggatgtgcttgaaaaacttgcgccttatcacgagatcgtggaaaacattttgcattaccgccagcttggcaagttgcagtcgacgtatattgaaggattgctgaaagtcgtgcgacccgatacaaagaaggtgcatacgattttcaatcaggcgttgacgcaaaccggacggctcagctcgacggagccgaacttgcaaaacattccgattcggcttgaggaaggacggaaaatccgccaagcgttcgtgccgtcggagtctgattggctcattttcgctgccgactactcgcaaattgagttgcgcgtcctcgcccatattgcggaagatgacaatttaatggaagcgttccgccgcgatttggatatccatacgaaaacagcgatggacattttccaagtgagcgaggacgaagtgacgcccaacatgcgccgtcaggcgaaggcggtcaactttgggatcgtttacgggatcagtgattacggcttggcgcaaaacttaaatatttcacgcaaagaggccgctgaattcatcgagcgctacttcgaaagcttccctggcgtgaagcggtatatggaaaacattgtgcaagaagcaaaacagaaagggtatgtgacgacgctgctgcatcggcgccgctttttgccggatatcacgagccgcaacttcaacgtccgcagctttgctgaacggatggcgatgaacacgccgattcaagggagcgccgctgacattattaaaaaggcgatgatcgatctgaacgctagactgaaggaagagcggctgcaagcgcgccttttgctacaggtgcatgacgagctcattttggaggcgccgaaagaagagatggagcggctgtgccggctcgttccggaagtgatggagcaagcggtcacacttcgcgtgccgctcaaagtcgattaccattatggctcgacgtggtatgacgcgaaataaaaaggatcc

SEQ ID NO: 2302 - DNA, 2712 bp, Artificial Sequence
  Description of Artificial Sequence: Synthetic DNA sequence of Bacillus caldolyticus EA1 DNA polymerase Y796S
atgaaatacctgctgccgaccgctgctgctggtctgctgctcctcgctgcccagccggcgatggccatgggattgaaaaaaaagcttgttttaatcgacggcagcagcgtggcgtaccgcgcctttttcgccttgccgcttttgcataacgacaaaggcatccatacgaacgccgtctacgggtttacgatgatgttgaataaaattttggcggaagaagagccaactcatatgcttgtcgcgtttgacgccgggaaaacgacgttccggcatgaagcgtttcaagagtataaaggtgggcgccagcagacgccaccggagctgtcggagcagtttccgctgttgcgcgagctgctgagggcgtatcgcatccccgcctatgaactcgagaactacgaagcggacgatattatcggaacgcttgccgcccgcgctgagcaggaagggtttgaggtgaaagtcatttccggcgaccgcgatctgacccagctcgcctccccccatgtgacggtggacattacgaaaaaagggattaccgatatcgaaccgtacacgccggaggcggtccgcgaaaaatacggcttaactccggaacaaatcgttgatttgaaaggattgatgggcgacaaatcggacaacattcccggagtgccgggcatcggggaaaagacggcggtcaagctgctcaagcaattcggcacggtcgaaaacgtgcttgcctccattgacgagatcaaaggcgaaaagttgaaagaaacgctgcgccaacaccgggagatggcgctgttaagcaaaaagctcgccgccattcgccgcgacgccccggtcgagctctcgcttgatgacatcgtctatcaaggggaagaccgggagaaagtggtcgctttatttaaagagcttgggtttcaatcgtttttagagaaaatggaatcgccgtcatcagaagaggaaaaaccgcttgccaagatggcatttacgcttgctgaccgcgtgacggaggagatgcttgccgacaaggcggcgcttgtcgttgaagtggtcgaggaaaattatcatgatgcgccgatcgtcggcatcgctgtggtcaacgaacatggacggtttttcctgcgcccggagacggcgcttgccgatccgcagtttgtcgcctggcttggtgatgaaacgaagaaaaaaagcatgtttgactcaaagcgcgcggcagtcgccttgaaatggaaaggaattgagctatgcggcgtttcctttgatttattgctggccgcctatttgcttgatccggcgcaaggtgttgatgatgtggctgccgcagcaaaaatgaagcaatacgaagcggtgcgctcggatgaagcggtgtatggcaaaggggcgaagcgggccgtgccggatgagccagtgctcgccgagcatctcgtccgcaaggcggcggcgatttgggcgctcgaacgtccgtttttggatgagctgcgccgcaacgaacaagatcggttgctcgtcgagctcgagcagccgttgtcttcgattttggcggaaatggaatttgccggagtgaaagtggatacgaagcggctcgaacagatgggcgaagagctcgccgagcagctgcgcacggtcgagcagcgcatttatgagctcgccggccaagaattcaacatcaattcaccgaaacagctcggcgtcattttatttgaaaaactgcagctgcccgtcttgaaaaaaacgaaaaccggctactccacttcggcggatgtgcttgaaaaacttgcgccttatcacgagatcgtggaaaacattttgcattaccgccagcttggcaagttgcagtcgacgtatattgaaggattgctgaaagtcgtgcgacccgatacaaagaaggtgcatacgattttcaatcaggcgttgacgcaaaccggacggctcagctcgacggagccgaacttgcaaaacattccgattcggcttgaggaaggacggaaaatccgccaagcgttcgtgccgtcggagtctgattggctcattttcgctgccgactactcgcaaattgagttgcgcgtcctcgcccatattgcggaagatgacaatttaatggaagcgttccgccgcgatttggatatccatacgaaaacagcgatggacattttccaagtgagcgaggacgaagtgacgcccaacatgcgccgtcaggcgaaggcggtcaactttgggatcgtttacgggatcagtgattacggcttggcgcaaaacttaaatatttcacgcaaagaggccgctgaattcatcgagcgctacttcgaaagcttccctggcgtgaagcggtatatggaaaacattgtgcaagaagcaaaacagaaagggtatgtgacgacgctgctgcatcggcgccgctctttgccggatatcacgagccgcaacttcaacgtccgcagctttgctgaacggatggcgatgaacacgccgattcaagggagcgccgctgacattattaaaaaggcgatgatcgatctgaacgctagactgaaggaagagcggctgcaagcgcgccttttgctacaggtgcatgacgagctcattttggaggcgccgaaagaagagatggagcggctgtgccggctcgttccggaagtgatggagcaagcggtcacacttcgcgtgccgctcaaagtcgattaccattatggctcgacgtggtatgacgcgaaataaaaaggatcc

SEQ ID NO: 2303 - DNA, 2712 bp, Artificial Sequence
  Description of Artificial Sequence: Synthetic DNA sequence of Bacillus caldolyticus EA1 DNA polymerase Y796W
atgaaatacctgctgccgaccgctgctgctggtctgctgctcctcgctgcccagccggcgatggccatgggattgaaaaaaaagcttgttttaatcgacggcagcagcgtggcgtaccgcgcctttttcgccttgccgcttttgcataacgacaaaggcatccatacgaacgccgtctacgggtttacgatgatgttgaataaaattttggcggaagaagagccaactcatatgcttgtcgcgtttgacgccgggaaaacgacgttccggcatgaagcgtttcaagagtataaaggtgggcgccagcagacgccaccggagctgtcggagcagtttccgctgttgcgcgagctgctgagggcgtatcgcatccccgcctatgaactcgagaactacgaagcggacgatattatcggaacgcttgccgcccgcgctgagcaggaagggtttgaggtgaaagtcatttccggcgaccgcgatctgacccagctcgcctccccccatgtgacggtggacattacgaaaaaagggattaccgatatcgaaccgtacacgccggaggcggtccgcgaaaaatacggcttaactccggaacaaatcgttgatttgaaaggattgatgggcgacaaatcggacaacattcccggagtgccgggcatcggggaaaagacggcggtcaagctgctcaagcaattcggcacggtcgaaaacgtgcttgcctccattgacgagatcaaaggcgaaaagttgaaagaaacgctgcgccaacaccgggagatggcgctgttaagcaaaaagctcgccgccattcgccgcgacgccccggtcgagctctcgcttgatgacatcgtctatcaaggggaagaccgggagaaagtggtcgctttatttaaagagcttgggtttcaatcgtttttagagaaaatggaatcgccgtcatcagaagaggaaaaaccgcttgccaagatggcatttacgcttgctgaccgcgtgacggaggagatgcttgccgacaaggcggcgcttgtcgttgaagtggtcgaggaaaattatcatgatgcgccgatcgtcggcatcgctgtggtcaacgaacatggacggtttttcctgcgcccggagacggcgcttgccgatccgcagtttgtcgcctggcttggtgatgaaacgaagaaaaaaagcatgtttgactcaaagcgcgcggcagtcgccttgaaatggaaaggaattgagctatgcggcgtttcctttgatttattgctggccgcctatttgcttgatccggcgcaaggtgttgatgatgtggctgccgcagcaaaaatgaagcaatacgaagcggtgcgctcggatgaagcggtgtatggcaaaggggcgaagcgggccgtgccggatgagccagtgctcgccgagcatctcgtccgcaaggcggcggcgatttgggcgctcgaacgtccgtttttggatgagctgcgccgcaacgaacaagatcggttgctcgtcgagctcgagcagccgttgtcttcgattttggcggaaatggaatttgccggagtgaaagtggatacgaagcggctcgaacagatgggcgaagagctcgccgagcagctgcgcacggtcgagcagcgcatttatgagctcgccggccaagaattcaacatcaattcaccgaaacagctcggcgtcattttatttgaaaaactgcagctgcccgtcttgaaaaaaacgaaaaccggctactccacttcggcggatgtgcttgaaaaacttgcgccttatcacgagatcgtggaaaacattttgcattaccgccagcttggcaagttgcagtcgacgtatattgaaggattgctgaaagtcgtgcgacccgatacaaagaaggtgcatacgattttcaatcaggcgttgacgcaaaccggacggctcagctcgacggagccgaacttgcaaaacattccgattcggcttgaggaaggacggaaaatccgccaagcgttcgtgccgtcggagtctgattggctcattttcgctgccgactactcgcaaattgagttgcgcgtcctcgcccatattgcggaagatgacaatttaatggaagcgttccgccgcgatttggatatccatacgaaaacagcgatggacattttccaagtgagcgaggacgaagtgacgcccaacatgcgccgtcaggcgaaggcggtcaactttgggatcgtttacgggatcagtgattacggcttggcgcaaaacttaaatatttcacgcaaagaggccgctgaattcatcgagcgctacttcgaaagcttccctggcgtgaagcggtatatggaaaacattgtgcaagaagcaaaacagaaagggtatgtgacgacgctgctgcatcggcgccgctggttgccggatatcacgagccgcaacttcaacgtccgcagctttgctgaacggatggcgatgaacacgccgattcaagggagcgccgctgacattattaaaaaggcgatgatcgatctgaacgctagactgaaggaagagcggctgcaagcgcgccttttgctacaggtgcatgacgagctcattttggaggcgccgaaagaagagatggagcggctgtgccggctcgttccggaagtgatggagcaagcggtcacacttcgcgtgccgctcaaagtcgattaccattatggctcgacgtggtatgacgcgaaataaaaaggatcc

SEQ ID NO: 2304 - DNA, 2712 bp, Artificial Sequence
  Description of Artificial Sequence: Synthetic DNA sequence of Bacillus caldolyticus EA1 DNA polymerase Y796P
atgaaatacctgctgccgaccgctgctgctggtctgctgctcctcgctgcccagccggcgatggccatgggattgaaaaaaaagcttgttttaatcgacggcagcagcgtggcgtaccgcgcctttttcgccttgccgcttttgcataacgacaaaggcatccatacgaacgccgtctacgggtttacgatgatgttgaataaaattttggcggaagaagagccaactcatatgcttgtcgcgtttgacgccgggaaaacgacgttccggcatgaagcgtttcaagagtataaaggtgggcgccagcagacgccaccggagctgtcggagcagtttccgctgttgcgcgagctgctgagggcgtatcgcatccccgcctatgaactcgagaactacgaagcggacgatattatcggaacgcttgccgcccgcgctgagcaggaagggtttgaggtgaaagtcatttccggcgaccgcgatctgacccagctcgcctccccccatgtgacggtggacattacgaaaaaagggattaccgatatcgaaccgtacacgccggaggcggtccgcgaaaaatacggcttaactccggaacaaatcgttgatttgaaaggattgatgggcgacaaatcggacaacattcccggagtgccgggcatcggggaaaagacggcggtcaagctgctcaagcaattcggcacggtcgaaaacgtgcttgcctccattgacgagatcaaaggcgaaaagttgaaagaaacgctgcgccaacaccgggagatggcgctgttaagcaaaaagctcgccgccattcgccgcgacgccccggtcgagctctcgcttgatgacatcgtctatcaaggggaagaccgggagaaagtggtcgctttatttaaagagcttgggtttcaatcgtttttagagaaaatggaatcgccgtcatcagaagaggaaaaaccgcttgccaagatggcatttacgcttgctgaccgcgtgacggaggagatgcttgccgacaaggcggcgcttgtcgttgaagtggtcgaggaaaattatcatgatgcgccgatcgtcggcatcgctgtggtcaacgaacatggacggtttttcctgcgcccggagacggcgcttgccgatccgcagtttgtcgcctggcttggtgatgaaacgaagaaaaaaagcatgtttgactcaaagcgcgcggcagtcgccttgaaatggaaaggaattgagctatgcggcgtttcctttgatttattgctggccgcctatttgcttgatccggcgcaaggtgttgatgatgtggctgccgcagcaaaaatgaagcaatacgaagcggtgcgctcggatgaagcggtgtatggcaaaggggcgaagcgggccgtgccggatgagccagtgctcgccgagcatctcgtccgcaaggcggcggcgatttgggcgctcgaacgtccgtttttggatgagctgcgccgcaacgaacaagatcggttgctcgtcgagctcgagcagccgttgtcttcgattttggcggaaatggaatttgccggagtgaaagtggatacgaagcggctcgaacagatgggcgaagagctcgccgagcagctgcgcacggtcgagcagcgcatttatgagctcgccggccaagaattcaacatcaattcaccgaaacagctcggcgtcattttatttgaaaaactgcagctgcccgtcttgaaaaaaacgaaaaccggctactccacttcggcggatgtgcttgaaaaacttgcgccttatcacgagatcgtggaaaacattttgcattaccgccagcttggcaagttgcagtcgacgtatattgaaggattgctgaaagtcgtgcgacccgatacaaagaaggtgcatacgattttcaatcaggcgttgacgcaaaccggacggctcagctcgacggagccgaacttgcaaaacattccgattcggcttgaggaaggacggaaaatccgccaagcgttcgtgccgtcggagtctgattggctcattttcgctgccgactactcgcaaattgagttgcgcgtcctcgcccatattgcggaagatgacaatttaatggaagcgttccgccgcgatttggatatccatacgaaaacagcgatggacattttccaagtgagcgaggacgaagtgacgcccaacatgcgccgtcaggcgaaggcggtcaactttgggatcgtttacgggatcagtgattacggcttggcgcaaaacttaaatatttcacgcaaagaggccgctgaattcatcgagcgctacttcgaaagcttccctggcgtgaagcggtatatggaaaacattgtgcaagaagcaaaacagaaagggtatgtgacgacgctgctgcatcggcgccgccctttgccggatatcacgagccgcaacttcaacgtccgcagctttgctgaacggatggcgatgaacacgccgattcaagggagcgccgctgacattattaaaaaggcgatgatcgatctgaacgctagactgaaggaagagcggctgcaagcgcgccttttgctacaggtgcatgacgagctcattttggaggcgccgaaagaagagatggagcggctgtgccggctcgttccggaagtgatggagcaagcggtcacacttcgcgtgccgctcaaagtcgattaccattatggctcgacgtggtatgacgcgaaataaaaaggatcc

SEQ ID NO: 2305 - DNA, 2712 bp, Artificial Sequence
  Description of Artificial Sequence: Synthetic DNA sequence of Bacillus caldolyticus EA1 DNA polymerase Y796M
atgaaatacctgctgccgaccgctgctgctggtctgctgctcctcgctgcccagccggcgatggccatgggattgaaaaaaaagcttgttttaatcgacggcagcagcgtggcgtaccgcgcctttttcgccttgccgcttttgcataacgacaaaggcatccatacgaacgccgtctacgggtttacgatgatgttgaataaaattttggcggaagaagagccaactcatatgcttgtcgcgtttgacgccgggaaaacgacgttccggcatgaagcgtttcaagagtataaaggtgggcgccagcagacgccaccggagctgtcggagcagtttccgctgttgcgcgagctgctgagggcgtatcgcatccccgcctatgaactcgagaactacgaagcggacgatattatcggaacgcttgccgcccgcgctgagcaggaagggtttgaggtgaaagtcatttccggcgaccgcgatctgacccagctcgcctccccccatgtgacggtggacattacgaaaaaagggattaccgatatcgaaccgtacacgccggaggcggtccgcgaaaaatacggcttaactccggaacaaatcgttgatttgaaaggattgatgggcgacaaatcggacaacattcccggagtgccgggcatcggggaaaagacggcggtcaagctgctcaagcaattcggcacggtcgaaaacgtgcttgcctccattgacgagatcaaaggcgaaaagttgaaagaaacgctgcgccaacaccgggagatggcgctgttaagcaaaaagctcgccgccattcgccgcgacgccccggtcgagctctcgcttgatgacatcgtctatcaaggggaagaccgggagaaagtggtcgctttatttaaagagcttgggtttcaatcgtttttagagaaaatggaatcgccgtcatcagaagaggaaaaaccgcttgccaagatggcatttacgcttgctgaccgcgtgacggaggagatgcttgccgacaaggcggcgcttgtcgttgaagtggtcgaggaaaattatcatgatgcgccgatcgtcggcatcgctgtggtcaacgaacatggacggtttttcctgcgcccggagacggcgcttgccgatccgcagtttgtcgcctggcttggtgatgaaacgaagaaaaaaagcatgtttgactcaaagcgcgcggcagtcgccttgaaatggaaaggaattgagctatgcggcgtttcctttgatttattgctggccgcctatttgcttgatccggcgcaaggtgttgatgatgtggctgccgcagcaaaaatgaagcaatacgaagcggtgcgctcggatgaagcggtgtatggcaaaggggcgaagcgggccgtgccggatgagccagtgctcgccgagcatctcgtccgcaaggcggcggcgatttgggcgctcgaacgtccgtttttggatgagctgcgccgcaacgaacaagatcggttgctcgtcgagctcgagcagccgttgtcttcgattttggcggaaatggaatttgccggagtgaaagtggatacgaagcggctcgaacagatgggcgaagagctcgccgagcagctgcgcacggtcgagcagcgcatttatgagctcgccggccaagaattcaacatcaattcaccgaaacagctcggcgtcattttatttgaaaaactgcagctgcccgtcttgaaaaaaacgaaaaccggctactccacttcggcggatgtgcttgaaaaacttgcgccttatcacgagatcgtggaaaacattttgcattaccgccagcttggcaagttgcagtcgacgtatattgaaggattgctgaaagtcgtgcgacccgatacaaagaaggtgcatacgattttcaatcaggcgttgacgcaaaccggacggctcagctcgacggagccgaacttgcaaaacattccgattcggcttgaggaaggacggaaaatccgccaagcgttcgtgccgtcggagtctgattggctcattttcgctgccgactactcgcaaattgagttgcgcgtcctcgcccatattgcggaagatgacaatttaatggaagcgttccgccgcgatttggatatccatacgaaaacagcgatggacattttccaagtgagcgaggacgaagtgacgcccaacatgcgccgtcaggcgaaggcggtcaactttgggatcgtttacgggatcagtgattacggcttggcgcaaaacttaaatatttcacgcaaagaggccgctgaattcatcgagcgctacttcgaaagcttccctggcgtgaagcggtatatggaaaacattgtgcaagaagcaaaacagaaagggtatgtgacgacgctgctgcatcggcgccgcatgttgccggatatcacgagccgcaacttcaacgtccgcagctttgctgaacggatggcgatgaacacgccgattcaagggagcgccgctgacattattaaaaaggcgatgatcgatctgaacgctagactgaaggaagagcggctgcaagcgcgccttttgctacaggtgcatgacgagctcattttggaggcgccgaaagaagagatggagcggctgtgccggctcgttccggaagtgatggagcaagcggtcacacttcgcgtgccgctcaaagtcgattaccattatggctcgacgtggtatgacgcgaaataaaaaggatcc

SEQ ID NO: 2306 - DNA, 2712 bp, Artificial Sequence
  Description of Artificial Sequence: Synthetic DNA sequence of Bacillus caldolyticus EA1 DNA polymerase Y796T
atgaaatacctgctgccgaccgctgctgctggtctgctgctcctcgctgcccagccggcgatggccatgggattgaaaaaaaagcttgttttaatcgacggcagcagcgtggcgtaccgcgcctttttcgccttgccgcttttgcataacgacaaaggcatccatacgaacgccgtctacgggtttacgatgatgttgaataaaattttggcggaagaagagccaactcatatgcttgtcgcgtttgacgccgggaaaacgacgttccggcatgaagcgtttcaagagtataaaggtgggcgccagcagacgccaccggagctgtcggagcagtttccgctgttgcgcgagctgctgagggcgtatcgcatccccgcctatgaactcgagaactacgaagcggacgatattatcggaacgcttgccgcccgcgctgagcaggaagggtttgaggtgaaagtcatttccggcgaccgcgatctgacccagctcgcctccccccatgtgacggtggacattacgaaaaaagggattaccgatatcgaaccgtacacgccggaggcggtccgcgaaaaatacggcttaactccggaacaaatcgttgatttgaaaggattgatgggcgacaaatcggacaacattcccggagtgccgggcatcggggaaaagacggcggtcaagctgctcaagcaattcggcacggtcgaaaacgtgcttgcctccattgacgagatcaaaggcgaaaagttgaaagaaacgctgcgccaacaccgggagatggcgctgttaagcaaaaagctcgccgccattcgccgcgacgccccggtcgagctctcgcttgatgacatcgtctatcaaggggaagaccgggagaaagtggtcgctttatttaaagagcttgggtttcaatcgtttttagagaaaatggaatcgccgtcatcagaagaggaaaaaccgcttgccaagatggcatttacgcttgctgaccgcgtgacggaggagatgcttgccgacaaggcggcgcttgtcgttgaagtggtcgaggaaaattatcatgatgcgccgatcgtcggcatcgctgtggtcaacgaacatggacggtttttcctgcgcccggagacggcgcttgccgatccgcagtttgtcgcctggcttggtgatgaaacgaagaaaaaaagcatgtttgactcaaagcgcgcggcagtcgccttgaaatggaaaggaattgagctatgcggcgtttcctttgatttattgctggccgcctatttgcttgatccggcgcaaggtgttgatgatgtggctgccgcagcaaaaatgaagcaatacgaagcggtgcgctcggatgaagcggtgtatggcaaaggggcgaagcgggccgtgccggatgagccagtgctcgccgagcatctcgtccgcaaggcggcggcgatttgggcgctcgaacgtccgtttttggatgagctgcgccgcaacgaacaagatcggttgctcgtcgagctcgagcagccgttgtcttcgattttggcggaaatggaatttgccggagtgaaagtggatacgaagcggctcgaacagatgggcgaagagctcgccgagcagctgcgcacggtcgagcagcgcatttatgagctcgccggccaagaattcaacatcaattcaccgaaacagctcggcgtcattttatttgaaaaactgcagctgcccgtcttgaaaaaaacgaaaaccggctactccacttcggcggatgtgcttgaaaaacttgcgccttatcacgagatcgtggaaaacattttgcattaccgccagcttggcaagttgcagtcgacgtatattgaaggattgctgaaagtcgtgcgacccgatacaaagaaggtgcatacgattttcaatcaggcgttgacgcaaaccggacggctcagctcgacggagccgaacttgcaaaacattccgattcggcttgaggaaggacggaaaatccgccaagcgttcgtgccgtcggagtctgattggctcattttcgctgccgactactcgcaaattgagttgcgcgtcctcgcccatattgcggaagatgacaatttaatggaagcgttccgccgcgatttggatatccatacgaaaacagcgatggacattttccaagtgagcgaggacgaagtgacgcccaacatgcgccgtcaggcgaaggcggtcaactttgggatcgtttacgggatcagtgattacggcttggcgcaaaacttaaatatttcacgcaaagaggccgctgaattcatcgagcgctacttcgaaagcttccctggcgtgaagcggtatatggaaaacattgtgcaagaagcaaaacagaaagggtatgtgacgacgctgctgcatcggcgccgcactttgccggatatcacgagccgcaacttcaacgtccgcagctttgctgaacggatggcgatgaacacgccgattcaagggagcgccgctgacattattaaaaaggcgatgatcgatctgaacgctagactgaaggaagagcggctgcaagcgcgccttttgctacaggtgcatgacgagctcattttggaggcgccgaaagaagagatggagcggctgtgccggctcgttccggaagtgatggagcaagcggtcacacttcgcgtgccgctcaaagtcgattaccattatggctcgacgtggtatgacgcgaaataaaaaggatcc

SEQ ID NO: 2307 - DNA, 2712 bp, Artificial Sequence
  Description of Artificial Sequence: Synthetic DNA sequence of Bacillus caldolyticus EA1 DNA polymerase Y796N
atgaaatacctgctgccgaccgctgctgctggtctgctgctcctcgctgcccagccggcgatggccatgggattgaaaaaaaagcttgttttaatcgacggcagcagcgtggcgtaccgcgcctttttcgccttgccgcttttgcataacgacaaaggcatccatacgaacgccgtctacgggtttacgatgatgttgaataaaattttggcggaagaagagccaactcatatgcttgtcgcgtttgacgccgggaaaacgacgttccggcatgaagcgtttcaagagtataaaggtgggcgccagcagacgccaccggagctgtcggagcagtttccgctgttgcgcgagctgctgagggcgtatcgcatccccgcctatgaactcgagaactacgaagcggacgatattatcggaacgcttgccgcccgcgctgagcaggaagggtttgaggtgaaagtcatttccggcgaccgcgatctgacccagctcgcctccccccatgtgacggtggacattacgaaaaaagggattaccgatatcgaaccgtacacgccggaggcggtccgcgaaaaatacggcttaactccggaacaaatcgttgatttgaaaggattgatgggcgacaaatcggacaacattcccggagtgccgggcatcggggaaaagacggcggtcaagctgctcaagcaattcggcacggtcgaaaacgtgcttgcctccattgacgagatcaaaggcgaaaagttgaaagaaacgctgcgccaacaccgggagatggcgctgttaagcaaaaagctcgccgccattcgccgcgacgccccggtcgagctctcgcttgatgacatcgtctatcaaggggaagaccgggagaaagtggtcgctttatttaaagagcttgggtttcaatcgtttttagagaaaatggaatcgccgtcatcagaagaggaaaaaccgcttgccaagatggcatttacgcttgctgaccgcgtgacggaggagatgcttgccgacaaggcggcgcttgtcgttgaagtggtcgaggaaaattatcatgatgcgccgatcgtcggcatcgctgtggtcaacgaacatggacggtttttcctgcgcccggagacggcgcttgccgatccgcagtttgtcgcctggcttggtgatgaaacgaagaaaaaaagcatgtttgactcaaagcgcgcggcagtcgccttgaaatggaaaggaattgagctatgcggcgtttcctttgatttattgctggccgcctatttgcttgatccggcgcaaggtgttgatgatgtggctgccgcagcaaaaatgaagcaatacgaagcggtgcgctcggatgaagcggtgtatggcaaaggggcgaagcgggccgtgccggatgagccagtgctcgccgagcatctcgtccgcaaggcggcggcgatttgggcgctcgaacgtccgtttttggatgagctgcgccgcaacgaacaagatcggttgctcgtcgagctcgagcagccgttgtcttcgattttggcggaaatggaatttgccggagtgaaagtggatacgaagcggctcgaacagatgggcgaagagctcgccgagcagctgcgcacggtcgagcagcgcatttatgagctcgccggccaagaattcaacatcaattcaccgaaacagctcggcgtcattttatttgaaaaactgcagctgcccgtcttgaaaaaaacgaaaaccggctactccacttcggcggatgtgcttgaaaaacttgcgccttatcacgagatcgtggaaaacattttgcattaccgccagcttggcaagttgcagtcgacgtatattgaaggattgctgaaagtcgtgcgacccgatacaaagaaggtgcatacgattttcaatcaggcgttgacgcaaaccggacggctcagctcgacggagccgaacttgcaaaacattccgattcggcttgaggaaggacggaaaatccgccaagcgttcgtgccgtcggagtctgattggctcattttcgctgccgactactcgcaaattgagttgcgcgtcctcgcccatattgcggaagatgacaatttaatggaagcgttccgccgcgatttggatatccatacgaaaacagcgatggacattttccaagtgagcgaggacgaagtgacgcccaacatgcgccgtcaggcgaaggcggtcaactttgggatcgtttacgggatcagtgattacggcttggcgcaaaacttaaatatttcacgcaaagaggccgctgaattcatcgagcgctacttcgaaagcttccctggcgtgaagcggtatatggaaaacattgtgcaagaagcaaaacagaaagggtatgtgacgacgctgctgcatcggcgccgcaatttgccggatatcacgagccgcaacttcaacgtccgcagctttgctgaacggatggcgatgaacacgccgattcaagggagcgccgctgacattattaaaaaggcgatgatcgatctgaacgctagactgaaggaagagcggctgcaagcgcgccttttgctacaggtgcatgacgagctcattttggaggcgccgaaagaagagatggagcggctgtgccggctcgttccggaagtgatggagcaagcggtcacacttcgcgtgccgctcaaagtcgattaccattatggctcgacgtggtatgacgcgaaataaaaaggatcc

SEQ ID NO: 2308 - DNA, 2712 bp, Artificial Sequence
  Description of Artificial Sequence: Synthetic DNA sequence of Bacillus caldolyticus EA1 DNA polymerase Y796V
atgaaatacctgctgccgaccgctgctgctggtctgctgctcctcgctgcccagccggcgatggccatgggattgaaaaaaaagcttgttttaatcgacggcagcagcgtggcgtaccgcgcctttttcgccttgccgcttttgcataacgacaaaggcatccatacgaacgccgtctacgggtttacgatgatgttgaataaaattttggcggaagaagagccaactcatatgcttgtcgcgtttgacgccgggaaaacgacgttccggcatgaagcgtttcaagagtataaaggtgggcgccagcagacgccaccggagctgtcggagcagtttccgctgttgcgcgagctgctgagggcgtatcgcatccccgcctatgaactcgagaactacgaagcggacgatattatcggaacgcttgccgcccgcgctgagcaggaagggtttgaggtgaaagtcatttccggcgaccgcgatctgacccagctcgcctccccccatgtgacggtggacattacgaaaaaagggattaccgatatcgaaccgtacacgccggaggcggtccgcgaaaaatacggcttaactccggaacaaatcgttgatttgaaaggattgatgggcgacaaatcggacaacattcccggagtgccgggcatcggggaaaagacggcggtcaagctgctcaagcaattcggcacggtcgaaaacgtgcttgcctccattgacgagatcaaaggcgaaaagttgaaagaaacgctgcgccaacaccgggagatggcgctgttaagcaaaaagctcgccgccattcgccgcgacgccccggtcgagctctcgcttgatgacatcgtctatcaaggggaagaccgggagaaagtggtcgctttatttaaagagcttgggtttcaatcgtttttagagaaaatggaatcgccgtcatcagaagaggaaaaaccgcttgccaagatggcatttacgcttgctgaccgcgtgacggaggagatgcttgccgacaaggcggcgcttgtcgttgaagtggtcgaggaaaattatcatgatgcgccgatcgtcggcatcgctgtggtcaacgaacatggacggtttttcctgcgcccggagacggcgcttgccgatccgcagtttgtcgcctggcttggtgatgaaacgaagaaaaaaagcatgtttgactcaaagcgcgcggcagtcgccttgaaatggaaaggaattgagctatgcggcgtttcctttgatttattgctggccgcctatttgcttgatccggcgcaaggtgttgatgatgtggctgccgcagcaaaaatgaagcaatacgaagcggtgcgctcggatgaagcggtgtatggcaaaggggcgaagcgggccgtgccggatgagccagtgctcgccgagcatctcgtccgcaaggcggcggcgatttgggcgctcgaacgtccgtttttggatgagctgcgccgcaacgaacaagatcggttgctcgtcgagctcgagcagccgttgtcttcgattttggcggaaatggaatttgccggagtgaaagtggatacgaagcggctcgaacagatgggcgaagagctcgccgagcagctgcgcacggtcgagcagcgcatttatgagctcgccggccaagaattcaacatcaattcaccgaaacagctcggcgtcattttatttgaaaaactgcagctgcccgtcttgaaaaaaacgaaaaccggctactccacttcggcggatgtgcttgaaaaacttgcgccttatcacgagatcgtggaaaacattttgcattaccgccagcttggcaagttgcagtcgacgtatattgaaggattgctgaaagtcgtgcgacccgatacaaagaaggtgcatacgattttcaatcaggcgttgacgcaaaccggacggctcagctcgacggagccgaacttgcaaaacattccgattcggcttgaggaaggacggaaaatccgccaagcgttcgtgccgtcggagtctgattggctcattttcgctgccgactactcgcaaattgagttgcgcgtcctcgcccatattgcggaagatgacaatttaatggaagcgttccgccgcgatttggatatccatacgaaaacagcgatggacattttccaagtgagcgaggacgaagtgacgcccaacatgcgccgtcaggcgaaggcggtcaactttgggatcgtttacgggatcagtgattacggcttggcgcaaaacttaaatatttcacgcaaagaggccgctgaattcatcgagcgctacttcgaaagcttccctggcgtgaagcggtatatggaaaacattgtgcaagaagcaaaacagaaagggtatgtgacgacgctgctgcatcggcgccgcgtcttgccggatatcacgagccgcaacttcaacgtccgcagctttgctgaacggatggcgatgaacacgccgattcaagggagcgccgctgacattattaaaaaggcgatgatcgatctgaacgctagactgaaggaagagcggctgcaagcgcgccttttgctacaggtgcatgacgagctcattttggaggcgccgaaagaagagatggagcggctgtgccggctcgttccggaagtgatggagcaagcggtcacacttcgcgtgccgctcaaagtcgattaccattatggctcgacgtggtatgacgcgaaataaaaaggatcc

SEQ ID NO: 2309 - DNA, 2712 bp, Artificial Sequence
  Description of Artificial Sequence: Synthetic DNA sequence of Bacillus caldolyticus EA1 DNA polymerase L797A
atgaaatacctgctgccgaccgctgctgctggtctgctgctcctcgctgcccagccggcgatggccatgggattgaaaaaaaagcttgttttaatcgacggcagcagcgtggcgtaccgcgcctttttcgccttgccgcttttgcataacgacaaaggcatccatacgaacgccgtctacgggtttacgatgatgttgaataaaattttggcggaagaagagccaactcatatgcttgtcgcgtttgacgccgggaaaacgacgttccggcatgaagcgtttcaagagtataaaggtgggcgccagcagacgccaccggagctgtcggagcagtttccgctgttgcgcgagctgctgagggcgtatcgcatccccgcctatgaactcgagaactacgaagcggacgatattatcggaacgcttgccgcccgcgctgagcaggaagggtttgaggtgaaagtcatttccggcgaccgcgatctgacccagctcgcctccccccatgtgacggtggacattacgaaaaaagggattaccgatatcgaaccgtacacgccggaggcggtccgcgaaaaatacggcttaactccggaacaaatcgttgatttgaaaggattgatgggcgacaaatcggacaacattcccggagtgccgggcatcggggaaaagacggcggtcaagctgctcaagcaattcggcacggtcgaaaacgtgcttgcctccattgacgagatcaaaggcgaaaagttgaaagaaacgctgcgccaacaccgggagatggcgctgttaagcaaaaagctcgccgccattcgccgcgacgccccggtcgagctctcgcttgatgacatcgtctatcaaggggaagaccgggagaaagtggtcgctttatttaaagagcttgggtttcaatcgtttttagagaaaatggaatcgccgtcatcagaagaggaaaaaccgcttgccaagatggcatttacgcttgctgaccgcgtgacggaggagatgcttgccgacaaggcggcgcttgtcgttgaagtggtcgaggaaaattatcatgatgcgccgatcgtcggcatcgctgtggtcaacgaacatggacggtttttcctgcgcccggagacggcgcttgccgatccgcagtttgtcgcctggcttggtgatgaaacgaagaaaaaaagcatgtttgactcaaagcgcgcggcagtcgccttgaaatggaaaggaattgagctatgcggcgtttcctttgatttattgctggccgcctatttgcttgatccggcgcaaggtgttgatgatgtggctgccgcagcaaaaatgaagcaatacgaagcggtgcgctcggatgaagcggtgtatggcaaaggggcgaagcgggccgtgccggatgagccagtgctcgccgagcatctcgtccgcaaggcggcggcgatttgggcgctcgaacgtccgtttttggatgagctgcgccgcaacgaacaagatcggttgctcgtcgagctcgagcagccgttgtcttcgattttggcggaaatggaatttgccggagtgaaagtggatacgaagcggctcgaacagatgggcgaagagctcgccgagcagctgcgcacggtcgagcagcgcatttatgagctcgccggccaagaattcaacatcaattcaccgaaacagctcggcgtcattttatttgaaaaactgcagctgcccgtcttgaaaaaaacgaaaaccggctactccacttcggcggatgtgcttgaaaaacttgcgccttatcacgagatcgtggaaaacattttgcattaccgccagcttggcaagttgcagtcgacgtatattgaaggattgctgaaagtcgtgcgacccgatacaaagaaggtgcatacgattttcaatcaggcgttgacgcaaaccggacggctcagctcgacggagccgaacttgcaaaacattccgattcggcttgaggaaggacggaaaatccgccaagcgttcgtgccgtcggagtctgattggctcattttcgctgccgactactcgcaaattgagttgcgcgtcctcgcccatattgcggaagatgacaatttaatggaagcgttccgccgcgatttggatatccatacgaaaacagcgatggacattttccaagtgagcgaggacgaagtgacgcccaacatgcgccgtcaggcgaaggcggtcaactttgggatcgtttacgggatcagtgattacggcttggcgcaaaacttaaatatttcacgcaaagaggccgctgaattcatcgagcgctacttcgaaagcttccctggcgtgaagcggtatatggaaaacattgtgcaagaagcaaaacagaaagggtatgtgacgacgctgctgcatcggcgccgctatgctccggatatcacgagccgcaacttcaacgtccgcagctttgctgaacggatggcgatgaacacgccgattcaagggagcgccgctgacattattaaaaaggcgatgatcgatctgaacgctagactgaaggaagagcggctgcaagcgcgccttttgctacaggtgcatgacgagctcattttggaggcgccgaaagaagagatggagcggctgtgccggctcgttccggaagtgatggagcaagcggtcacacttcgcgtgccgctcaaagtcgattaccattatggctcgacgtggtatgacgcgaaataaaaaggatcc

SEQ ID NO: 2310 - DNA, 2712 bp, Artificial Sequence
  Description of Artificial Sequence: Synthetic DNA sequence of Bacillus caldolyticus EA1 DNA polymerase L797R
atgaaatacctgctgccgaccgctgctgctggtctgctgctcctcgctgcccagccggcgatggccatgggattgaaaaaaaagcttgttttaatcgacggcagcagcgtggcgtaccgcgcctttttcgccttgccgcttttgcataacgacaaaggcatccatacgaacgccgtctacgggtttacgatgatgttgaataaaattttggcggaagaagagccaactcatatgcttgtcgcgtttgacgccgggaaaacgacgttccggcatgaagcgtttcaagagtataaaggtgggcgccagcagacgccaccggagctgtcggagcagtttccgctgttgcgcgagctgctgagggcgtatcgcatccccgcctatgaactcgagaactacgaagcggacgatattatcggaacgcttgccgcccgcgctgagcaggaagggtttgaggtgaaagtcatttccggcgaccgcgatctgacccagctcgcctccccccatgtgacggtggacattacgaaaaaagggattaccgatatcgaaccgtacacgccggaggcggtccgcgaaaaatacggcttaactccggaacaaatcgttgatttgaaaggattgatgggcgacaaatcggacaacattcccggagtgccgggcatcggggaaaagacggcggtcaagctgctcaagcaattcggcacggtcgaaaacgtgcttgcctccattgacgagatcaaaggcgaaaagttgaaagaaacgctgcgccaacaccgggagatggcgctgttaagcaaaaagctcgccgccattcgccgcgacgccccggtcgagctctcgcttgatgacatcgtctatcaaggggaagaccgggagaaagtggtcgctttatttaaagagcttgggtttcaatcgtttttagagaaaatggaatcgccgtcatcagaagaggaaaaaccgcttgccaagatggcatttacgcttgctgaccgcgtgacggaggagatgcttgccgacaaggcggcgcttgtcgttgaagtggtcgaggaaaattatcatgatgcgccgatcgtcggcatcgctgtggtcaacgaacatggacggtttttcctgcgcccggagacggcgcttgccgatccgcagtttgtcgcctggcttggtgatgaaacgaagaaaaaaagcatgtttgactcaaagcgcgcggcagtcgccttgaaatggaaaggaattgagctatgcggcgtttcctttgatttattgctggccgcctatttgcttgatccggcgcaaggtgttgatgatgtggctgccgcagcaaaaatgaagcaatacgaagcggtgcgctcggatgaagcggtgtatggcaaaggggcgaagcgggccgtgccggatgagccagtgctcgccgagcatctcgtccgcaaggcggcggcgatttgggcgctcgaacgtccgtttttggatgagctgcgccgcaacgaacaagatcggttgctcgtcgagctcgagcagccgttgtcttcgattttggcggaaatggaatttgccggagtgaaagtggatacgaagcggctcgaacagatgggcgaagagctcgccgagcagctgcgcacggtcgagcagcgcatttatgagctcgccggccaagaattcaacatcaattcaccgaaacagctcggcgtcattttatttgaaaaactgcagctgcccgtcttgaaaaaaacgaaaaccggctactccacttcggcggatgtgcttgaaaaacttgcgccttatcacgagatcgtggaaaacattttgcattaccgccagcttggcaagttgcagtcgacgtatattgaaggattgctgaaagtcgtgcgacccgatacaaagaaggtgcatacgattttcaatcaggcgttgacgcaaaccggacggctcagctcgacggagccgaacttgcaaaacattccgattcggcttgaggaaggacggaaaatccgccaagcgttcgtgccgtcggagtctgattggctcattttcgctgccgactactcgcaaattgagttgcgcgtcctcgcccatattgcggaagatgacaatttaatggaagcgttccgccgcgatttggatatccatacgaaaacagcgatggacattttccaagtgagcgaggacgaagtgacgcccaacatgcgccgtcaggcgaaggcggtcaactttgggatcgtttacgggatcagtgattacggcttggcgcaaaacttaaatatttcacgcaaagaggccgctgaattcatcgagcgctacttcgaaagcttccctggcgtgaagcggtatatggaaaacattgtgcaagaagcaaaacagaaagggtatgtgacgacgctgctgcatcggcgccgctatcgaccggatatcacgagccgcaacttcaacgtccgcagctttgctgaacggatggcgatgaacacgccgattcaagggagcgccgctgacattattaaaaaggcgatgatcgatctgaacgctagactgaaggaagagcggctgcaagcgcgccttttgctacaggtgcatgacgagctcattttggaggcgccgaaagaagagatggagcggctgtgccggctcgttccggaagtgatggagcaagcggtcacacttcgcgtgccgctcaaagtcgattaccattatggctcgacgtggtatgacgcgaaataaaaaggatcc

SEQ ID NO: 2311 - DNA, 2712 bp, Artificial Sequence
  Description of Artificial Sequence: Synthetic DNA seqeucne of Bacillus caldolyticus EA1 DNA polymerase L797C
atgaaatacctgctgccgaccgctgctgctggtctgctgctcctcgctgcccagccggcgatggccatgggattgaaaaaaaagcttgttttaatcgacggcagcagcgtggcgtaccgcgcctttttcgccttgccgcttttgcataacgacaaaggcatccatacgaacgccgtctacgggtttacgatgatgttgaataaaattttggcggaagaagagccaactcatatgcttgtcgcgtttgacgccgggaaaacgacgttccggcatgaagcgtttcaagagtataaaggtgggcgccagcagacgccaccggagctgtcggagcagtttccgctgttgcgcgagctgctgagggcgtatcgcatccccgcctatgaactcgagaactacgaagcggacgatattatcggaacgcttgccgcccgcgctgagcaggaagggtttgaggtgaaagtcatttccggcgaccgcgatctgacccagctcgcctccccccatgtgacggtggacattacgaaaaaagggattaccgatatcgaaccgtacacgccggaggcggtccgcgaaaaatacggcttaactccggaacaaatcgttgatttgaaaggattgatgggcgacaaatcggacaacattcccggagtgccgggcatcggggaaaagacggcggtcaagctgctcaagcaattcggcacggtcgaaaacgtgcttgcctccattgacgagatcaaaggcgaaaagttgaaagaaacgctgcgccaacaccgggagatggcgctgttaagcaaaaagctcgccgccattcgccgcgacgccccggtcgagctctcgcttgatgacatcgtctatcaaggggaagaccgggagaaagtggtcgctttatttaaagagcttgggtttcaatcgtttttagagaaaatggaatcgccgtcatcagaagaggaaaaaccgcttgccaagatggcatttacgcttgctgaccgcgtgacggaggagatgcttgccgacaaggcggcgcttgtcgttgaagtggtcgaggaaaattatcatgatgcgccgatcgtcggcatcgctgtggtcaacgaacatggacggtttttcctgcgcccggagacggcgcttgccgatccgcagtttgtcgcctggcttggtgatgaaacgaagaaaaaaagcatgtttgactcaaagcgcgcggcagtcgccttgaaatggaaaggaattgagctatgcggcgtttcctttgatttattgctggccgcctatttgcttgatccggcgcaaggtgttgatgatgtggctgccgcagcaaaaatgaagcaatacgaagcggtgcgctcggatgaagcggtgtatggcaaaggggcgaagcgggccgtgccggatgagccagtgctcgccgagcatctcgtccgcaaggcggcggcgatttgggcgctcgaacgtccgtttttggatgagctgcgccgcaacgaacaagatcggttgctcgtcgagctcgagcagccgttgtcttcgattttggcggaaatggaatttgccggagtgaaagtggatacgaagcggctcgaacagatgggcgaagagctcgccgagcagctgcgcacggtcgagcagcgcatttatgagctcgccggccaagaattcaacatcaattcaccgaaacagctcggcgtcattttatttgaaaaactgcagctgcccgtcttgaaaaaaacgaaaaccggctactccacttcggcggatgtgcttgaaaaacttgcgccttatcacgagatcgtggaaaacattttgcattaccgccagcttggcaagttgcagtcgacgtatattgaaggattgctgaaagtcgtgcgacccgatacaaagaaggtgcatacgattttcaatcaggcgttgacgcaaaccggacggctcagctcgacggagccgaacttgcaaaacattccgattcggcttgaggaaggacggaaaatccgccaagcgttcgtgccgtcggagtctgattggctcattttcgctgccgactactcgcaaattgagttgcgcgtcctcgcccatattgcggaagatgacaatttaatggaagcgttccgccgcgatttggatatccatacgaaaacagcgatggacattttccaagtgagcgaggacgaagtgacgcccaacatgcgccgtcaggcgaaggcggtcaactttgggatcgtttacgggatcagtgattacggcttggcgcaaaacttaaatatttcacgcaaagaggccgctgaattcatcgagcgctacttcgaaagcttccctggcgtgaagcggtatatggaaaacattgtgcaagaagcaaaacagaaagggtatgtgacgacgctgctgcatcggcgccgctattgtccggatatcacgagccgcaacttcaacgtccgcagctttgctgaacggatggcgatgaacacgccgattcaagggagcgccgctgacattattaaaaaggcgatgatcgatctgaacgctagactgaaggaagagcggctgcaagcgcgccttttgctacaggtgcatgacgagctcattttggaggcgccgaaagaagagatggagcggctgtgccggctcgttccggaagtgatggagcaagcggtcacacttcgcgtgccgctcaaagtcgattaccattatggctcgacgtggtatgacgcgaaataaaaaggatcc

SEQ ID NO: 2312 - DNA, 2712 bp, Artificial Sequence
  Description of Artificial Sequence: Synthetic DNA sequence of Bacillus caldolyticus EA1 DNA polymerase L797G
atgaaatacctgctgccgaccgctgctgctggtctgctgctcctcgctgcccagccggcgatggccatgggattgaaaaaaaagcttgttttaatcgacggcagcagcgtggcgtaccgcgcctttttcgccttgccgcttttgcataacgacaaaggcatccatacgaacgccgtctacgggtttacgatgatgttgaataaaattttggcggaagaagagccaactcatatgcttgtcgcgtttgacgccgggaaaacgacgttccggcatgaagcgtttcaagagtataaaggtgggcgccagcagacgccaccggagctgtcggagcagtttccgctgttgcgcgagctgctgagggcgtatcgcatccccgcctatgaactcgagaactacgaagcggacgatattatcggaacgcttgccgcccgcgctgagcaggaagggtttgaggtgaaagtcatttccggcgaccgcgatctgacccagctcgcctccccccatgtgacggtggacattacgaaaaaagggattaccgatatcgaaccgtacacgccggaggcggtccgcgaaaaatacggcttaactccggaacaaatcgttgatttgaaaggattgatgggcgacaaatcggacaacattcccggagtgccgggcatcggggaaaagacggcggtcaagctgctcaagcaattcggcacggtcgaaaacgtgcttgcctccattgacgagatcaaaggcgaaaagttgaaagaaacgctgcgccaacaccgggagatggcgctgttaagcaaaaagctcgccgccattcgccgcgacgccccggtcgagctctcgcttgatgacatcgtctatcaaggggaagaccgggagaaagtggtcgctttatttaaagagcttgggtttcaatcgtttttagagaaaatggaatcgccgtcatcagaagaggaaaaaccgcttgccaagatggcatttacgcttgctgaccgcgtgacggaggagatgcttgccgacaaggcggcgcttgtcgttgaagtggtcgaggaaaattatcatgatgcgccgatcgtcggcatcgctgtggtcaacgaacatggacggtttttcctgcgcccggagacggcgcttgccgatccgcagtttgtcgcctggcttggtgatgaaacgaagaaaaaaagcatgtttgactcaaagcgcgcggcagtcgccttgaaatggaaaggaattgagctatgcggcgtttcctttgatttattgctggccgcctatttgcttgatccggcgcaaggtgttgatgatgtggctgccgcagcaaaaatgaagcaatacgaagcggtgcgctcggatgaagcggtgtatggcaaaggggcgaagcgggccgtgccggatgagccagtgctcgccgagcatctcgtccgcaaggcggcggcgatttgggcgctcgaacgtccgtttttggatgagctgcgccgcaacgaacaagatcggttgctcgtcgagctcgagcagccgttgtcttcgattttggcggaaatggaatttgccggagtgaaagtggatacgaagcggctcgaacagatgggcgaagagctcgccgagcagctgcgcacggtcgagcagcgcatttatgagctcgccggccaagaattcaacatcaattcaccgaaacagctcggcgtcattttatttgaaaaactgcagctgcccgtcttgaaaaaaacgaaaaccggctactccacttcggcggatgtgcttgaaaaacttgcgccttatcacgagatcgtggaaaacattttgcattaccgccagcttggcaagttgcagtcgacgtatattgaaggattgctgaaagtcgtgcgacccgatacaaagaaggtgcatacgattttcaatcaggcgttgacgcaaaccggacggctcagctcgacggagccgaacttgcaaaacattccgattcggcttgaggaaggacggaaaatccgccaagcgttcgtgccgtcggagtctgattggctcattttcgctgccgactactcgcaaattgagttgcgcgtcctcgcccatattgcggaagatgacaatttaatggaagcgttccgccgcgatttggatatccatacgaaaacagcgatggacattttccaagtgagcgaggacgaagtgacgcccaacatgcgccgtcaggcgaaggcggtcaactttgggatcgtttacgggatcagtgattacggcttggcgcaaaacttaaatatttcacgcaaagaggccgctgaattcatcgagcgctacttcgaaagcttccctggcgtgaagcggtatatggaaaacattgtgcaagaagcaaaacagaaagggtatgtgacgacgctgctgcatcggcgccgctatggtccggatatcacgagccgcaacttcaacgtccgcagctttgctgaacggatggcgatgaacacgccgattcaagggagcgccgctgacattattaaaaaggcgatgatcgatctgaacgctagactgaaggaagagcggctgcaagcgcgccttttgctacaggtgcatgacgagctcattttggaggcgccgaaagaagagatggagcggctgtgccggctcgttccggaagtgatggagcaagcggtcacacttcgcgtgccgctcaaagtcgattaccattatggctcgacgtggtatgacgcgaaataaaaaggatcc

SEQ ID NO: 2313 - DNA, 2712 bp, Artificial Sequence
  Description of Artificial Sequence: Synthetic DNA sequence of Bacillus caldolyticus EA1 DNA polymerase L797Q
atgaaatacctgctgccgaccgctgctgctggtctgctgctcctcgctgcccagccggcgatggccatgggattgaaaaaaaagcttgttttaatcgacggcagcagcgtggcgtaccgcgcctttttcgccttgccgcttttgcataacgacaaaggcatccatacgaacgccgtctacgggtttacgatgatgttgaataaaattttggcggaagaagagccaactcatatgcttgtcgcgtttgacgccgggaaaacgacgttccggcatgaagcgtttcaagagtataaaggtgggcgccagcagacgccaccggagctgtcggagcagtttccgctgttgcgcgagctgctgagggcgtatcgcatccccgcctatgaactcgagaactacgaagcggacgatattatcggaacgcttgccgcccgcgctgagcaggaagggtttgaggtgaaagtcatttccggcgaccgcgatctgacccagctcgcctccccccatgtgacggtggacattacgaaaaaagggattaccgatatcgaaccgtacacgccggaggcggtccgcgaaaaatacggcttaactccggaacaaatcgttgatttgaaaggattgatgggcgacaaatcggacaacattcccggagtgccgggcatcggggaaaagacggcggtcaagctgctcaagcaattcggcacggtcgaaaacgtgcttgcctccattgacgagatcaaaggcgaaaagttgaaagaaacgctgcgccaacaccgggagatggcgctgttaagcaaaaagctcgccgccattcgccgcgacgccccggtcgagctctcgcttgatgacatcgtctatcaaggggaagaccgggagaaagtggtcgctttatttaaagagcttgggtttcaatcgtttttagagaaaatggaatcgccgtcatcagaagaggaaaaaccgcttgccaagatggcatttacgcttgctgaccgcgtgacggaggagatgcttgccgacaaggcggcgcttgtcgttgaagtggtcgaggaaaattatcatgatgcgccgatcgtcggcatcgctgtggtcaacgaacatggacggtttttcctgcgcccggagacggcgcttgccgatccgcagtttgtcgcctggcttggtgatgaaacgaagaaaaaaagcatgtttgactcaaagcgcgcggcagtcgccttgaaatggaaaggaattgagctatgcggcgtttcctttgatttattgctggccgcctatttgcttgatccggcgcaaggtgttgatgatgtggctgccgcagcaaaaatgaagcaatacgaagcggtgcgctcggatgaagcggtgtatggcaaaggggcgaagcgggccgtgccggatgagccagtgctcgccgagcatctcgtccgcaaggcggcggcgatttgggcgctcgaacgtccgtttttggatgagctgcgccgcaacgaacaagatcggttgctcgtcgagctcgagcagccgttgtcttcgattttggcggaaatggaatttgccggagtgaaagtggatacgaagcggctcgaacagatgggcgaagagctcgccgagcagctgcgcacggtcgagcagcgcatttatgagctcgccggccaagaattcaacatcaattcaccgaaacagctcggcgtcattttatttgaaaaactgcagctgcccgtcttgaaaaaaacgaaaaccggctactccacttcggcggatgtgcttgaaaaacttgcgccttatcacgagatcgtggaaaacattttgcattaccgccagcttggcaagttgcagtcgacgtatattgaaggattgctgaaagtcgtgcgacccgatacaaagaaggtgcatacgattttcaatcaggcgttgacgcaaaccggacggctcagctcgacggagccgaacttgcaaaacattccgattcggcttgaggaaggacggaaaatccgccaagcgttcgtgccgtcggagtctgattggctcattttcgctgccgactactcgcaaattgagttgcgcgtcctcgcccatattgcggaagatgacaatttaatggaagcgttccgccgcgatttggatatccatacgaaaacagcgatggacattttccaagtgagcgaggacgaagtgacgcccaacatgcgccgtcaggcgaaggcggtcaactttgggatcgtttacgggatcagtgattacggcttggcgcaaaacttaaatatttcacgcaaagaggccgctgaattcatcgagcgctacttcgaaagcttccctggcgtgaagcggtatatggaaaacattgtgcaagaagcaaaacagaaagggtatgtgacgacgctgctgcatcggcgccgctatcaaccggatatcacgagccgcaacttcaacgtccgcagctttgctgaacggatggcgatgaacacgccgattcaagggagcgccgctgacattattaaaaaggcgatgatcgatctgaacgctagactgaaggaagagcggctgcaagcgcgccttttgctacaggtgcatgacgagctcattttggaggcgccgaaagaagagatggagcggctgtgccggctcgttccggaagtgatggagcaagcggtcacacttcgcgtgccgctcaaagtcgattaccattatggctcgacgtggtatgacgcgaaataaaaaggatcc

SEQ ID NO: 2314 - DNA, 2712 bp, Artificial Sequence
  Description of Artificial Sequence: Synthetic DNA sequence of Bacillus caldolyticus EA1 DNA polymerase L797H
atgaaatacctgctgccgaccgctgctgctggtctgctgctcctcgctgcccagccggcgatggccatgggattgaaaaaaaagcttgttttaatcgacggcagcagcgtggcgtaccgcgcctttttcgccttgccgcttttgcataacgacaaaggcatccatacgaacgccgtctacgggtttacgatgatgttgaataaaattttggcggaagaagagccaactcatatgcttgtcgcgtttgacgccgggaaaacgacgttccggcatgaagcgtttcaagagtataaaggtgggcgccagcagacgccaccggagctgtcggagcagtttccgctgttgcgcgagctgctgagggcgtatcgcatccccgcctatgaactcgagaactacgaagcggacgatattatcggaacgcttgccgcccgcgctgagcaggaagggtttgaggtgaaagtcatttccggcgaccgcgatctgacccagctcgcctccccccatgtgacggtggacattacgaaaaaagggattaccgatatcgaaccgtacacgccggaggcggtccgcgaaaaatacggcttaactccggaacaaatcgttgatttgaaaggattgatgggcgacaaatcggacaacattcccggagtgccgggcatcggggaaaagacggcggtcaagctgctcaagcaattcggcacggtcgaaaacgtgcttgcctccattgacgagatcaaaggcgaaaagttgaaagaaacgctgcgccaacaccgggagatggcgctgttaagcaaaaagctcgccgccattcgccgcgacgccccggtcgagctctcgcttgatgacatcgtctatcaaggggaagaccgggagaaagtggtcgctttatttaaagagcttgggtttcaatcgtttttagagaaaatggaatcgccgtcatcagaagaggaaaaaccgcttgccaagatggcatttacgcttgctgaccgcgtgacggaggagatgcttgccgacaaggcggcgcttgtcgttgaagtggtcgaggaaaattatcatgatgcgccgatcgtcggcatcgctgtggtcaacgaacatggacggtttttcctgcgcccggagacggcgcttgccgatccgcagtttgtcgcctggcttggtgatgaaacgaagaaaaaaagcatgtttgactcaaagcgcgcggcagtcgccttgaaatggaaaggaattgagctatgcggcgtttcctttgatttattgctggccgcctatttgcttgatccggcgcaaggtgttgatgatgtggctgccgcagcaaaaatgaagcaatacgaagcggtgcgctcggatgaagcggtgtatggcaaaggggcgaagcgggccgtgccggatgagccagtgctcgccgagcatctcgtccgcaaggcggcggcgatttgggcgctcgaacgtccgtttttggatgagctgcgccgcaacgaacaagatcggttgctcgtcgagctcgagcagccgttgtcttcgattttggcggaaatggaatttgccggagtgaaagtggatacgaagcggctcgaacagatgggcgaagagctcgccgagcagctgcgcacggtcgagcagcgcatttatgagctcgccggccaagaattcaacatcaattcaccgaaacagctcggcgtcattttatttgaaaaactgcagctgcccgtcttgaaaaaaacgaaaaccggctactccacttcggcggatgtgcttgaaaaacttgcgccttatcacgagatcgtggaaaacattttgcattaccgccagcttggcaagttgcagtcgacgtatattgaaggattgctgaaagtcgtgcgacccgatacaaagaaggtgcatacgattttcaatcaggcgttgacgcaaaccggacggctcagctcgacggagccgaacttgcaaaacattccgattcggcttgaggaaggacggaaaatccgccaagcgttcgtgccgtcggagtctgattggctcattttcgctgccgactactcgcaaattgagttgcgcgtcctcgcccatattgcggaagatgacaatttaatggaagcgttccgccgcgatttggatatccatacgaaaacagcgatggacattttccaagtgagcgaggacgaagtgacgcccaacatgcgccgtcaggcgaaggcggtcaactttgggatcgtttacgggatcagtgattacggcttggcgcaaaacttaaatatttcacgcaaagaggccgctgaattcatcgagcgctacttcgaaagcttccctggcgtgaagcggtatatggaaaacattgtgcaagaagcaaaacagaaagggtatgtgacgacgctgctgcatcggcgccgctatcatccggatatcacgagccgcaacttcaacgtccgcagctttgctgaacggatggcgatgaacacgccgattcaagggagcgccgctgacattattaaaaaggcgatgatcgatctgaacgctagactgaaggaagagcggctgcaagcgcgccttttgctacaggtgcatgacgagctcattttggaggcgccgaaagaagagatggagcggctgtgccggctcgttccggaagtgatggagcaagcggtcacacttcgcgtgccgctcaaagtcgattaccattatggctcgacgtggtatgacgcgaaataaaaaggatcc

SEQ ID NO: 2315 - DNA, 2712 bp, Artificial Sequence
  Description of Artificial Sequence: Synthetic DNA sequence of Bacillus caldolyticus EA1 DNA polymerase L797I
atgaaatacctgctgccgaccgctgctgctggtctgctgctcctcgctgcccagccggcgatggccatgggattgaaaaaaaagcttgttttaatcgacggcagcagcgtggcgtaccgcgcctttttcgccttgccgcttttgcataacgacaaaggcatccatacgaacgccgtctacgggtttacgatgatgttgaataaaattttggcggaagaagagccaactcatatgcttgtcgcgtttgacgccgggaaaacgacgttccggcatgaagcgtttcaagagtataaaggtgggcgccagcagacgccaccggagctgtcggagcagtttccgctgttgcgcgagctgctgagggcgtatcgcatccccgcctatgaactcgagaactacgaagcggacgatattatcggaacgcttgccgcccgcgctgagcaggaagggtttgaggtgaaagtcatttccggcgaccgcgatctgacccagctcgcctccccccatgtgacggtggacattacgaaaaaagggattaccgatatcgaaccgtacacgccggaggcggtccgcgaaaaatacggcttaactccggaacaaatcgttgatttgaaaggattgatgggcgacaaatcggacaacattcccggagtgccgggcatcggggaaaagacggcggtcaagctgctcaagcaattcggcacggtcgaaaacgtgcttgcctccattgacgagatcaaaggcgaaaagttgaaagaaacgctgcgccaacaccgggagatggcgctgttaagcaaaaagctcgccgccattcgccgcgacgccccggtcgagctctcgcttgatgacatcgtctatcaaggggaagaccgggagaaagtggtcgctttatttaaagagcttgggtttcaatcgtttttagagaaaatggaatcgccgtcatcagaagaggaaaaaccgcttgccaagatggcatttacgcttgctgaccgcgtgacggaggagatgcttgccgacaaggcggcgcttgtcgttgaagtggtcgaggaaaattatcatgatgcgccgatcgtcggcatcgctgtggtcaacgaacatggacggtttttcctgcgcccggagacggcgcttgccgatccgcagtttgtcgcctggcttggtgatgaaacgaagaaaaaaagcatgtttgactcaaagcgcgcggcagtcgccttgaaatggaaaggaattgagctatgcggcgtttcctttgatttattgctggccgcctatttgcttgatccggcgcaaggtgttgatgatgtggctgccgcagcaaaaatgaagcaatacgaagcggtgcgctcggatgaagcggtgtatggcaaaggggcgaagcgggccgtgccggatgagccagtgctcgccgagcatctcgtccgcaaggcggcggcgatttgggcgctcgaacgtccgtttttggatgagctgcgccgcaacgaacaagatcggttgctcgtcgagctcgagcagccgttgtcttcgattttggcggaaatggaatttgccggagtgaaagtggatacgaagcggctcgaacagatgggcgaagagctcgccgagcagctgcgcacggtcgagcagcgcatttatgagctcgccggccaagaattcaacatcaattcaccgaaacagctcggcgtcattttatttgaaaaactgcagctgcccgtcttgaaaaaaacgaaaaccggctactccacttcggcggatgtgcttgaaaaacttgcgccttatcacgagatcgtggaaaacattttgcattaccgccagcttggcaagttgcagtcgacgtatattgaaggattgctgaaagtcgtgcgacccgatacaaagaaggtgcatacgattttcaatcaggcgttgacgcaaaccggacggctcagctcgacggagccgaacttgcaaaacattccgattcggcttgaggaaggacggaaaatccgccaagcgttcgtgccgtcggagtctgattggctcattttcgctgccgactactcgcaaattgagttgcgcgtcctcgcccatattgcggaagatgacaatttaatggaagcgttccgccgcgatttggatatccatacgaaaacagcgatggacattttccaagtgagcgaggacgaagtgacgcccaacatgcgccgtcaggcgaaggcggtcaactttgggatcgtttacgggatcagtgattacggcttggcgcaaaacttaaatatttcacgcaaagaggccgctgaattcatcgagcgctacttcgaaagcttccctggcgtgaagcggtatatggaaaacattgtgcaagaagcaaaacagaaagggtatgtgacgacgctgctgcatcggcgccgctatattccggatatcacgagccgcaacttcaacgtccgcagctttgctgaacggatggcgatgaacacgccgattcaagggagcgccgctgacattattaaaaaggcgatgatcgatctgaacgctagactgaaggaagagcggctgcaagcgcgccttttgctacaggtgcatgacgagctcattttggaggcgccgaaagaagagatggagcggctgtgccggctcgttccggaagtgatggagcaagcggtcacacttcgcgtgccgctcaaagtcgattaccattatggctcgacgtggtatgacgcgaaataaaaaggatcc

SEQ ID NO: 2316 - DNA, 2712 bp, Artificial Sequence
  Description of Artificial Sequence: Synthetic DNA sequence of Bacillus caldolyticus EA1 DNA polymerase L797K
atgaaatacctgctgccgaccgctgctgctggtctgctgctcctcgctgcccagccggcgatggccatgggattgaaaaaaaagcttgttttaatcgacggcagcagcgtggcgtaccgcgcctttttcgccttgccgcttttgcataacgacaaaggcatccatacgaacgccgtctacgggtttacgatgatgttgaataaaattttggcggaagaagagccaactcatatgcttgtcgcgtttgacgccgggaaaacgacgttccggcatgaagcgtttcaagagtataaaggtgggcgccagcagacgccaccggagctgtcggagcagtttccgctgttgcgcgagctgctgagggcgtatcgcatccccgcctatgaactcgagaactacgaagcggacgatattatcggaacgcttgccgcccgcgctgagcaggaagggtttgaggtgaaagtcatttccggcgaccgcgatctgacccagctcgcctccccccatgtgacggtggacattacgaaaaaagggattaccgatatcgaaccgtacacgccggaggcggtccgcgaaaaatacggcttaactccggaacaaatcgttgatttgaaaggattgatgggcgacaaatcggacaacattcccggagtgccgggcatcggggaaaagacggcggtcaagctgctcaagcaattcggcacggtcgaaaacgtgcttgcctccattgacgagatcaaaggcgaaaagttgaaagaaacgctgcgccaacaccgggagatggcgctgttaagcaaaaagctcgccgccattcgccgcgacgccccggtcgagctctcgcttgatgacatcgtctatcaaggggaagaccgggagaaagtggtcgctttatttaaagagcttgggtttcaatcgtttttagagaaaatggaatcgccgtcatcagaagaggaaaaaccgcttgccaagatggcatttacgcttgctgaccgcgtgacggaggagatgcttgccgacaaggcggcgcttgtcgttgaagtggtcgaggaaaattatcatgatgcgccgatcgtcggcatcgctgtggtcaacgaacatggacggtttttcctgcgcccggagacggcgcttgccgatccgcagtttgtcgcctggcttggtgatgaaacgaagaaaaaaagcatgtttgactcaaagcgcgcggcagtcgccttgaaatggaaaggaattgagctatgcggcgtttcctttgatttattgctggccgcctatttgcttgatccggcgcaaggtgttgatgatgtggctgccgcagcaaaaatgaagcaatacgaagcggtgcgctcggatgaagcggtgtatggcaaaggggcgaagcgggccgtgccggatgagccagtgctcgccgagcatctcgtccgcaaggcggcggcgatttgggcgctcgaacgtccgtttttggatgagctgcgccgcaacgaacaagatcggttgctcgtcgagctcgagcagccgttgtcttcgattttggcggaaatggaatttgccggagtgaaagtggatacgaagcggctcgaacagatgggcgaagagctcgccgagcagctgcgcacggtcgagcagcgcatttatgagctcgccggccaagaattcaacatcaattcaccgaaacagctcggcgtcattttatttgaaaaactgcagctgcccgtcttgaaaaaaacgaaaaccggctactccacttcggcggatgtgcttgaaaaacttgcgccttatcacgagatcgtggaaaacattttgcattaccgccagcttggcaagttgcagtcgacgtatattgaaggattgctgaaagtcgtgcgacccgatacaaagaaggtgcatacgattttcaatcaggcgttgacgcaaaccggacggctcagctcgacggagccgaacttgcaaaacattccgattcggcttgaggaaggacggaaaatccgccaagcgttcgtgccgtcggagtctgattggctcattttcgctgccgactactcgcaaattgagttgcgcgtcctcgcccatattgcggaagatgacaatttaatggaagcgttccgccgcgatttggatatccatacgaaaacagcgatggacattttccaagtgagcgaggacgaagtgacgcccaacatgcgccgtcaggcgaaggcggtcaactttgggatcgtttacgggatcagtgattacggcttggcgcaaaacttaaatatttcacgcaaagaggccgctgaattcatcgagcgctacttcgaaagcttccctggcgtgaagcggtatatggaaaacattgtgcaagaagcaaaacagaaagggtatgtgacgacgctgctgcatcggcgccgctataaaccggatatcacgagccgcaacttcaacgtccgcagctttgctgaacggatggcgatgaacacgccgattcaagggagcgccgctgacattattaaaaaggcgatgatcgatctgaacgctagactgaaggaagagcggctgcaagcgcgccttttgctacaggtgcatgacgagctcattttggaggcgccgaaagaagagatggagcggctgtgccggctcgttccggaagtgatggagcaagcggtcacacttcgcgtgccgctcaaagtcgattaccattatggctcgacgtggtatgacgcgaaataaaaaggatcc

SEQ ID NO: 2317 - DNA, 2712 bp, Artificial Sequence
  Description of Artificial Sequence: Synthetic DNA sequence of Bacillus caldolyticus EA1 DNA polymerase L797E
atgaaatacctgctgccgaccgctgctgctggtctgctgctcctcgctgcccagccggcgatggccatgggattgaaaaaaaagcttgttttaatcgacggcagcagcgtggcgtaccgcgcctttttcgccttgccgcttttgcataacgacaaaggcatccatacgaacgccgtctacgggtttacgatgatgttgaataaaattttggcggaagaagagccaactcatatgcttgtcgcgtttgacgccgggaaaacgacgttccggcatgaagcgtttcaagagtataaaggtgggcgccagcagacgccaccggagctgtcggagcagtttccgctgttgcgcgagctgctgagggcgtatcgcatccccgcctatgaactcgagaactacgaagcggacgatattatcggaacgcttgccgcccgcgctgagcaggaagggtttgaggtgaaagtcatttccggcgaccgcgatctgacccagctcgcctccccccatgtgacggtggacattacgaaaaaagggattaccgatatcgaaccgtacacgccggaggcggtccgcgaaaaatacggcttaactccggaacaaatcgttgatttgaaaggattgatgggcgacaaatcggacaacattcccggagtgccgggcatcggggaaaagacggcggtcaagctgctcaagcaattcggcacggtcgaaaacgtgcttgcctccattgacgagatcaaaggcgaaaagttgaaagaaacgctgcgccaacaccgggagatggcgctgttaagcaaaaagctcgccgccattcgccgcgacgccccggtcgagctctcgcttgatgacatcgtctatcaaggggaagaccgggagaaagtggtcgctttatttaaagagcttgggtttcaatcgtttttagagaaaatggaatcgccgtcatcagaagaggaaaaaccgcttgccaagatggcatttacgcttgctgaccgcgtgacggaggagatgcttgccgacaaggcggcgcttgtcgttgaagtggtcgaggaaaattatcatgatgcgccgatcgtcggcatcgctgtggtcaacgaacatggacggtttttcctgcgcccggagacggcgcttgccgatccgcagtttgtcgcctggcttggtgatgaaacgaagaaaaaaagcatgtttgactcaaagcgcgcggcagtcgccttgaaatggaaaggaattgagctatgcggcgtttcctttgatttattgctggccgcctatttgcttgatccggcgcaaggtgttgatgatgtggctgccgcagcaaaaatgaagcaatacgaagcggtgcgctcggatgaagcggtgtatggcaaaggggcgaagcgggccgtgccggatgagccagtgctcgccgagcatctcgtccgcaaggcggcggcgatttgggcgctcgaacgtccgtttttggatgagctgcgccgcaacgaacaagatcggttgctcgtcgagctcgagcagccgttgtcttcgattttggcggaaatggaatttgccggagtgaaagtggatacgaagcggctcgaacagatgggcgaagagctcgccgagcagctgcgcacggtcgagcagcgcatttatgagctcgccggccaagaattcaacatcaattcaccgaaacagctcggcgtcattttatttgaaaaactgcagctgcccgtcttgaaaaaaacgaaaaccggctactccacttcggcggatgtgcttgaaaaacttgcgccttatcacgagatcgtggaaaacattttgcattaccgccagcttggcaagttgcagtcgacgtatattgaaggattgctgaaagtcgtgcgacccgatacaaagaaggtgcatacgattttcaatcaggcgttgacgcaaaccggacggctcagctcgacggagccgaacttgcaaaacattccgattcggcttgaggaaggacggaaaatccgccaagcgttcgtgccgtcggagtctgattggctcattttcgctgccgactactcgcaaattgagttgcgcgtcctcgcccatattgcggaagatgacaatttaatggaagcgttccgccgcgatttggatatccatacgaaaacagcgatggacattttccaagtgagcgaggacgaagtgacgcccaacatgcgccgtcaggcgaaggcggtcaactttgggatcgtttacgggatcagtgattacggcttggcgcaaaacttaaatatttcacgcaaagaggccgctgaattcatcgagcgctacttcgaaagcttccctggcgtgaagcggtatatggaaaacattgtgcaagaagcaaaacagaaagggtatgtgacgacgctgctgcatcggcgccgctatgaaccggatatcacgagccgcaacttcaacgtccgcagctttgctgaacggatggcgatgaacacgccgattcaagggagcgccgctgacattattaaaaaggcgatgatcgatctgaacgctagactgaaggaagagcggctgcaagcgcgccttttgctacaggtgcatgacgagctcattttggaggcgccgaaagaagagatggagcggctgtgccggctcgttccggaagtgatggagcaagcggtcacacttcgcgtgccgctcaaagtcgattaccattatggctcgacgtggtatgacgcgaaataaaaaggatcc

SEQ ID NO: 2318 - DNA, 2712 bp, Artificial Sequence
  Description of Artificial Sequence: Synthetic DNA sequence of Bacillus caldolyticus EA1 DNA polymerase L797D
atgaaatacctgctgccgaccgctgctgctggtctgctgctcctcgctgcccagccggcgatggccatgggattgaaaaaaaagcttgttttaatcgacggcagcagcgtggcgtaccgcgcctttttcgccttgccgcttttgcataacgacaaaggcatccatacgaacgccgtctacgggtttacgatgatgttgaataaaattttggcggaagaagagccaactcatatgcttgtcgcgtttgacgccgggaaaacgacgttccggcatgaagcgtttcaagagtataaaggtgggcgccagcagacgccaccggagctgtcggagcagtttccgctgttgcgcgagctgctgagggcgtatcgcatccccgcctatgaactcgagaactacgaagcggacgatattatcggaacgcttgccgcccgcgctgagcaggaagggtttgaggtgaaagtcatttccggcgaccgcgatctgacccagctcgcctccccccatgtgacggtggacattacgaaaaaagggattaccgatatcgaaccgtacacgccggaggcggtccgcgaaaaatacggcttaactccggaacaaatcgttgatttgaaaggattgatgggcgacaaatcggacaacattcccggagtgccgggcatcggggaaaagacggcggtcaagctgctcaagcaattcggcacggtcgaaaacgtgcttgcctccattgacgagatcaaaggcgaaaagttgaaagaaacgctgcgccaacaccgggagatggcgctgttaagcaaaaagctcgccgccattcgccgcgacgccccggtcgagctctcgcttgatgacatcgtctatcaaggggaagaccgggagaaagtggtcgctttatttaaagagcttgggtttcaatcgtttttagagaaaatggaatcgccgtcatcagaagaggaaaaaccgcttgccaagatggcatttacgcttgctgaccgcgtgacggaggagatgcttgccgacaaggcggcgcttgtcgttgaagtggtcgaggaaaattatcatgatgcgccgatcgtcggcatcgctgtggtcaacgaacatggacggtttttcctgcgcccggagacggcgcttgccgatccgcagtttgtcgcctggcttggtgatgaaacgaagaaaaaaagcatgtttgactcaaagcgcgcggcagtcgccttgaaatggaaaggaattgagctatgcggcgtttcctttgatttattgctggccgcctatttgcttgatccggcgcaaggtgttgatgatgtggctgccgcagcaaaaatgaagcaatacgaagcggtgcgctcggatgaagcggtgtatggcaaaggggcgaagcgggccgtgccggatgagccagtgctcgccgagcatctcgtccgcaaggcggcggcgatttgggcgctcgaacgtccgtttttggatgagctgcgccgcaacgaacaagatcggttgctcgtcgagctcgagcagccgttgtcttcgattttggcggaaatggaatttgccggagtgaaagtggatacgaagcggctcgaacagatgggcgaagagctcgccgagcagctgcgcacggtcgagcagcgcatttatgagctcgccggccaagaattcaacatcaattcaccgaaacagctcggcgtcattttatttgaaaaactgcagctgcccgtcttgaaaaaaacgaaaaccggctactccacttcggcggatgtgcttgaaaaacttgcgccttatcacgagatcgtggaaaacattttgcattaccgccagcttggcaagttgcagtcgacgtatattgaaggattgctgaaagtcgtgcgacccgatacaaagaaggtgcatacgattttcaatcaggcgttgacgcaaaccggacggctcagctcgacggagccgaacttgcaaaacattccgattcggcttgaggaaggacggaaaatccgccaagcgttcgtgccgtcggagtctgattggctcattttcgctgccgactactcgcaaattgagttgcgcgtcctcgcccatattgcggaagatgacaatttaatggaagcgttccgccgcgatttggatatccatacgaaaacagcgatggacattttccaagtgagcgaggacgaagtgacgcccaacatgcgccgtcaggcgaaggcggtcaactttgggatcgtttacgggatcagtgattacggcttggcgcaaaacttaaatatttcacgcaaagaggccgctgaattcatcgagcgctacttcgaaagcttccctggcgtgaagcggtatatggaaaacattgtgcaagaagcaaaacagaaagggtatgtgacgacgctgctgcatcggcgccgctatgatccggatatcacgagccgcaacttcaacgtccgcagctttgctgaacggatggcgatgaacacgccgattcaagggagcgccgctgacattattaaaaaggcgatgatcgatctgaacgctagactgaaggaagagcggctgcaagcgcgccttttgctacaggtgcatgacgagctcattttggaggcgccgaaagaagagatggagcggctgtgccggctcgttccggaagtgatggagcaagcggtcacacttcgcgtgccgctcaaagtcgattaccattatggctcgacgtggtatgacgcgaaataaaaaggatcc

SEQ ID NO: 2319 - DNA, 2712 bp, Artificial Sequence
  Description of Artificial Sequence: Synthetic DNA sequence of Bacillus caldolyticus EA1 DNA polymerase L797F
atgaaatacctgctgccgaccgctgctgctggtctgctgctcctcgctgcccagccggcgatggccatgggattgaaaaaaaagcttgttttaatcgacggcagcagcgtggcgtaccgcgcctttttcgccttgccgcttttgcataacgacaaaggcatccatacgaacgccgtctacgggtttacgatgatgttgaataaaattttggcggaagaagagccaactcatatgcttgtcgcgtttgacgccgggaaaacgacgttccggcatgaagcgtttcaagagtataaaggtgggcgccagcagacgccaccggagctgtcggagcagtttccgctgttgcgcgagctgctgagggcgtatcgcatccccgcctatgaactcgagaactacgaagcggacgatattatcggaacgcttgccgcccgcgctgagcaggaagggtttgaggtgaaagtcatttccggcgaccgcgatctgacccagctcgcctccccccatgtgacggtggacattacgaaaaaagggattaccgatatcgaaccgtacacgccggaggcggtccgcgaaaaatacggcttaactccggaacaaatcgttgatttgaaaggattgatgggcgacaaatcggacaacattcccggagtgccgggcatcggggaaaagacggcggtcaagctgctcaagcaattcggcacggtcgaaaacgtgcttgcctccattgacgagatcaaaggcgaaaagttgaaagaaacgctgcgccaacaccgggagatggcgctgttaagcaaaaagctcgccgccattcgccgcgacgccccggtcgagctctcgcttgatgacatcgtctatcaaggggaagaccgggagaaagtggtcgctttatttaaagagcttgggtttcaatcgtttttagagaaaatggaatcgccgtcatcagaagaggaaaaaccgcttgccaagatggcatttacgcttgctgaccgcgtgacggaggagatgcttgccgacaaggcggcgcttgtcgttgaagtggtcgaggaaaattatcatgatgcgccgatcgtcggcatcgctgtggtcaacgaacatggacggtttttcctgcgcccggagacggcgcttgccgatccgcagtttgtcgcctggcttggtgatgaaacgaagaaaaaaagcatgtttgactcaaagcgcgcggcagtcgccttgaaatggaaaggaattgagctatgcggcgtttcctttgatttattgctggccgcctatttgcttgatccggcgcaaggtgttgatgatgtggctgccgcagcaaaaatgaagcaatacgaagcggtgcgctcggatgaagcggtgtatggcaaaggggcgaagcgggccgtgccggatgagccagtgctcgccgagcatctcgtccgcaaggcggcggcgatttgggcgctcgaacgtccgtttttggatgagctgcgccgcaacgaacaagatcggttgctcgtcgagctcgagcagccgttgtcttcgattttggcggaaatggaatttgccggagtgaaagtggatacgaagcggctcgaacagatgggcgaagagctcgccgagcagctgcgcacggtcgagcagcgcatttatgagctcgccggccaagaattcaacatcaattcaccgaaacagctcggcgtcattttatttgaaaaactgcagctgcccgtcttgaaaaaaacgaaaaccggctactccacttcggcggatgtgcttgaaaaacttgcgccttatcacgagatcgtggaaaacattttgcattaccgccagcttggcaagttgcagtcgacgtatattgaaggattgctgaaagtcgtgcgacccgatacaaagaaggtgcatacgattttcaatcaggcgttgacgcaaaccggacggctcagctcgacggagccgaacttgcaaaacattccgattcggcttgaggaaggacggaaaatccgccaagcgttcgtgccgtcggagtctgattggctcattttcgctgccgactactcgcaaattgagttgcgcgtcctcgcccatattgcggaagatgacaatttaatggaagcgttccgccgcgatttggatatccatacgaaaacagcgatggacattttccaagtgagcgaggacgaagtgacgcccaacatgcgccgtcaggcgaaggcggtcaactttgggatcgtttacgggatcagtgattacggcttggcgcaaaacttaaatatttcacgcaaagaggccgctgaattcatcgagcgctacttcgaaagcttccctggcgtgaagcggtatatggaaaacattgtgcaagaagcaaaacagaaagggtatgtgacgacgctgctgcatcggcgccgctattttccggatatcacgagccgcaacttcaacgtccgcagctttgctgaacggatggcgatgaacacgccgattcaagggagcgccgctgacattattaaaaaggcgatgatcgatctgaacgctagactgaaggaagagcggctgcaagcgcgccttttgctacaggtgcatgacgagctcattttggaggcgccgaaagaagagatggagcggctgtgccggctcgttccggaagtgatggagcaagcggtcacacttcgcgtgccgctcaaagtcgattaccattatggctcgacgtggtatgacgcgaaataaaaaggatcc

SEQ ID NO: 2320 - DNA, 2712 bp, Artificial Sequence
  Description of Artificial Sequence: Synthetic DNA sequence of Bacillus caldolyticus EA1 DNA polymerase L797S
atgaaatacctgctgccgaccgctgctgctggtctgctgctcctcgctgcccagccggcgatggccatgggattgaaaaaaaagcttgttttaatcgacggcagcagcgtggcgtaccgcgcctttttcgccttgccgcttttgcataacgacaaaggcatccatacgaacgccgtctacgggtttacgatgatgttgaataaaattttggcggaagaagagccaactcatatgcttgtcgcgtttgacgccgggaaaacgacgttccggcatgaagcgtttcaagagtataaaggtgggcgccagcagacgccaccggagctgtcggagcagtttccgctgttgcgcgagctgctgagggcgtatcgcatccccgcctatgaactcgagaactacgaagcggacgatattatcggaacgcttgccgcccgcgctgagcaggaagggtttgaggtgaaagtcatttccggcgaccgcgatctgacccagctcgcctccccccatgtgacggtggacattacgaaaaaagggattaccgatatcgaaccgtacacgccggaggcggtccgcgaaaaatacggcttaactccggaacaaatcgttgatttgaaaggattgatgggcgacaaatcggacaacattcccggagtgccgggcatcggggaaaagacggcggtcaagctgctcaagcaattcggcacggtcgaaaacgtgcttgcctccattgacgagatcaaaggcgaaaagttgaaagaaacgctgcgccaacaccgggagatggcgctgttaagcaaaaagctcgccgccattcgccgcgacgccccggtcgagctctcgcttgatgacatcgtctatcaaggggaagaccgggagaaagtggtcgctttatttaaagagcttgggtttcaatcgtttttagagaaaatggaatcgccgtcatcagaagaggaaaaaccgcttgccaagatggcatttacgcttgctgaccgcgtgacggaggagatgcttgccgacaaggcggcgcttgtcgttgaagtggtcgaggaaaattatcatgatgcgccgatcgtcggcatcgctgtggtcaacgaacatggacggtttttcctgcgcccggagacggcgcttgccgatccgcagtttgtcgcctggcttggtgatgaaacgaagaaaaaaagcatgtttgactcaaagcgcgcggcagtcgccttgaaatggaaaggaattgagctatgcggcgtttcctttgatttattgctggccgcctatttgcttgatccggcgcaaggtgttgatgatgtggctgccgcagcaaaaatgaagcaatacgaagcggtgcgctcggatgaagcggtgtatggcaaaggggcgaagcgggccgtgccggatgagccagtgctcgccgagcatctcgtccgcaaggcggcggcgatttgggcgctcgaacgtccgtttttggatgagctgcgccgcaacgaacaagatcggttgctcgtcgagctcgagcagccgttgtcttcgattttggcggaaatggaatttgccggagtgaaagtggatacgaagcggctcgaacagatgggcgaagagctcgccgagcagctgcgcacggtcgagcagcgcatttatgagctcgccggccaagaattcaacatcaattcaccgaaacagctcggcgtcattttatttgaaaaactgcagctgcccgtcttgaaaaaaacgaaaaccggctactccacttcggcggatgtgcttgaaaaacttgcgccttatcacgagatcgtggaaaacattttgcattaccgccagcttggcaagttgcagtcgacgtatattgaaggattgctgaaagtcgtgcgacccgatacaaagaaggtgcatacgattttcaatcaggcgttgacgcaaaccggacggctcagctcgacggagccgaacttgcaaaacattccgattcggcttgaggaaggacggaaaatccgccaagcgttcgtgccgtcggagtctgattggctcattttcgctgccgactactcgcaaattgagttgcgcgtcctcgcccatattgcggaagatgacaatttaatggaagcgttccgccgcgatttggatatccatacgaaaacagcgatggacattttccaagtgagcgaggacgaagtgacgcccaacatgcgccgtcaggcgaaggcggtcaactttgggatcgtttacgggatcagtgattacggcttggcgcaaaacttaaatatttcacgcaaagaggccgctgaattcatcgagcgctacttcgaaagcttccctggcgtgaagcggtatatggaaaacattgtgcaagaagcaaaacagaaagggtatgtgacgacgctgctgcatcggcgccgctattctccggatatcacgagccgcaacttcaacgtccgcagctttgctgaacggatggcgatgaacacgccgattcaagggagcgccgctgacattattaaaaaggcgatgatcgatctgaacgctagactgaaggaagagcggctgcaagcgcgccttttgctacaggtgcatgacgagctcattttggaggcgccgaaagaagagatggagcggctgtgccggctcgttccggaagtgatggagcaagcggtcacacttcgcgtgccgctcaaagtcgattaccattatggctcgacgtggtatgacgcgaaataaaaaggatcc

SEQ ID NO: 2321 - DNA, 2712 bp, Artificial Sequence
  Description of Artificial Sequence: Synthetic DNA sequence of Bacillus caldolyticus EA1 DNA polymerase L797Y
atgaaatacctgctgccgaccgctgctgctggtctgctgctcctcgctgcccagccggcgatggccatgggattgaaaaaaaagcttgttttaatcgacggcagcagcgtggcgtaccgcgcctttttcgccttgccgcttttgcataacgacaaaggcatccatacgaacgccgtctacgggtttacgatgatgttgaataaaattttggcggaagaagagccaactcatatgcttgtcgcgtttgacgccgggaaaacgacgttccggcatgaagcgtttcaagagtataaaggtgggcgccagcagacgccaccggagctgtcggagcagtttccgctgttgcgcgagctgctgagggcgtatcgcatccccgcctatgaactcgagaactacgaagcggacgatattatcggaacgcttgccgcccgcgctgagcaggaagggtttgaggtgaaagtcatttccggcgaccgcgatctgacccagctcgcctccccccatgtgacggtggacattacgaaaaaagggattaccgatatcgaaccgtacacgccggaggcggtccgcgaaaaatacggcttaactccggaacaaatcgttgatttgaaaggattgatgggcgacaaatcggacaacattcccggagtgccgggcatcggggaaaagacggcggtcaagctgctcaagcaattcggcacggtcgaaaacgtgcttgcctccattgacgagatcaaaggcgaaaagttgaaagaaacgctgcgccaacaccgggagatggcgctgttaagcaaaaagctcgccgccattcgccgcgacgccccggtcgagctctcgcttgatgacatcgtctatcaaggggaagaccgggagaaagtggtcgctttatttaaagagcttgggtttcaatcgtttttagagaaaatggaatcgccgtcatcagaagaggaaaaaccgcttgccaagatggcatttacgcttgctgaccgcgtgacggaggagatgcttgccgacaaggcggcgcttgtcgttgaagtggtcgaggaaaattatcatgatgcgccgatcgtcggcatcgctgtggtcaacgaacatggacggtttttcctgcgcccggagacggcgcttgccgatccgcagtttgtcgcctggcttggtgatgaaacgaagaaaaaaagcatgtttgactcaaagcgcgcggcagtcgccttgaaatggaaaggaattgagctatgcggcgtttcctttgatttattgctggccgcctatttgcttgatccggcgcaaggtgttgatgatgtggctgccgcagcaaaaatgaagcaatacgaagcggtgcgctcggatgaagcggtgtatggcaaaggggcgaagcgggccgtgccggatgagccagtgctcgccgagcatctcgtccgcaaggcggcggcgatttgggcgctcgaacgtccgtttttggatgagctgcgccgcaacgaacaagatcggttgctcgtcgagctcgagcagccgttgtcttcgattttggcggaaatggaatttgccggagtgaaagtggatacgaagcggctcgaacagatgggcgaagagctcgccgagcagctgcgcacggtcgagcagcgcatttatgagctcgccggccaagaattcaacatcaattcaccgaaacagctcggcgtcattttatttgaaaaactgcagctgcccgtcttgaaaaaaacgaaaaccggctactccacttcggcggatgtgcttgaaaaacttgcgccttatcacgagatcgtggaaaacattttgcattaccgccagcttggcaagttgcagtcgacgtatattgaaggattgctgaaagtcgtgcgacccgatacaaagaaggtgcatacgattttcaatcaggcgttgacgcaaaccggacggctcagctcgacggagccgaacttgcaaaacattccgattcggcttgaggaaggacggaaaatccgccaagcgttcgtgccgtcggagtctgattggctcattttcgctgccgactactcgcaaattgagttgcgcgtcctcgcccatattgcggaagatgacaatttaatggaagcgttccgccgcgatttggatatccatacgaaaacagcgatggacattttccaagtgagcgaggacgaagtgacgcccaacatgcgccgtcaggcgaaggcggtcaactttgggatcgtttacgggatcagtgattacggcttggcgcaaaacttaaatatttcacgcaaagaggccgctgaattcatcgagcgctacttcgaaagcttccctggcgtgaagcggtatatggaaaacattgtgcaagaagcaaaacagaaagggtatgtgacgacgctgctgcatcggcgccgctattatccggatatcacgagccgcaacttcaacgtccgcagctttgctgaacggatggcgatgaacacgccgattcaagggagcgccgctgacattattaaaaaggcgatgatcgatctgaacgctagactgaaggaagagcggctgcaagcgcgccttttgctacaggtgcatgacgagctcattttggaggcgccgaaagaagagatggagcggctgtgccggctcgttccggaagtgatggagcaagcggtcacacttcgcgtgccgctcaaagtcgattaccattatggctcgacgtggtatgacgcgaaataaaaaggatcc

SEQ ID NO: 2322 - DNA, 2712 bp, Artificial Sequence
  Description of Artificial Sequence: Synthetic DNA sequence of Bacillus caldolyticus EA1 DNA polymerase L797W
atgaaatacctgctgccgaccgctgctgctggtctgctgctcctcgctgcccagccggcgatggccatgggattgaaaaaaaagcttgttttaatcgacggcagcagcgtggcgtaccgcgcctttttcgccttgccgcttttgcataacgacaaaggcatccatacgaacgccgtctacgggtttacgatgatgttgaataaaattttggcggaagaagagccaactcatatgcttgtcgcgtttgacgccgggaaaacgacgttccggcatgaagcgtttcaagagtataaaggtgggcgccagcagacgccaccggagctgtcggagcagtttccgctgttgcgcgagctgctgagggcgtatcgcatccccgcctatgaactcgagaactacgaagcggacgatattatcggaacgcttgccgcccgcgctgagcaggaagggtttgaggtgaaagtcatttccggcgaccgcgatctgacccagctcgcctccccccatgtgacggtggacattacgaaaaaagggattaccgatatcgaaccgtacacgccggaggcggtccgcgaaaaatacggcttaactccggaacaaatcgttgatttgaaaggattgatgggcgacaaatcggacaacattcccggagtgccgggcatcggggaaaagacggcggtcaagctgctcaagcaattcggcacggtcgaaaacgtgcttgcctccattgacgagatcaaaggcgaaaagttgaaagaaacgctgcgccaacaccgggagatggcgctgttaagcaaaaagctcgccgccattcgccgcgacgccccggtcgagctctcgcttgatgacatcgtctatcaaggggaagaccgggagaaagtggtcgctttatttaaagagcttgggtttcaatcgtttttagagaaaatggaatcgccgtcatcagaagaggaaaaaccgcttgccaagatggcatttacgcttgctgaccgcgtgacggaggagatgcttgccgacaaggcggcgcttgtcgttgaagtggtcgaggaaaattatcatgatgcgccgatcgtcggcatcgctgtggtcaacgaacatggacggtttttcctgcgcccggagacggcgcttgccgatccgcagtttgtcgcctggcttggtgatgaaacgaagaaaaaaagcatgtttgactcaaagcgcgcggcagtcgccttgaaatggaaaggaattgagctatgcggcgtttcctttgatttattgctggccgcctatttgcttgatccggcgcaaggtgttgatgatgtggctgccgcagcaaaaatgaagcaatacgaagcggtgcgctcggatgaagcggtgtatggcaaaggggcgaagcgggccgtgccggatgagccagtgctcgccgagcatctcgtccgcaaggcggcggcgatttgggcgctcgaacgtccgtttttggatgagctgcgccgcaacgaacaagatcggttgctcgtcgagctcgagcagccgttgtcttcgattttggcggaaatggaatttgccggagtgaaagtggatacgaagcggctcgaacagatgggcgaagagctcgccgagcagctgcgcacggtcgagcagcgcatttatgagctcgccggccaagaattcaacatcaattcaccgaaacagctcggcgtcattttatttgaaaaactgcagctgcccgtcttgaaaaaaacgaaaaccggctactccacttcggcggatgtgcttgaaaaacttgcgccttatcacgagatcgtggaaaacattttgcattaccgccagcttggcaagttgcagtcgacgtatattgaaggattgctgaaagtcgtgcgacccgatacaaagaaggtgcatacgattttcaatcaggcgttgacgcaaaccggacggctcagctcgacggagccgaacttgcaaaacattccgattcggcttgaggaaggacggaaaatccgccaagcgttcgtgccgtcggagtctgattggctcattttcgctgccgactactcgcaaattgagttgcgcgtcctcgcccatattgcggaagatgacaatttaatggaagcgttccgccgcgatttggatatccatacgaaaacagcgatggacattttccaagtgagcgaggacgaagtgacgcccaacatgcgccgtcaggcgaaggcggtcaactttgggatcgtttacgggatcagtgattacggcttggcgcaaaacttaaatatttcacgcaaagaggccgctgaattcatcgagcgctacttcgaaagcttccctggcgtgaagcggtatatggaaaacattgtgcaagaagcaaaacagaaagggtatgtgacgacgctgctgcatcggcgccgctattggccggatatcacgagccgcaacttcaacgtccgcagctttgctgaacggatggcgatgaacacgccgattcaagggagcgccgctgacattattaaaaaggcgatgatcgatctgaacgctagactgaaggaagagcggctgcaagcgcgccttttgctacaggtgcatgacgagctcattttggaggcgccgaaagaagagatggagcggctgtgccggctcgttccggaagtgatggagcaagcggtcacacttcgcgtgccgctcaaagtcgattaccattatggctcgacgtggtatgacgcgaaataaaaaggatcc

SEQ ID NO: 2323 - DNA, 2712 bp, Artificial Sequence
  Description of Artificial Sequence: Synthetic DNA sequence of Bacillus caldolyticus EA1 DNA polymerase L797P
atgaaatacctgctgccgaccgctgctgctggtctgctgctcctcgctgcccagccggcgatggccatgggattgaaaaaaaagcttgttttaatcgacggcagcagcgtggcgtaccgcgcctttttcgccttgccgcttttgcataacgacaaaggcatccatacgaacgccgtctacgggtttacgatgatgttgaataaaattttggcggaagaagagccaactcatatgcttgtcgcgtttgacgccgggaaaacgacgttccggcatgaagcgtttcaagagtataaaggtgggcgccagcagacgccaccggagctgtcggagcagtttccgctgttgcgcgagctgctgagggcgtatcgcatccccgcctatgaactcgagaactacgaagcggacgatattatcggaacgcttgccgcccgcgctgagcaggaagggtttgaggtgaaagtcatttccggcgaccgcgatctgacccagctcgcctccccccatgtgacggtggacattacgaaaaaagggattaccgatatcgaaccgtacacgccggaggcggtccgcgaaaaatacggcttaactccggaacaaatcgttgatttgaaaggattgatgggcgacaaatcggacaacattcccggagtgccgggcatcggggaaaagacggcggtcaagctgctcaagcaattcggcacggtcgaaaacgtgcttgcctccattgacgagatcaaaggcgaaaagttgaaagaaacgctgcgccaacaccgggagatggcgctgttaagcaaaaagctcgccgccattcgccgcgacgccccggtcgagctctcgcttgatgacatcgtctatcaaggggaagaccgggagaaagtggtcgctttatttaaagagcttgggtttcaatcgtttttagagaaaatggaatcgccgtcatcagaagaggaaaaaccgcttgccaagatggcatttacgcttgctgaccgcgtgacggaggagatgcttgccgacaaggcggcgcttgtcgttgaagtggtcgaggaaaattatcatgatgcgccgatcgtcggcatcgctgtggtcaacgaacatggacggtttttcctgcgcccggagacggcgcttgccgatccgcagtttgtcgcctggcttggtgatgaaacgaagaaaaaaagcatgtttgactcaaagcgcgcggcagtcgccttgaaatggaaaggaattgagctatgcggcgtttcctttgatttattgctggccgcctatttgcttgatccggcgcaaggtgttgatgatgtggctgccgcagcaaaaatgaagcaatacgaagcggtgcgctcggatgaagcggtgtatggcaaaggggcgaagcgggccgtgccggatgagccagtgctcgccgagcatctcgtccgcaaggcggcggcgatttgggcgctcgaacgtccgtttttggatgagctgcgccgcaacgaacaagatcggttgctcgtcgagctcgagcagccgttgtcttcgattttggcggaaatggaatttgccggagtgaaagtggatacgaagcggctcgaacagatgggcgaagagctcgccgagcagctgcgcacggtcgagcagcgcatttatgagctcgccggccaagaattcaacatcaattcaccgaaacagctcggcgtcattttatttgaaaaactgcagctgcccgtcttgaaaaaaacgaaaaccggctactccacttcggcggatgtgcttgaaaaacttgcgccttatcacgagatcgtggaaaacattttgcattaccgccagcttggcaagttgcagtcgacgtatattgaaggattgctgaaagtcgtgcgacccgatacaaagaaggtgcatacgattttcaatcaggcgttgacgcaaaccggacggctcagctcgacggagccgaacttgcaaaacattccgattcggcttgaggaaggacggaaaatccgccaagcgttcgtgccgtcggagtctgattggctcattttcgctgccgactactcgcaaattgagttgcgcgtcctcgcccatattgcggaagatgacaatttaatggaagcgttccgccgcgatttggatatccatacgaaaacagcgatggacattttccaagtgagcgaggacgaagtgacgcccaacatgcgccgtcaggcgaaggcggtcaactttgggatcgtttacgggatcagtgattacggcttggcgcaaaacttaaatatttcacgcaaagaggccgctgaattcatcgagcgctacttcgaaagcttccctggcgtgaagcggtatatggaaaacattgtgcaagaagcaaaacagaaagggtatgtgacgacgctgctgcatcggcgccgctatcctccggatatcacgagccgcaacttcaacgtccgcagctttgctgaacggatggcgatgaacacgccgattcaagggagcgccgctgacattattaaaaaggcgatgatcgatctgaacgctagactgaaggaagagcggctgcaagcgcgccttttgctacaggtgcatgacgagctcattttggaggcgccgaaagaagagatggagcggctgtgccggctcgttccggaagtgatggagcaagcggtcacacttcgcgtgccgctcaaagtcgattaccattatggctcgacgtggtatgacgcgaaataaaaaggatcc

SEQ ID NO: 2324 - DNA, 2712 bp, Artificial Sequence
  Description of Artificial Sequence: Synthetic DNA sequence of Bacillus caldolyticus EA1 DNA polymerase L797M
atgaaatacctgctgccgaccgctgctgctggtctgctgctcctcgctgcccagccggcgatggccatgggattgaaaaaaaagcttgttttaatcgacggcagcagcgtggcgtaccgcgcctttttcgccttgccgcttttgcataacgacaaaggcatccatacgaacgccgtctacgggtttacgatgatgttgaataaaattttggcggaagaagagccaactcatatgcttgtcgcgtttgacgccgggaaaacgacgttccggcatgaagcgtttcaagagtataaaggtgggcgccagcagacgccaccggagctgtcggagcagtttccgctgttgcgcgagctgctgagggcgtatcgcatccccgcctatgaactcgagaactacgaagcggacgatattatcggaacgcttgccgcccgcgctgagcaggaagggtttgaggtgaaagtcatttccggcgaccgcgatctgacccagctcgcctccccccatgtgacggtggacattacgaaaaaagggattaccgatatcgaaccgtacacgccggaggcggtccgcgaaaaatacggcttaactccggaacaaatcgttgatttgaaaggattgatgggcgacaaatcggacaacattcccggagtgccgggcatcggggaaaagacggcggtcaagctgctcaagcaattcggcacggtcgaaaacgtgcttgcctccattgacgagatcaaaggcgaaaagttgaaagaaacgctgcgccaacaccgggagatggcgctgttaagcaaaaagctcgccgccattcgccgcgacgccccggtcgagctctcgcttgatgacatcgtctatcaaggggaagaccgggagaaagtggtcgctttatttaaagagcttgggtttcaatcgtttttagagaaaatggaatcgccgtcatcagaagaggaaaaaccgcttgccaagatggcatttacgcttgctgaccgcgtgacggaggagatgcttgccgacaaggcggcgcttgtcgttgaagtggtcgaggaaaattatcatgatgcgccgatcgtcggcatcgctgtggtcaacgaacatggacggtttttcctgcgcccggagacggcgcttgccgatccgcagtttgtcgcctggcttggtgatgaaacgaagaaaaaaagcatgtttgactcaaagcgcgcggcagtcgccttgaaatggaaaggaattgagctatgcggcgtttcctttgatttattgctggccgcctatttgcttgatccggcgcaaggtgttgatgatgtggctgccgcagcaaaaatgaagcaatacgaagcggtgcgctcggatgaagcggtgtatggcaaaggggcgaagcgggccgtgccggatgagccagtgctcgccgagcatctcgtccgcaaggcggcggcgatttgggcgctcgaacgtccgtttttggatgagctgcgccgcaacgaacaagatcggttgctcgtcgagctcgagcagccgttgtcttcgattttggcggaaatggaatttgccggagtgaaagtggatacgaagcggctcgaacagatgggcgaagagctcgccgagcagctgcgcacggtcgagcagcgcatttatgagctcgccggccaagaattcaacatcaattcaccgaaacagctcggcgtcattttatttgaaaaactgcagctgcccgtcttgaaaaaaacgaaaaccggctactccacttcggcggatgtgcttgaaaaacttgcgccttatcacgagatcgtggaaaacattttgcattaccgccagcttggcaagttgcagtcgacgtatattgaaggattgctgaaagtcgtgcgacccgatacaaagaaggtgcatacgattttcaatcaggcgttgacgcaaaccggacggctcagctcgacggagccgaacttgcaaaacattccgattcggcttgaggaaggacggaaaatccgccaagcgttcgtgccgtcggagtctgattggctcattttcgctgccgactactcgcaaattgagttgcgcgtcctcgcccatattgcggaagatgacaatttaatggaagcgttccgccgcgatttggatatccatacgaaaacagcgatggacattttccaagtgagcgaggacgaagtgacgcccaacatgcgccgtcaggcgaaggcggtcaactttgggatcgtttacgggatcagtgattacggcttggcgcaaaacttaaatatttcacgcaaagaggccgctgaattcatcgagcgctacttcgaaagcttccctggcgtgaagcggtatatggaaaacattgtgcaagaagcaaaacagaaagggtatgtgacgacgctgctgcatcggcgccgctatatgccggatatcacgagccgcaacttcaacgtccgcagctttgctgaacggatggcgatgaacacgccgattcaagggagcgccgctgacattattaaaaaggcgatgatcgatctgaacgctagactgaaggaagagcggctgcaagcgcgccttttgctacaggtgcatgacgagctcattttggaggcgccgaaagaagagatggagcggctgtgccggctcgttccggaagtgatggagcaagcggtcacacttcgcgtgccgctcaaagtcgattaccattatggctcgacgtggtatgacgcgaaataaaaaggatcc

SEQ ID NO: 2325 - DNA, 2712 bp, Artificial Sequence
  Description of Artificial Sequence: Synthetic DNA sequence of Bacillus caldolyticus EA1 DNA polymerase L797T
atgaaatacctgctgccgaccgctgctgctggtctgctgctcctcgctgcccagccggcgatggccatgggattgaaaaaaaagcttgttttaatcgacggcagcagcgtggcgtaccgcgcctttttcgccttgccgcttttgcataacgacaaaggcatccatacgaacgccgtctacgggtttacgatgatgttgaataaaattttggcggaagaagagccaactcatatgcttgtcgcgtttgacgccgggaaaacgacgttccggcatgaagcgtttcaagagtataaaggtgggcgccagcagacgccaccggagctgtcggagcagtttccgctgttgcgcgagctgctgagggcgtatcgcatccccgcctatgaactcgagaactacgaagcggacgatattatcggaacgcttgccgcccgcgctgagcaggaagggtttgaggtgaaagtcatttccggcgaccgcgatctgacccagctcgcctccccccatgtgacggtggacattacgaaaaaagggattaccgatatcgaaccgtacacgccggaggcggtccgcgaaaaatacggcttaactccggaacaaatcgttgatttgaaaggattgatgggcgacaaatcggacaacattcccggagtgccgggcatcggggaaaagacggcggtcaagctgctcaagcaattcggcacggtcgaaaacgtgcttgcctccattgacgagatcaaaggcgaaaagttgaaagaaacgctgcgccaacaccgggagatggcgctgttaagcaaaaagctcgccgccattcgccgcgacgccccggtcgagctctcgcttgatgacatcgtctatcaaggggaagaccgggagaaagtggtcgctttatttaaagagcttgggtttcaatcgtttttagagaaaatggaatcgccgtcatcagaagaggaaaaaccgcttgccaagatggcatttacgcttgctgaccgcgtgacggaggagatgcttgccgacaaggcggcgcttgtcgttgaagtggtcgaggaaaattatcatgatgcgccgatcgtcggcatcgctgtggtcaacgaacatggacggtttttcctgcgcccggagacggcgcttgccgatccgcagtttgtcgcctggcttggtgatgaaacgaagaaaaaaagcatgtttgactcaaagcgcgcggcagtcgccttgaaatggaaaggaattgagctatgcggcgtttcctttgatttattgctggccgcctatttgcttgatccggcgcaaggtgttgatgatgtggctgccgcagcaaaaatgaagcaatacgaagcggtgcgctcggatgaagcggtgtatggcaaaggggcgaagcgggccgtgccggatgagccagtgctcgccgagcatctcgtccgcaaggcggcggcgatttgggcgctcgaacgtccgtttttggatgagctgcgccgcaacgaacaagatcggttgctcgtcgagctcgagcagccgttgtcttcgattttggcggaaatggaatttgccggagtgaaagtggatacgaagcggctcgaacagatgggcgaagagctcgccgagcagctgcgcacggtcgagcagcgcatttatgagctcgccggccaagaattcaacatcaattcaccgaaacagctcggcgtcattttatttgaaaaactgcagctgcccgtcttgaaaaaaacgaaaaccggctactccacttcggcggatgtgcttgaaaaacttgcgccttatcacgagatcgtggaaaacattttgcattaccgccagcttggcaagttgcagtcgacgtatattgaaggattgctgaaagtcgtgcgacccgatacaaagaaggtgcatacgattttcaatcaggcgttgacgcaaaccggacggctcagctcgacggagccgaacttgcaaaacattccgattcggcttgaggaaggacggaaaatccgccaagcgttcgtgccgtcggagtctgattggctcattttcgctgccgactactcgcaaattgagttgcgcgtcctcgcccatattgcggaagatgacaatttaatggaagcgttccgccgcgatttggatatccatacgaaaacagcgatggacattttccaagtgagcgaggacgaagtgacgcccaacatgcgccgtcaggcgaaggcggtcaactttgggatcgtttacgggatcagtgattacggcttggcgcaaaacttaaatatttcacgcaaagaggccgctgaattcatcgagcgctacttcgaaagcttccctggcgtgaagcggtatatggaaaacattgtgcaagaagcaaaacagaaagggtatgtgacgacgctgctgcatcggcgccgctatactccggatatcacgagccgcaacttcaacgtccgcagctttgctgaacggatggcgatgaacacgccgattcaagggagcgccgctgacattattaaaaaggcgatgatcgatctgaacgctagactgaaggaagagcggctgcaagcgcgccttttgctacaggtgcatgacgagctcattttggaggcgccgaaagaagagatggagcggctgtgccggctcgttccggaagtgatggagcaagcggtcacacttcgcgtgccgctcaaagtcgattaccattatggctcgacgtggtatgacgcgaaataaaaaggatcc

SEQ ID NO: 2326 - DNA, 2712 bp, Artificial Sequence
  Description of Artificial Sequence: Synthetic DNA sequence of Bacillus caldolyticus EA1 DNA polymerase L797N
atgaaatacctgctgccgaccgctgctgctggtctgctgctcctcgctgcccagccggcgatggccatgggattgaaaaaaaagcttgttttaatcgacggcagcagcgtggcgtaccgcgcctttttcgccttgccgcttttgcataacgacaaaggcatccatacgaacgccgtctacgggtttacgatgatgttgaataaaattttggcggaagaagagccaactcatatgcttgtcgcgtttgacgccgggaaaacgacgttccggcatgaagcgtttcaagagtataaaggtgggcgccagcagacgccaccggagctgtcggagcagtttccgctgttgcgcgagctgctgagggcgtatcgcatccccgcctatgaactcgagaactacgaagcggacgatattatcggaacgcttgccgcccgcgctgagcaggaagggtttgaggtgaaagtcatttccggcgaccgcgatctgacccagctcgcctccccccatgtgacggtggacattacgaaaaaagggattaccgatatcgaaccgtacacgccggaggcggtccgcgaaaaatacggcttaactccggaacaaatcgttgatttgaaaggattgatgggcgacaaatcggacaacattcccggagtgccgggcatcggggaaaagacggcggtcaagctgctcaagcaattcggcacggtcgaaaacgtgcttgcctccattgacgagatcaaaggcgaaaagttgaaagaaacgctgcgccaacaccgggagatggcgctgttaagcaaaaagctcgccgccattcgccgcgacgccccggtcgagctctcgcttgatgacatcgtctatcaaggggaagaccgggagaaagtggtcgctttatttaaagagcttgggtttcaatcgtttttagagaaaatggaatcgccgtcatcagaagaggaaaaaccgcttgccaagatggcatttacgcttgctgaccgcgtgacggaggagatgcttgccgacaaggcggcgcttgtcgttgaagtggtcgaggaaaattatcatgatgcgccgatcgtcggcatcgctgtggtcaacgaacatggacggtttttcctgcgcccggagacggcgcttgccgatccgcagtttgtcgcctggcttggtgatgaaacgaagaaaaaaagcatgtttgactcaaagcgcgcggcagtcgccttgaaatggaaaggaattgagctatgcggcgtttcctttgatttattgctggccgcctatttgcttgatccggcgcaaggtgttgatgatgtggctgccgcagcaaaaatgaagcaatacgaagcggtgcgctcggatgaagcggtgtatggcaaaggggcgaagcgggccgtgccggatgagccagtgctcgccgagcatctcgtccgcaaggcggcggcgatttgggcgctcgaacgtccgtttttggatgagctgcgccgcaacgaacaagatcggttgctcgtcgagctcgagcagccgttgtcttcgattttggcggaaatggaatttgccggagtgaaagtggatacgaagcggctcgaacagatgggcgaagagctcgccgagcagctgcgcacggtcgagcagcgcatttatgagctcgccggccaagaattcaacatcaattcaccgaaacagctcggcgtcattttatttgaaaaactgcagctgcccgtcttgaaaaaaacgaaaaccggctactccacttcggcggatgtgcttgaaaaacttgcgccttatcacgagatcgtggaaaacattttgcattaccgccagcttggcaagttgcagtcgacgtatattgaaggattgctgaaagtcgtgcgacccgatacaaagaaggtgcatacgattttcaatcaggcgttgacgcaaaccggacggctcagctcgacggagccgaacttgcaaaacattccgattcggcttgaggaaggacggaaaatccgccaagcgttcgtgccgtcggagtctgattggctcattttcgctgccgactactcgcaaattgagttgcgcgtcctcgcccatattgcggaagatgacaatttaatggaagcgttccgccgcgatttggatatccatacgaaaacagcgatggacattttccaagtgagcgaggacgaagtgacgcccaacatgcgccgtcaggcgaaggcggtcaactttgggatcgtttacgggatcagtgattacggcttggcgcaaaacttaaatatttcacgcaaagaggccgctgaattcatcgagcgctacttcgaaagcttccctggcgtgaagcggtatatggaaaacattgtgcaagaagcaaaacagaaagggtatgtgacgacgctgctgcatcggcgccgctataatccggatatcacgagccgcaacttcaacgtccgcagctttgctgaacggatggcgatgaacacgccgattcaagggagcgccgctgacattattaaaaaggcgatgatcgatctgaacgctagactgaaggaagagcggctgcaagcgcgccttttgctacaggtgcatgacgagctcattttggaggcgccgaaagaagagatggagcggctgtgccggctcgttccggaagtgatggagcaagcggtcacacttcgcgtgccgctcaaagtcgattaccattatggctcgacgtggtatgacgcgaaataaaaaggatcc

SEQ ID NO: 2327 - DNA, 2712 bp, Artificial Sequence
  Description of Artificial Sequence: Synthetic DNA sequence of Bacillus caldolyticus EA1 DNA polymerase L797V
atgaaatacctgctgccgaccgctgctgctggtctgctgctcctcgctgcccagccggcgatggccatgggattgaaaaaaaagcttgttttaatcgacggcagcagcgtggcgtaccgcgcctttttcgccttgccgcttttgcataacgacaaaggcatccatacgaacgccgtctacgggtttacgatgatgttgaataaaattttggcggaagaagagccaactcatatgcttgtcgcgtttgacgccgggaaaacgacgttccggcatgaagcgtttcaagagtataaaggtgggcgccagcagacgccaccggagctgtcggagcagtttccgctgttgcgcgagctgctgagggcgtatcgcatccccgcctatgaactcgagaactacgaagcggacgatattatcggaacgcttgccgcccgcgctgagcaggaagggtttgaggtgaaagtcatttccggcgaccgcgatctgacccagctcgcctccccccatgtgacggtggacattacgaaaaaagggattaccgatatcgaaccgtacacgccggaggcggtccgcgaaaaatacggcttaactccggaacaaatcgttgatttgaaaggattgatgggcgacaaatcggacaacattcccggagtgccgggcatcggggaaaagacggcggtcaagctgctcaagcaattcggcacggtcgaaaacgtgcttgcctccattgacgagatcaaaggcgaaaagttgaaagaaacgctgcgccaacaccgggagatggcgctgttaagcaaaaagctcgccgccattcgccgcgacgccccggtcgagctctcgcttgatgacatcgtctatcaaggggaagaccgggagaaagtggtcgctttatttaaagagcttgggtttcaatcgtttttagagaaaatggaatcgccgtcatcagaagaggaaaaaccgcttgccaagatggcatttacgcttgctgaccgcgtgacggaggagatgcttgccgacaaggcggcgcttgtcgttgaagtggtcgaggaaaattatcatgatgcgccgatcgtcggcatcgctgtggtcaacgaacatggacggtttttcctgcgcccggagacggcgcttgccgatccgcagtttgtcgcctggcttggtgatgaaacgaagaaaaaaagcatgtttgactcaaagcgcgcggcagtcgccttgaaatggaaaggaattgagctatgcggcgtttcctttgatttattgctggccgcctatttgcttgatccggcgcaaggtgttgatgatgtggctgccgcagcaaaaatgaagcaatacgaagcggtgcgctcggatgaagcggtgtatggcaaaggggcgaagcgggccgtgccggatgagccagtgctcgccgagcatctcgtccgcaaggcggcggcgatttgggcgctcgaacgtccgtttttggatgagctgcgccgcaacgaacaagatcggttgctcgtcgagctcgagcagccgttgtcttcgattttggcggaaatggaatttgccggagtgaaagtggatacgaagcggctcgaacagatgggcgaagagctcgccgagcagctgcgcacggtcgagcagcgcatttatgagctcgccggccaagaattcaacatcaattcaccgaaacagctcggcgtcattttatttgaaaaactgcagctgcccgtcttgaaaaaaacgaaaaccggctactccacttcggcggatgtgcttgaaaaacttgcgccttatcacgagatcgtggaaaacattttgcattaccgccagcttggcaagttgcagtcgacgtatattgaaggattgctgaaagtcgtgcgacccgatacaaagaaggtgcatacgattttcaatcaggcgttgacgcaaaccggacggctcagctcgacggagccgaacttgcaaaacattccgattcggcttgaggaaggacggaaaatccgccaagcgttcgtgccgtcggagtctgattggctcattttcgctgccgactactcgcaaattgagttgcgcgtcctcgcccatattgcggaagatgacaatttaatggaagcgttccgccgcgatttggatatccatacgaaaacagcgatggacattttccaagtgagcgaggacgaagtgacgcccaacatgcgccgtcaggcgaaggcggtcaactttgggatcgtttacgggatcagtgattacggcttggcgcaaaacttaaatatttcacgcaaagaggccgctgaattcatcgagcgctacttcgaaagcttccctggcgtgaagcggtatatggaaaacattgtgcaagaagcaaaacagaaagggtatgtgacgacgctgctgcatcggcgccgctatgtcccggatatcacgagccgcaacttcaacgtccgcagctttgctgaacggatggcgatgaacacgccgattcaagggagcgccgctgacattattaaaaaggcgatgatcgatctgaacgctagactgaaggaagagcggctgcaagcgcgccttttgctacaggtgcatgacgagctcattttggaggcgccgaaagaagagatggagcggctgtgccggctcgttccggaagtgatggagcaagcggtcacacttcgcgtgccgctcaaagtcgattaccattatggctcgacgtggtatgacgcgaaataaaaaggatcc

SEQ ID NO: 2328 - DNA, 2712 bp, Artificial Sequence
  Description of Artificial Sequence: Synthetic DNA sequence of Bacillus caldolyticus EA1 DNA polymerase P798A
atgaaatacctgctgccgaccgctgctgctggtctgctgctcctcgctgcccagccggcgatggccatgggattgaaaaaaaagcttgttttaatcgacggcagcagcgtggcgtaccgcgcctttttcgccttgccgcttttgcataacgacaaaggcatccatacgaacgccgtctacgggtttacgatgatgttgaataaaattttggcggaagaagagccaactcatatgcttgtcgcgtttgacgccgggaaaacgacgttccggcatgaagcgtttcaagagtataaaggtgggcgccagcagacgccaccggagctgtcggagcagtttccgctgttgcgcgagctgctgagggcgtatcgcatccccgcctatgaactcgagaactacgaagcggacgatattatcggaacgcttgccgcccgcgctgagcaggaagggtttgaggtgaaagtcatttccggcgaccgcgatctgacccagctcgcctccccccatgtgacggtggacattacgaaaaaagggattaccgatatcgaaccgtacacgccggaggcggtccgcgaaaaatacggcttaactccggaacaaatcgttgatttgaaaggattgatgggcgacaaatcggacaacattcccggagtgccgggcatcggggaaaagacggcggtcaagctgctcaagcaattcggcacggtcgaaaacgtgcttgcctccattgacgagatcaaaggcgaaaagttgaaagaaacgctgcgccaacaccgggagatggcgctgttaagcaaaaagctcgccgccattcgccgcgacgccccggtcgagctctcgcttgatgacatcgtctatcaaggggaagaccgggagaaagtggtcgctttatttaaagagcttgggtttcaatcgtttttagagaaaatggaatcgccgtcatcagaagaggaaaaaccgcttgccaagatggcatttacgcttgctgaccgcgtgacggaggagatgcttgccgacaaggcggcgcttgtcgttgaagtggtcgaggaaaattatcatgatgcgccgatcgtcggcatcgctgtggtcaacgaacatggacggtttttcctgcgcccggagacggcgcttgccgatccgcagtttgtcgcctggcttggtgatgaaacgaagaaaaaaagcatgtttgactcaaagcgcgcggcagtcgccttgaaatggaaaggaattgagctatgcggcgtttcctttgatttattgctggccgcctatttgcttgatccggcgcaaggtgttgatgatgtggctgccgcagcaaaaatgaagcaatacgaagcggtgcgctcggatgaagcggtgtatggcaaaggggcgaagcgggccgtgccggatgagccagtgctcgccgagcatctcgtccgcaaggcggcggcgatttgggcgctcgaacgtccgtttttggatgagctgcgccgcaacgaacaagatcggttgctcgtcgagctcgagcagccgttgtcttcgattttggcggaaatggaatttgccggagtgaaagtggatacgaagcggctcgaacagatgggcgaagagctcgccgagcagctgcgcacggtcgagcagcgcatttatgagctcgccggccaagaattcaacatcaattcaccgaaacagctcggcgtcattttatttgaaaaactgcagctgcccgtcttgaaaaaaacgaaaaccggctactccacttcggcggatgtgcttgaaaaacttgcgccttatcacgagatcgtggaaaacattttgcattaccgccagcttggcaagttgcagtcgacgtatattgaaggattgctgaaagtcgtgcgacccgatacaaagaaggtgcatacgattttcaatcaggcgttgacgcaaaccggacggctcagctcgacggagccgaacttgcaaaacattccgattcggcttgaggaaggacggaaaatccgccaagcgttcgtgccgtcggagtctgattggctcattttcgctgccgactactcgcaaattgagttgcgcgtcctcgcccatattgcggaagatgacaatttaatggaagcgttccgccgcgatttggatatccatacgaaaacagcgatggacattttccaagtgagcgaggacgaagtgacgcccaacatgcgccgtcaggcgaaggcggtcaactttgggatcgtttacgggatcagtgattacggcttggcgcaaaacttaaatatttcacgcaaagaggccgctgaattcatcgagcgctacttcgaaagcttccctggcgtgaagcggtatatggaaaacattgtgcaagaagcaaaacagaaagggtatgtgacgacgctgctgcatcggcgccgctatttggctgatatcacgagccgcaacttcaacgtccgcagctttgctgaacggatggcgatgaacacgccgattcaagggagcgccgctgacattattaaaaaggcgatgatcgatctgaacgctagactgaaggaagagcggctgcaagcgcgccttttgctacaggtgcatgacgagctcattttggaggcgccgaaagaagagatggagcggctgtgccggctcgttccggaagtgatggagcaagcggtcacacttcgcgtgccgctcaaagtcgattaccattatggctcgacgtggtatgacgcgaaataaaaaggatcc

SEQ ID NO: 2329 - DNA, 2712 bp, Artificial Sequence
  Description of Artificial Sequence: Synthetic DNA sequence of Bacillus caldolyticus EA1 DNA polymerase P798R
atgaaatacctgctgccgaccgctgctgctggtctgctgctcctcgctgcccagccggcgatggccatgggattgaaaaaaaagcttgttttaatcgacggcagcagcgtggcgtaccgcgcctttttcgccttgccgcttttgcataacgacaaaggcatccatacgaacgccgtctacgggtttacgatgatgttgaataaaattttggcggaagaagagccaactcatatgcttgtcgcgtttgacgccgggaaaacgacgttccggcatgaagcgtttcaagagtataaaggtgggcgccagcagacgccaccggagctgtcggagcagtttccgctgttgcgcgagctgctgagggcgtatcgcatccccgcctatgaactcgagaactacgaagcggacgatattatcggaacgcttgccgcccgcgctgagcaggaagggtttgaggtgaaagtcatttccggcgaccgcgatctgacccagctcgcctccccccatgtgacggtggacattacgaaaaaagggattaccgatatcgaaccgtacacgccggaggcggtccgcgaaaaatacggcttaactccggaacaaatcgttgatttgaaaggattgatgggcgacaaatcggacaacattcccggagtgccgggcatcggggaaaagacggcggtcaagctgctcaagcaattcggcacggtcgaaaacgtgcttgcctccattgacgagatcaaaggcgaaaagttgaaagaaacgctgcgccaacaccgggagatggcgctgttaagcaaaaagctcgccgccattcgccgcgacgccccggtcgagctctcgcttgatgacatcgtctatcaaggggaagaccgggagaaagtggtcgctttatttaaagagcttgggtttcaatcgtttttagagaaaatggaatcgccgtcatcagaagaggaaaaaccgcttgccaagatggcatttacgcttgctgaccgcgtgacggaggagatgcttgccgacaaggcggcgcttgtcgttgaagtggtcgaggaaaattatcatgatgcgccgatcgtcggcatcgctgtggtcaacgaacatggacggtttttcctgcgcccggagacggcgcttgccgatccgcagtttgtcgcctggcttggtgatgaaacgaagaaaaaaagcatgtttgactcaaagcgcgcggcagtcgccttgaaatggaaaggaattgagctatgcggcgtttcctttgatttattgctggccgcctatttgcttgatccggcgcaaggtgttgatgatgtggctgccgcagcaaaaatgaagcaatacgaagcggtgcgctcggatgaagcggtgtatggcaaaggggcgaagcgggccgtgccggatgagccagtgctcgccgagcatctcgtccgcaaggcggcggcgatttgggcgctcgaacgtccgtttttggatgagctgcgccgcaacgaacaagatcggttgctcgtcgagctcgagcagccgttgtcttcgattttggcggaaatggaatttgccggagtgaaagtggatacgaagcggctcgaacagatgggcgaagagctcgccgagcagctgcgcacggtcgagcagcgcatttatgagctcgccggccaagaattcaacatcaattcaccgaaacagctcggcgtcattttatttgaaaaactgcagctgcccgtcttgaaaaaaacgaaaaccggctactccacttcggcggatgtgcttgaaaaacttgcgccttatcacgagatcgtggaaaacattttgcattaccgccagcttggcaagttgcagtcgacgtatattgaaggattgctgaaagtcgtgcgacccgatacaaagaaggtgcatacgattttcaatcaggcgttgacgcaaaccggacggctcagctcgacggagccgaacttgcaaaacattccgattcggcttgaggaaggacggaaaatccgccaagcgttcgtgccgtcggagtctgattggctcattttcgctgccgactactcgcaaattgagttgcgcgtcctcgcccatattgcggaagatgacaatttaatggaagcgttccgccgcgatttggatatccatacgaaaacagcgatggacattttccaagtgagcgaggacgaagtgacgcccaacatgcgccgtcaggcgaaggcggtcaactttgggatcgtttacgggatcagtgattacggcttggcgcaaaacttaaatatttcacgcaaagaggccgctgaattcatcgagcgctacttcgaaagcttccctggcgtgaagcggtatatggaaaacattgtgcaagaagcaaaacagaaagggtatgtgacgacgctgctgcatcggcgccgctatttgcgagatatcacgagccgcaacttcaacgtccgcagctttgctgaacggatggcgatgaacacgccgattcaagggagcgccgctgacattattaaaaaggcgatgatcgatctgaacgctagactgaaggaagagcggctgcaagcgcgccttttgctacaggtgcatgacgagctcattttggaggcgccgaaagaagagatggagcggctgtgccggctcgttccggaagtgatggagcaagcggtcacacttcgcgtgccgctcaaagtcgattaccattatggctcgacgtggtatgacgcgaaataaaaaggatcc

SEQ ID NO: 2330 - DNA, 2712 bp, Artificial Sequence
  Description of Artificial Sequence: Synthetic DNA sequence of Bacillus caldolyticus EA1 DNA polymerase P798C
atgaaatacctgctgccgaccgctgctgctggtctgctgctcctcgctgcccagccggcgatggccatgggattgaaaaaaaagcttgttttaatcgacggcagcagcgtggcgtaccgcgcctttttcgccttgccgcttttgcataacgacaaaggcatccatacgaacgccgtctacgggtttacgatgatgttgaataaaattttggcggaagaagagccaactcatatgcttgtcgcgtttgacgccgggaaaacgacgttccggcatgaagcgtttcaagagtataaaggtgggcgccagcagacgccaccggagctgtcggagcagtttccgctgttgcgcgagctgctgagggcgtatcgcatccccgcctatgaactcgagaactacgaagcggacgatattatcggaacgcttgccgcccgcgctgagcaggaagggtttgaggtgaaagtcatttccggcgaccgcgatctgacccagctcgcctccccccatgtgacggtggacattacgaaaaaagggattaccgatatcgaaccgtacacgccggaggcggtccgcgaaaaatacggcttaactccggaacaaatcgttgatttgaaaggattgatgggcgacaaatcggacaacattcccggagtgccgggcatcggggaaaagacggcggtcaagctgctcaagcaattcggcacggtcgaaaacgtgcttgcctccattgacgagatcaaaggcgaaaagttgaaagaaacgctgcgccaacaccgggagatggcgctgttaagcaaaaagctcgccgccattcgccgcgacgccccggtcgagctctcgcttgatgacatcgtctatcaaggggaagaccgggagaaagtggtcgctttatttaaagagcttgggtttcaatcgtttttagagaaaatggaatcgccgtcatcagaagaggaaaaaccgcttgccaagatggcatttacgcttgctgaccgcgtgacggaggagatgcttgccgacaaggcggcgcttgtcgttgaagtggtcgaggaaaattatcatgatgcgccgatcgtcggcatcgctgtggtcaacgaacatggacggtttttcctgcgcccggagacggcgcttgccgatccgcagtttgtcgcctggcttggtgatgaaacgaagaaaaaaagcatgtttgactcaaagcgcgcggcagtcgccttgaaatggaaaggaattgagctatgcggcgtttcctttgatttattgctggccgcctatttgcttgatccggcgcaaggtgttgatgatgtggctgccgcagcaaaaatgaagcaatacgaagcggtgcgctcggatgaagcggtgtatggcaaaggggcgaagcgggccgtgccggatgagccagtgctcgccgagcatctcgtccgcaaggcggcggcgatttgggcgctcgaacgtccgtttttggatgagctgcgccgcaacgaacaagatcggttgctcgtcgagctcgagcagccgttgtcttcgattttggcggaaatggaatttgccggagtgaaagtggatacgaagcggctcgaacagatgggcgaagagctcgccgagcagctgcgcacggtcgagcagcgcatttatgagctcgccggccaagaattcaacatcaattcaccgaaacagctcggcgtcattttatttgaaaaactgcagctgcccgtcttgaaaaaaacgaaaaccggctactccacttcggcggatgtgcttgaaaaacttgcgccttatcacgagatcgtggaaaacattttgcattaccgccagcttggcaagttgcagtcgacgtatattgaaggattgctgaaagtcgtgcgacccgatacaaagaaggtgcatacgattttcaatcaggcgttgacgcaaaccggacggctcagctcgacggagccgaacttgcaaaacattccgattcggcttgaggaaggacggaaaatccgccaagcgttcgtgccgtcggagtctgattggctcattttcgctgccgactactcgcaaattgagttgcgcgtcctcgcccatattgcggaagatgacaatttaatggaagcgttccgccgcgatttggatatccatacgaaaacagcgatggacattttccaagtgagcgaggacgaagtgacgcccaacatgcgccgtcaggcgaaggcggtcaactttgggatcgtttacgggatcagtgattacggcttggcgcaaaacttaaatatttcacgcaaagaggccgctgaattcatcgagcgctacttcgaaagcttccctggcgtgaagcggtatatggaaaacattgtgcaagaagcaaaacagaaagggtatgtgacgacgctgctgcatcggcgccgctatttgtgtgatatcacgagccgcaacttcaacgtccgcagctttgctgaacggatggcgatgaacacgccgattcaagggagcgccgctgacattattaaaaaggcgatgatcgatctgaacgctagactgaaggaagagcggctgcaagcgcgccttttgctacaggtgcatgacgagctcattttggaggcgccgaaagaagagatggagcggctgtgccggctcgttccggaagtgatggagcaagcggtcacacttcgcgtgccgctcaaagtcgattaccattatggctcgacgtggtatgacgcgaaataaaaaggatcc

SEQ ID NO: 2331 - DNA, 2712 bp, Artificial Sequence
  Description of Artificial Sequence: Synthetic DNA sequence of Bacillus caldolyticus EA1 DNA polymerase P798G
atgaaatacctgctgccgaccgctgctgctggtctgctgctcctcgctgcccagccggcgatggccatgggattgaaaaaaaagcttgttttaatcgacggcagcagcgtggcgtaccgcgcctttttcgccttgccgcttttgcataacgacaaaggcatccatacgaacgccgtctacgggtttacgatgatgttgaataaaattttggcggaagaagagccaactcatatgcttgtcgcgtttgacgccgggaaaacgacgttccggcatgaagcgtttcaagagtataaaggtgggcgccagcagacgccaccggagctgtcggagcagtttccgctgttgcgcgagctgctgagggcgtatcgcatccccgcctatgaactcgagaactacgaagcggacgatattatcggaacgcttgccgcccgcgctgagcaggaagggtttgaggtgaaagtcatttccggcgaccgcgatctgacccagctcgcctccccccatgtgacggtggacattacgaaaaaagggattaccgatatcgaaccgtacacgccggaggcggtccgcgaaaaatacggcttaactccggaacaaatcgttgatttgaaaggattgatgggcgacaaatcggacaacattcccggagtgccgggcatcggggaaaagacggcggtcaagctgctcaagcaattcggcacggtcgaaaacgtgcttgcctccattgacgagatcaaaggcgaaaagttgaaagaaacgctgcgccaacaccgggagatggcgctgttaagcaaaaagctcgccgccattcgccgcgacgccccggtcgagctctcgcttgatgacatcgtctatcaaggggaagaccgggagaaagtggtcgctttatttaaagagcttgggtttcaatcgtttttagagaaaatggaatcgccgtcatcagaagaggaaaaaccgcttgccaagatggcatttacgcttgctgaccgcgtgacggaggagatgcttgccgacaaggcggcgcttgtcgttgaagtggtcgaggaaaattatcatgatgcgccgatcgtcggcatcgctgtggtcaacgaacatggacggtttttcctgcgcccggagacggcgcttgccgatccgcagtttgtcgcctggcttggtgatgaaacgaagaaaaaaagcatgtttgactcaaagcgcgcggcagtcgccttgaaatggaaaggaattgagctatgcggcgtttcctttgatttattgctggccgcctatttgcttgatccggcgcaaggtgttgatgatgtggctgccgcagcaaaaatgaagcaatacgaagcggtgcgctcggatgaagcggtgtatggcaaaggggcgaagcgggccgtgccggatgagccagtgctcgccgagcatctcgtccgcaaggcggcggcgatttgggcgctcgaacgtccgtttttggatgagctgcgccgcaacgaacaagatcggttgctcgtcgagctcgagcagccgttgtcttcgattttggcggaaatggaatttgccggagtgaaagtggatacgaagcggctcgaacagatgggcgaagagctcgccgagcagctgcgcacggtcgagcagcgcatttatgagctcgccggccaagaattcaacatcaattcaccgaaacagctcggcgtcattttatttgaaaaactgcagctgcccgtcttgaaaaaaacgaaaaccggctactccacttcggcggatgtgcttgaaaaacttgcgccttatcacgagatcgtggaaaacattttgcattaccgccagcttggcaagttgcagtcgacgtatattgaaggattgctgaaagtcgtgcgacccgatacaaagaaggtgcatacgattttcaatcaggcgttgacgcaaaccggacggctcagctcgacggagccgaacttgcaaaacattccgattcggcttgaggaaggacggaaaatccgccaagcgttcgtgccgtcggagtctgattggctcattttcgctgccgactactcgcaaattgagttgcgcgtcctcgcccatattgcggaagatgacaatttaatggaagcgttccgccgcgatttggatatccatacgaaaacagcgatggacattttccaagtgagcgaggacgaagtgacgcccaacatgcgccgtcaggcgaaggcggtcaactttgggatcgtttacgggatcagtgattacggcttggcgcaaaacttaaatatttcacgcaaagaggccgctgaattcatcgagcgctacttcgaaagcttccctggcgtgaagcggtatatggaaaacattgtgcaagaagcaaaacagaaagggtatgtgacgacgctgctgcatcggcgccgctatttgggtgatatcacgagccgcaacttcaacgtccgcagctttgctgaacggatggcgatgaacacgccgattcaagggagcgccgctgacattattaaaaaggcgatgatcgatctgaacgctagactgaaggaagagcggctgcaagcgcgccttttgctacaggtgcatgacgagctcattttggaggcgccgaaagaagagatggagcggctgtgccggctcgttccggaagtgatggagcaagcggtcacacttcgcgtgccgctcaaagtcgattaccattatggctcgacgtggtatgacgcgaaataaaaaggatcc

SEQ ID NO: 2332 - DNA, 2712 bp, Artificial Sequence
  Description of Artificial Sequence: Synthetic DNA sequence of Bacillus caldolyticus EA1 DNA polymerase P798Q
atgaaatacctgctgccgaccgctgctgctggtctgctgctcctcgctgcccagccggcgatggccatgggattgaaaaaaaagcttgttttaatcgacggcagcagcgtggcgtaccgcgcctttttcgccttgccgcttttgcataacgacaaaggcatccatacgaacgccgtctacgggtttacgatgatgttgaataaaattttggcggaagaagagccaactcatatgcttgtcgcgtttgacgccgggaaaacgacgttccggcatgaagcgtttcaagagtataaaggtgggcgccagcagacgccaccggagctgtcggagcagtttccgctgttgcgcgagctgctgagggcgtatcgcatccccgcctatgaactcgagaactacgaagcggacgatattatcggaacgcttgccgcccgcgctgagcaggaagggtttgaggtgaaagtcatttccggcgaccgcgatctgacccagctcgcctccccccatgtgacggtggacattacgaaaaaagggattaccgatatcgaaccgtacacgccggaggcggtccgcgaaaaatacggcttaactccggaacaaatcgttgatttgaaaggattgatgggcgacaaatcggacaacattcccggagtgccgggcatcggggaaaagacggcggtcaagctgctcaagcaattcggcacggtcgaaaacgtgcttgcctccattgacgagatcaaaggcgaaaagttgaaagaaacgctgcgccaacaccgggagatggcgctgttaagcaaaaagctcgccgccattcgccgcgacgccccggtcgagctctcgcttgatgacatcgtctatcaaggggaagaccgggagaaagtggtcgctttatttaaagagcttgggtttcaatcgtttttagagaaaatggaatcgccgtcatcagaagaggaaaaaccgcttgccaagatggcatttacgcttgctgaccgcgtgacggaggagatgcttgccgacaaggcggcgcttgtcgttgaagtggtcgaggaaaattatcatgatgcgccgatcgtcggcatcgctgtggtcaacgaacatggacggtttttcctgcgcccggagacggcgcttgccgatccgcagtttgtcgcctggcttggtgatgaaacgaagaaaaaaagcatgtttgactcaaagcgcgcggcagtcgccttgaaatggaaaggaattgagctatgcggcgtttcctttgatttattgctggccgcctatttgcttgatccggcgcaaggtgttgatgatgtggctgccgcagcaaaaatgaagcaatacgaagcggtgcgctcggatgaagcggtgtatggcaaaggggcgaagcgggccgtgccggatgagccagtgctcgccgagcatctcgtccgcaaggcggcggcgatttgggcgctcgaacgtccgtttttggatgagctgcgccgcaacgaacaagatcggttgctcgtcgagctcgagcagccgttgtcttcgattttggcggaaatggaatttgccggagtgaaagtggatacgaagcggctcgaacagatgggcgaagagctcgccgagcagctgcgcacggtcgagcagcgcatttatgagctcgccggccaagaattcaacatcaattcaccgaaacagctcggcgtcattttatttgaaaaactgcagctgcccgtcttgaaaaaaacgaaaaccggctactccacttcggcggatgtgcttgaaaaacttgcgccttatcacgagatcgtggaaaacattttgcattaccgccagcttggcaagttgcagtcgacgtatattgaaggattgctgaaagtcgtgcgacccgatacaaagaaggtgcatacgattttcaatcaggcgttgacgcaaaccggacggctcagctcgacggagccgaacttgcaaaacattccgattcggcttgaggaaggacggaaaatccgccaagcgttcgtgccgtcggagtctgattggctcattttcgctgccgactactcgcaaattgagttgcgcgtcctcgcccatattgcggaagatgacaatttaatggaagcgttccgccgcgatttggatatccatacgaaaacagcgatggacattttccaagtgagcgaggacgaagtgacgcccaacatgcgccgtcaggcgaaggcggtcaactttgggatcgtttacgggatcagtgattacggcttggcgcaaaacttaaatatttcacgcaaagaggccgctgaattcatcgagcgctacttcgaaagcttccctggcgtgaagcggtatatggaaaacattgtgcaagaagcaaaacagaaagggtatgtgacgacgctgctgcatcggcgccgctatttgcaagatatcacgagccgcaacttcaacgtccgcagctttgctgaacggatggcgatgaacacgccgattcaagggagcgccgctgacattattaaaaaggcgatgatcgatctgaacgctagactgaaggaagagcggctgcaagcgcgccttttgctacaggtgcatgacgagctcattttggaggcgccgaaagaagagatggagcggctgtgccggctcgttccggaagtgatggagcaagcggtcacacttcgcgtgccgctcaaagtcgattaccattatggctcgacgtggtatgacgcgaaataaaaaggatcc

SEQ ID NO: 2333 - DNA, 2712 bp, Artificial Sequence
  Description of Artificial Sequence: Synthetic DNA sequence of Bacillus caldolyticus EA1 DNA polymerase P798H
atgaaatacctgctgccgaccgctgctgctggtctgctgctcctcgctgcccagccggcgatggccatgggattgaaaaaaaagcttgttttaatcgacggcagcagcgtggcgtaccgcgcctttttcgccttgccgcttttgcataacgacaaaggcatccatacgaacgccgtctacgggtttacgatgatgttgaataaaattttggcggaagaagagccaactcatatgcttgtcgcgtttgacgccgggaaaacgacgttccggcatgaagcgtttcaagagtataaaggtgggcgccagcagacgccaccggagctgtcggagcagtttccgctgttgcgcgagctgctgagggcgtatcgcatccccgcctatgaactcgagaactacgaagcggacgatattatcggaacgcttgccgcccgcgctgagcaggaagggtttgaggtgaaagtcatttccggcgaccgcgatctgacccagctcgcctccccccatgtgacggtggacattacgaaaaaagggattaccgatatcgaaccgtacacgccggaggcggtccgcgaaaaatacggcttaactccggaacaaatcgttgatttgaaaggattgatgggcgacaaatcggacaacattcccggagtgccgggcatcggggaaaagacggcggtcaagctgctcaagcaattcggcacggtcgaaaacgtgcttgcctccattgacgagatcaaaggcgaaaagttgaaagaaacgctgcgccaacaccgggagatggcgctgttaagcaaaaagctcgccgccattcgccgcgacgccccggtcgagctctcgcttgatgacatcgtctatcaaggggaagaccgggagaaagtggtcgctttatttaaagagcttgggtttcaatcgtttttagagaaaatggaatcgccgtcatcagaagaggaaaaaccgcttgccaagatggcatttacgcttgctgaccgcgtgacggaggagatgcttgccgacaaggcggcgcttgtcgttgaagtggtcgaggaaaattatcatgatgcgccgatcgtcggcatcgctgtggtcaacgaacatggacggtttttcctgcgcccggagacggcgcttgccgatccgcagtttgtcgcctggcttggtgatgaaacgaagaaaaaaagcatgtttgactcaaagcgcgcggcagtcgccttgaaatggaaaggaattgagctatgcggcgtttcctttgatttattgctggccgcctatttgcttgatccggcgcaaggtgttgatgatgtggctgccgcagcaaaaatgaagcaatacgaagcggtgcgctcggatgaagcggtgtatggcaaaggggcgaagcgggccgtgccggatgagccagtgctcgccgagcatctcgtccgcaaggcggcggcgatttgggcgctcgaacgtccgtttttggatgagctgcgccgcaacgaacaagatcggttgctcgtcgagctcgagcagccgttgtcttcgattttggcggaaatggaatttgccggagtgaaagtggatacgaagcggctcgaacagatgggcgaagagctcgccgagcagctgcgcacggtcgagcagcgcatttatgagctcgccggccaagaattcaacatcaattcaccgaaacagctcggcgtcattttatttgaaaaactgcagctgcccgtcttgaaaaaaacgaaaaccggctactccacttcggcggatgtgcttgaaaaacttgcgccttatcacgagatcgtggaaaacattttgcattaccgccagcttggcaagttgcagtcgacgtatattgaaggattgctgaaagtcgtgcgacccgatacaaagaaggtgcatacgattttcaatcaggcgttgacgcaaaccggacggctcagctcgacggagccgaacttgcaaaacattccgattcggcttgaggaaggacggaaaatccgccaagcgttcgtgccgtcggagtctgattggctcattttcgctgccgactactcgcaaattgagttgcgcgtcctcgcccatattgcggaagatgacaatttaatggaagcgttccgccgcgatttggatatccatacgaaaacagcgatggacattttccaagtgagcgaggacgaagtgacgcccaacatgcgccgtcaggcgaaggcggtcaactttgggatcgtttacgggatcagtgattacggcttggcgcaaaacttaaatatttcacgcaaagaggccgctgaattcatcgagcgctacttcgaaagcttccctggcgtgaagcggtatatggaaaacattgtgcaagaagcaaaacagaaagggtatgtgacgacgctgctgcatcggcgccgctatttgcatgatatcacgagccgcaacttcaacgtccgcagctttgctgaacggatggcgatgaacacgccgattcaagggagcgccgctgacattattaaaaaggcgatgatcgatctgaacgctagactgaaggaagagcggctgcaagcgcgccttttgctacaggtgcatgacgagctcattttggaggcgccgaaagaagagatggagcggctgtgccggctcgttccggaagtgatggagcaagcggtcacacttcgcgtgccgctcaaagtcgattaccattatggctcgacgtggtatgacgcgaaataaaaaggatcc

SEQ ID NO: 2334 - DNA, 2712 bp, Artificial Sequence
  Description of Artificial Sequence: Synthetic DNA sequence of Bacillus caldolyticus EA1 DNA polymerase P798I
atgaaatacctgctgccgaccgctgctgctggtctgctgctcctcgctgcccagccggcgatggccatgggattgaaaaaaaagcttgttttaatcgacggcagcagcgtggcgtaccgcgcctttttcgccttgccgcttttgcataacgacaaaggcatccatacgaacgccgtctacgggtttacgatgatgttgaataaaattttggcggaagaagagccaactcatatgcttgtcgcgtttgacgccgggaaaacgacgttccggcatgaagcgtttcaagagtataaaggtgggcgccagcagacgccaccggagctgtcggagcagtttccgctgttgcgcgagctgctgagggcgtatcgcatccccgcctatgaactcgagaactacgaagcggacgatattatcggaacgcttgccgcccgcgctgagcaggaagggtttgaggtgaaagtcatttccggcgaccgcgatctgacccagctcgcctccccccatgtgacggtggacattacgaaaaaagggattaccgatatcgaaccgtacacgccggaggcggtccgcgaaaaatacggcttaactccggaacaaatcgttgatttgaaaggattgatgggcgacaaatcggacaacattcccggagtgccgggcatcggggaaaagacggcggtcaagctgctcaagcaattcggcacggtcgaaaacgtgcttgcctccattgacgagatcaaaggcgaaaagttgaaagaaacgctgcgccaacaccgggagatggcgctgttaagcaaaaagctcgccgccattcgccgcgacgccccggtcgagctctcgcttgatgacatcgtctatcaaggggaagaccgggagaaagtggtcgctttatttaaagagcttgggtttcaatcgtttttagagaaaatggaatcgccgtcatcagaagaggaaaaaccgcttgccaagatggcatttacgcttgctgaccgcgtgacggaggagatgcttgccgacaaggcggcgcttgtcgttgaagtggtcgaggaaaattatcatgatgcgccgatcgtcggcatcgctgtggtcaacgaacatggacggtttttcctgcgcccggagacggcgcttgccgatccgcagtttgtcgcctggcttggtgatgaaacgaagaaaaaaagcatgtttgactcaaagcgcgcggcagtcgccttgaaatggaaaggaattgagctatgcggcgtttcctttgatttattgctggccgcctatttgcttgatccggcgcaaggtgttgatgatgtggctgccgcagcaaaaatgaagcaatacgaagcggtgcgctcggatgaagcggtgtatggcaaaggggcgaagcgggccgtgccggatgagccagtgctcgccgagcatctcgtccgcaaggcggcggcgatttgggcgctcgaacgtccgtttttggatgagctgcgccgcaacgaacaagatcggttgctcgtcgagctcgagcagccgttgtcttcgattttggcggaaatggaatttgccggagtgaaagtggatacgaagcggctcgaacagatgggcgaagagctcgccgagcagctgcgcacggtcgagcagcgcatttatgagctcgccggccaagaattcaacatcaattcaccgaaacagctcggcgtcattttatttgaaaaactgcagctgcccgtcttgaaaaaaacgaaaaccggctactccacttcggcggatgtgcttgaaaaacttgcgccttatcacgagatcgtggaaaacattttgcattaccgccagcttggcaagttgcagtcgacgtatattgaaggattgctgaaagtcgtgcgacccgatacaaagaaggtgcatacgattttcaatcaggcgttgacgcaaaccggacggctcagctcgacggagccgaacttgcaaaacattccgattcggcttgaggaaggacggaaaatccgccaagcgttcgtgccgtcggagtctgattggctcattttcgctgccgactactcgcaaattgagttgcgcgtcctcgcccatattgcggaagatgacaatttaatggaagcgttccgccgcgatttggatatccatacgaaaacagcgatggacattttccaagtgagcgaggacgaagtgacgcccaacatgcgccgtcaggcgaaggcggtcaactttgggatcgtttacgggatcagtgattacggcttggcgcaaaacttaaatatttcacgcaaagaggccgctgaattcatcgagcgctacttcgaaagcttccctggcgtgaagcggtatatggaaaacattgtgcaagaagcaaaacagaaagggtatgtgacgacgctgctgcatcggcgccgctatttgattgatatcacgagccgcaacttcaacgtccgcagctttgctgaacggatggcgatgaacacgccgattcaagggagcgccgctgacattattaaaaaggcgatgatcgatctgaacgctagactgaaggaagagcggctgcaagcgcgccttttgctacaggtgcatgacgagctcattttggaggcgccgaaagaagagatggagcggctgtgccggctcgttccggaagtgatggagcaagcggtcacacttcgcgtgccgctcaaagtcgattaccattatggctcgacgtggtatgacgcgaaataaaaaggatcc

SEQ ID NO: 2335 - DNA, 2712 bp, Artificial Sequence
  Description of Artificial Sequence: Synthetic DNA sequence of Bacillus caldolyticus EA1 DNA polymerase P798L
atgaaatacctgctgccgaccgctgctgctggtctgctgctcctcgctgcccagccggcgatggccatgggattgaaaaaaaagcttgttttaatcgacggcagcagcgtggcgtaccgcgcctttttcgccttgccgcttttgcataacgacaaaggcatccatacgaacgccgtctacgggtttacgatgatgttgaataaaattttggcggaagaagagccaactcatatgcttgtcgcgtttgacgccgggaaaacgacgttccggcatgaagcgtttcaagagtataaaggtgggcgccagcagacgccaccggagctgtcggagcagtttccgctgttgcgcgagctgctgagggcgtatcgcatccccgcctatgaactcgagaactacgaagcggacgatattatcggaacgcttgccgcccgcgctgagcaggaagggtttgaggtgaaagtcatttccggcgaccgcgatctgacccagctcgcctccccccatgtgacggtggacattacgaaaaaagggattaccgatatcgaaccgtacacgccggaggcggtccgcgaaaaatacggcttaactccggaacaaatcgttgatttgaaaggattgatgggcgacaaatcggacaacattcccggagtgccgggcatcggggaaaagacggcggtcaagctgctcaagcaattcggcacggtcgaaaacgtgcttgcctccattgacgagatcaaaggcgaaaagttgaaagaaacgctgcgccaacaccgggagatggcgctgttaagcaaaaagctcgccgccattcgccgcgacgccccggtcgagctctcgcttgatgacatcgtctatcaaggggaagaccgggagaaagtggtcgctttatttaaagagcttgggtttcaatcgtttttagagaaaatggaatcgccgtcatcagaagaggaaaaaccgcttgccaagatggcatttacgcttgctgaccgcgtgacggaggagatgcttgccgacaaggcggcgcttgtcgttgaagtggtcgaggaaaattatcatgatgcgccgatcgtcggcatcgctgtggtcaacgaacatggacggtttttcctgcgcccggagacggcgcttgccgatccgcagtttgtcgcctggcttggtgatgaaacgaagaaaaaaagcatgtttgactcaaagcgcgcggcagtcgccttgaaatggaaaggaattgagctatgcggcgtttcctttgatttattgctggccgcctatttgcttgatccggcgcaaggtgttgatgatgtggctgccgcagcaaaaatgaagcaatacgaagcggtgcgctcggatgaagcggtgtatggcaaaggggcgaagcgggccgtgccggatgagccagtgctcgccgagcatctcgtccgcaaggcggcggcgatttgggcgctcgaacgtccgtttttggatgagctgcgccgcaacgaacaagatcggttgctcgtcgagctcgagcagccgttgtcttcgattttggcggaaatggaatttgccggagtgaaagtggatacgaagcggctcgaacagatgggcgaagagctcgccgagcagctgcgcacggtcgagcagcgcatttatgagctcgccggccaagaattcaacatcaattcaccgaaacagctcggcgtcattttatttgaaaaactgcagctgcccgtcttgaaaaaaacgaaaaccggctactccacttcggcggatgtgcttgaaaaacttgcgccttatcacgagatcgtggaaaacattttgcattaccgccagcttggcaagttgcagtcgacgtatattgaaggattgctgaaagtcgtgcgacccgatacaaagaaggtgcatacgattttcaatcaggcgttgacgcaaaccggacggctcagctcgacggagccgaacttgcaaaacattccgattcggcttgaggaaggacggaaaatccgccaagcgttcgtgccgtcggagtctgattggctcattttcgctgccgactactcgcaaattgagttgcgcgtcctcgcccatattgcggaagatgacaatttaatggaagcgttccgccgcgatttggatatccatacgaaaacagcgatggacattttccaagtgagcgaggacgaagtgacgcccaacatgcgccgtcaggcgaaggcggtcaactttgggatcgtttacgggatcagtgattacggcttggcgcaaaacttaaatatttcacgcaaagaggccgctgaattcatcgagcgctacttcgaaagcttccctggcgtgaagcggtatatggaaaacattgtgcaagaagcaaaacagaaagggtatgtgacgacgctgctgcatcggcgccgctatttgttagatatcacgagccgcaacttcaacgtccgcagctttgctgaacggatggcgatgaacacgccgattcaagggagcgccgctgacattattaaaaaggcgatgatcgatctgaacgctagactgaaggaagagcggctgcaagcgcgccttttgctacaggtgcatgacgagctcattttggaggcgccgaaagaagagatggagcggctgtgccggctcgttccggaagtgatggagcaagcggtcacacttcgcgtgccgctcaaagtcgattaccattatggctcgacgtggtatgacgcgaaataaaaaggatcc

SEQ ID NO: 2336 - DNA, 2712 bp, Artificial Sequence
  Description of Artificial Sequence: Synthetic DNA sequence of Bacillus caldolyticus EA1 DNA polymerase P798K
atgaaatacctgctgccgaccgctgctgctggtctgctgctcctcgctgcccagccggcgatggccatgggattgaaaaaaaagcttgttttaatcgacggcagcagcgtggcgtaccgcgcctttttcgccttgccgcttttgcataacgacaaaggcatccatacgaacgccgtctacgggtttacgatgatgttgaataaaattttggcggaagaagagccaactcatatgcttgtcgcgtttgacgccgggaaaacgacgttccggcatgaagcgtttcaagagtataaaggtgggcgccagcagacgccaccggagctgtcggagcagtttccgctgttgcgcgagctgctgagggcgtatcgcatccccgcctatgaactcgagaactacgaagcggacgatattatcggaacgcttgccgcccgcgctgagcaggaagggtttgaggtgaaagtcatttccggcgaccgcgatctgacccagctcgcctccccccatgtgacggtggacattacgaaaaaagggattaccgatatcgaaccgtacacgccggaggcggtccgcgaaaaatacggcttaactccggaacaaatcgttgatttgaaaggattgatgggcgacaaatcggacaacattcccggagtgccgggcatcggggaaaagacggcggtcaagctgctcaagcaattcggcacggtcgaaaacgtgcttgcctccattgacgagatcaaaggcgaaaagttgaaagaaacgctgcgccaacaccgggagatggcgctgttaagcaaaaagctcgccgccattcgccgcgacgccccggtcgagctctcgcttgatgacatcgtctatcaaggggaagaccgggagaaagtggtcgctttatttaaagagcttgggtttcaatcgtttttagagaaaatggaatcgccgtcatcagaagaggaaaaaccgcttgccaagatggcatttacgcttgctgaccgcgtgacggaggagatgcttgccgacaaggcggcgcttgtcgttgaagtggtcgaggaaaattatcatgatgcgccgatcgtcggcatcgctgtggtcaacgaacatggacggtttttcctgcgcccggagacggcgcttgccgatccgcagtttgtcgcctggcttggtgatgaaacgaagaaaaaaagcatgtttgactcaaagcgcgcggcagtcgccttgaaatggaaaggaattgagctatgcggcgtttcctttgatttattgctggccgcctatttgcttgatccggcgcaaggtgttgatgatgtggctgccgcagcaaaaatgaagcaatacgaagcggtgcgctcggatgaagcggtgtatggcaaaggggcgaagcgggccgtgccggatgagccagtgctcgccgagcatctcgtccgcaaggcggcggcgatttgggcgctcgaacgtccgtttttggatgagctgcgccgcaacgaacaagatcggttgctcgtcgagctcgagcagccgttgtcttcgattttggcggaaatggaatttgccggagtgaaagtggatacgaagcggctcgaacagatgggcgaagagctcgccgagcagctgcgcacggtcgagcagcgcatttatgagctcgccggccaagaattcaacatcaattcaccgaaacagctcggcgtcattttatttgaaaaactgcagctgcccgtcttgaaaaaaacgaaaaccggctactccacttcggcggatgtgcttgaaaaacttgcgccttatcacgagatcgtggaaaacattttgcattaccgccagcttggcaagttgcagtcgacgtatattgaaggattgctgaaagtcgtgcgacccgatacaaagaaggtgcatacgattttcaatcaggcgttgacgcaaaccggacggctcagctcgacggagccgaacttgcaaaacattccgattcggcttgaggaaggacggaaaatccgccaagcgttcgtgccgtcggagtctgattggctcattttcgctgccgactactcgcaaattgagttgcgcgtcctcgcccatattgcggaagatgacaatttaatggaagcgttccgccgcgatttggatatccatacgaaaacagcgatggacattttccaagtgagcgaggacgaagtgacgcccaacatgcgccgtcaggcgaaggcggtcaactttgggatcgtttacgggatcagtgattacggcttggcgcaaaacttaaatatttcacgcaaagaggccgctgaattcatcgagcgctacttcgaaagcttccctggcgtgaagcggtatatggaaaacattgtgcaagaagcaaaacagaaagggtatgtgacgacgctgctgcatcggcgccgctatttgaaagatatcacgagccgcaacttcaacgtccgcagctttgctgaacggatggcgatgaacacgccgattcaagggagcgccgctgacattattaaaaaggcgatgatcgatctgaacgctagactgaaggaagagcggctgcaagcgcgccttttgctacaggtgcatgacgagctcattttggaggcgccgaaagaagagatggagcggctgtgccggctcgttccggaagtgatggagcaagcggtcacacttcgcgtgccgctcaaagtcgattaccattatggctcgacgtggtatgacgcgaaataaaaaggatcc

SEQ ID NO: 2337 - DNA, 2712 bp, Artificial Sequence
  Description of Artificial Sequence: Synthetic DNA sequence of Bacillus caldolyticus EA1 DNA polymerase P798E
atgaaatacctgctgccgaccgctgctgctggtctgctgctcctcgctgcccagccggcgatggccatgggattgaaaaaaaagcttgttttaatcgacggcagcagcgtggcgtaccgcgcctttttcgccttgccgcttttgcataacgacaaaggcatccatacgaacgccgtctacgggtttacgatgatgttgaataaaattttggcggaagaagagccaactcatatgcttgtcgcgtttgacgccgggaaaacgacgttccggcatgaagcgtttcaagagtataaaggtgggcgccagcagacgccaccggagctgtcggagcagtttccgctgttgcgcgagctgctgagggcgtatcgcatccccgcctatgaactcgagaactacgaagcggacgatattatcggaacgcttgccgcccgcgctgagcaggaagggtttgaggtgaaagtcatttccggcgaccgcgatctgacccagctcgcctccccccatgtgacggtggacattacgaaaaaagggattaccgatatcgaaccgtacacgccggaggcggtccgcgaaaaatacggcttaactccggaacaaatcgttgatttgaaaggattgatgggcgacaaatcggacaacattcccggagtgccgggcatcggggaaaagacggcggtcaagctgctcaagcaattcggcacggtcgaaaacgtgcttgcctccattgacgagatcaaaggcgaaaagttgaaagaaacgctgcgccaacaccgggagatggcgctgttaagcaaaaagctcgccgccattcgccgcgacgccccggtcgagctctcgcttgatgacatcgtctatcaaggggaagaccgggagaaagtggtcgctttatttaaagagcttgggtttcaatcgtttttagagaaaatggaatcgccgtcatcagaagaggaaaaaccgcttgccaagatggcatttacgcttgctgaccgcgtgacggaggagatgcttgccgacaaggcggcgcttgtcgttgaagtggtcgaggaaaattatcatgatgcgccgatcgtcggcatcgctgtggtcaacgaacatggacggtttttcctgcgcccggagacggcgcttgccgatccgcagtttgtcgcctggcttggtgatgaaacgaagaaaaaaagcatgtttgactcaaagcgcgcggcagtcgccttgaaatggaaaggaattgagctatgcggcgtttcctttgatttattgctggccgcctatttgcttgatccggcgcaaggtgttgatgatgtggctgccgcagcaaaaatgaagcaatacgaagcggtgcgctcggatgaagcggtgtatggcaaaggggcgaagcgggccgtgccggatgagccagtgctcgccgagcatctcgtccgcaaggcggcggcgatttgggcgctcgaacgtccgtttttggatgagctgcgccgcaacgaacaagatcggttgctcgtcgagctcgagcagccgttgtcttcgattttggcggaaatggaatttgccggagtgaaagtggatacgaagcggctcgaacagatgggcgaagagctcgccgagcagctgcgcacggtcgagcagcgcatttatgagctcgccggccaagaattcaacatcaattcaccgaaacagctcggcgtcattttatttgaaaaactgcagctgcccgtcttgaaaaaaacgaaaaccggctactccacttcggcggatgtgcttgaaaaacttgcgccttatcacgagatcgtggaaaacattttgcattaccgccagcttggcaagttgcagtcgacgtatattgaaggattgctgaaagtcgtgcgacccgatacaaagaaggtgcatacgattttcaatcaggcgttgacgcaaaccggacggctcagctcgacggagccgaacttgcaaaacattccgattcggcttgaggaaggacggaaaatccgccaagcgttcgtgccgtcggagtctgattggctcattttcgctgccgactactcgcaaattgagttgcgcgtcctcgcccatattgcggaagatgacaatttaatggaagcgttccgccgcgatttggatatccatacgaaaacagcgatggacattttccaagtgagcgaggacgaagtgacgcccaacatgcgccgtcaggcgaaggcggtcaactttgggatcgtttacgggatcagtgattacggcttggcgcaaaacttaaatatttcacgcaaagaggccgctgaattcatcgagcgctacttcgaaagcttccctggcgtgaagcggtatatggaaaacattgtgcaagaagcaaaacagaaagggtatgtgacgacgctgctgcatcggcgccgctatttggaagatatcacgagccgcaacttcaacgtccgcagctttgctgaacggatggcgatgaacacgccgattcaagggagcgccgctgacattattaaaaaggcgatgatcgatctgaacgctagactgaaggaagagcggctgcaagcgcgccttttgctacaggtgcatgacgagctcattttggaggcgccgaaagaagagatggagcggctgtgccggctcgttccggaagtgatggagcaagcggtcacacttcgcgtgccgctcaaagtcgattaccattatggctcgacgtggtatgacgcgaaataaaaaggatcc

SEQ ID NO: 2338 - DNA, 2712 bp, Artificial Sequence
  Description of Artificial Sequence: Synthetic DNA sequence of Bacillus caldolyticus EA1 DNA polymerase P798D
atgaaatacctgctgccgaccgctgctgctggtctgctgctcctcgctgcccagccggcgatggccatgggattgaaaaaaaagcttgttttaatcgacggcagcagcgtggcgtaccgcgcctttttcgccttgccgcttttgcataacgacaaaggcatccatacgaacgccgtctacgggtttacgatgatgttgaataaaattttggcggaagaagagccaactcatatgcttgtcgcgtttgacgccgggaaaacgacgttccggcatgaagcgtttcaagagtataaaggtgggcgccagcagacgccaccggagctgtcggagcagtttccgctgttgcgcgagctgctgagggcgtatcgcatccccgcctatgaactcgagaactacgaagcggacgatattatcggaacgcttgccgcccgcgctgagcaggaagggtttgaggtgaaagtcatttccggcgaccgcgatctgacccagctcgcctccccccatgtgacggtggacattacgaaaaaagggattaccgatatcgaaccgtacacgccggaggcggtccgcgaaaaatacggcttaactccggaacaaatcgttgatttgaaaggattgatgggcgacaaatcggacaacattcccggagtgccgggcatcggggaaaagacggcggtcaagctgctcaagcaattcggcacggtcgaaaacgtgcttgcctccattgacgagatcaaaggcgaaaagttgaaagaaacgctgcgccaacaccgggagatggcgctgttaagcaaaaagctcgccgccattcgccgcgacgccccggtcgagctctcgcttgatgacatcgtctatcaaggggaagaccgggagaaagtggtcgctttatttaaagagcttgggtttcaatcgtttttagagaaaatggaatcgccgtcatcagaagaggaaaaaccgcttgccaagatggcatttacgcttgctgaccgcgtgacggaggagatgcttgccgacaaggcggcgcttgtcgttgaagtggtcgaggaaaattatcatgatgcgccgatcgtcggcatcgctgtggtcaacgaacatggacggtttttcctgcgcccggagacggcgcttgccgatccgcagtttgtcgcctggcttggtgatgaaacgaagaaaaaaagcatgtttgactcaaagcgcgcggcagtcgccttgaaatggaaaggaattgagctatgcggcgtttcctttgatttattgctggccgcctatttgcttgatccggcgcaaggtgttgatgatgtggctgccgcagcaaaaatgaagcaatacgaagcggtgcgctcggatgaagcggtgtatggcaaaggggcgaagcgggccgtgccggatgagccagtgctcgccgagcatctcgtccgcaaggcggcggcgatttgggcgctcgaacgtccgtttttggatgagctgcgccgcaacgaacaagatcggttgctcgtcgagctcgagcagccgttgtcttcgattttggcggaaatggaatttgccggagtgaaagtggatacgaagcggctcgaacagatgggcgaagagctcgccgagcagctgcgcacggtcgagcagcgcatttatgagctcgccggccaagaattcaacatcaattcaccgaaacagctcggcgtcattttatttgaaaaactgcagctgcccgtcttgaaaaaaacgaaaaccggctactccacttcggcggatgtgcttgaaaaacttgcgccttatcacgagatcgtggaaaacattttgcattaccgccagcttggcaagttgcagtcgacgtatattgaaggattgctgaaagtcgtgcgacccgatacaaagaaggtgcatacgattttcaatcaggcgttgacgcaaaccggacggctcagctcgacggagccgaacttgcaaaacattccgattcggcttgaggaaggacggaaaatccgccaagcgttcgtgccgtcggagtctgattggctcattttcgctgccgactactcgcaaattgagttgcgcgtcctcgcccatattgcggaagatgacaatttaatggaagcgttccgccgcgatttggatatccatacgaaaacagcgatggacattttccaagtgagcgaggacgaagtgacgcccaacatgcgccgtcaggcgaaggcggtcaactttgggatcgtttacgggatcagtgattacggcttggcgcaaaacttaaatatttcacgcaaagaggccgctgaattcatcgagcgctacttcgaaagcttccctggcgtgaagcggtatatggaaaacattgtgcaagaagcaaaacagaaagggtatgtgacgacgctgctgcatcggcgccgctatttggatgatatcacgagccgcaacttcaacgtccgcagctttgctgaacggatggcgatgaacacgccgattcaagggagcgccgctgacattattaaaaaggcgatgatcgatctgaacgctagactgaaggaagagcggctgcaagcgcgccttttgctacaggtgcatgacgagctcattttggaggcgccgaaagaagagatggagcggctgtgccggctcgttccggaagtgatggagcaagcggtcacacttcgcgtgccgctcaaagtcgattaccattatggctcgacgtggtatgacgcgaaataaaaaggatcc

SEQ ID NO: 2339 - DNA, 2712 bp, Artificial Sequence
  Description of Artificial Sequence: Synthetic DNA sequence of Bacillus caldolyticus EA1 DNA polymerase P798F
atgaaatacctgctgccgaccgctgctgctggtctgctgctcctcgctgcccagccggcgatggccatgggattgaaaaaaaagcttgttttaatcgacggcagcagcgtggcgtaccgcgcctttttcgccttgccgcttttgcataacgacaaaggcatccatacgaacgccgtctacgggtttacgatgatgttgaataaaattttggcggaagaagagccaactcatatgcttgtcgcgtttgacgccgggaaaacgacgttccggcatgaagcgtttcaagagtataaaggtgggcgccagcagacgccaccggagctgtcggagcagtttccgctgttgcgcgagctgctgagggcgtatcgcatccccgcctatgaactcgagaactacgaagcggacgatattatcggaacgcttgccgcccgcgctgagcaggaagggtttgaggtgaaagtcatttccggcgaccgcgatctgacccagctcgcctccccccatgtgacggtggacattacgaaaaaagggattaccgatatcgaaccgtacacgccggaggcggtccgcgaaaaatacggcttaactccggaacaaatcgttgatttgaaaggattgatgggcgacaaatcggacaacattcccggagtgccgggcatcggggaaaagacggcggtcaagctgctcaagcaattcggcacggtcgaaaacgtgcttgcctccattgacgagatcaaaggcgaaaagttgaaagaaacgctgcgccaacaccgggagatggcgctgttaagcaaaaagctcgccgccattcgccgcgacgccccggtcgagctctcgcttgatgacatcgtctatcaaggggaagaccgggagaaagtggtcgctttatttaaagagcttgggtttcaatcgtttttagagaaaatggaatcgccgtcatcagaagaggaaaaaccgcttgccaagatggcatttacgcttgctgaccgcgtgacggaggagatgcttgccgacaaggcggcgcttgtcgttgaagtggtcgaggaaaattatcatgatgcgccgatcgtcggcatcgctgtggtcaacgaacatggacggtttttcctgcgcccggagacggcgcttgccgatccgcagtttgtcgcctggcttggtgatgaaacgaagaaaaaaagcatgtttgactcaaagcgcgcggcagtcgccttgaaatggaaaggaattgagctatgcggcgtttcctttgatttattgctggccgcctatttgcttgatccggcgcaaggtgttgatgatgtggctgccgcagcaaaaatgaagcaatacgaagcggtgcgctcggatgaagcggtgtatggcaaaggggcgaagcgggccgtgccggatgagccagtgctcgccgagcatctcgtccgcaaggcggcggcgatttgggcgctcgaacgtccgtttttggatgagctgcgccgcaacgaacaagatcggttgctcgtcgagctcgagcagccgttgtcttcgattttggcggaaatggaatttgccggagtgaaagtggatacgaagcggctcgaacagatgggcgaagagctcgccgagcagctgcgcacggtcgagcagcgcatttatgagctcgccggccaagaattcaacatcaattcaccgaaacagctcggcgtcattttatttgaaaaactgcagctgcccgtcttgaaaaaaacgaaaaccggctactccacttcggcggatgtgcttgaaaaacttgcgccttatcacgagatcgtggaaaacattttgcattaccgccagcttggcaagttgcagtcgacgtatattgaaggattgctgaaagtcgtgcgacccgatacaaagaaggtgcatacgattttcaatcaggcgttgacgcaaaccggacggctcagctcgacggagccgaacttgcaaaacattccgattcggcttgaggaaggacggaaaatccgccaagcgttcgtgccgtcggagtctgattggctcattttcgctgccgactactcgcaaattgagttgcgcgtcctcgcccatattgcggaagatgacaatttaatggaagcgttccgccgcgatttggatatccatacgaaaacagcgatggacattttccaagtgagcgaggacgaagtgacgcccaacatgcgccgtcaggcgaaggcggtcaactttgggatcgtttacgggatcagtgattacggcttggcgcaaaacttaaatatttcacgcaaagaggccgctgaattcatcgagcgctacttcgaaagcttccctggcgtgaagcggtatatggaaaacattgtgcaagaagcaaaacagaaagggtatgtgacgacgctgctgcatcggcgccgctatttgtttgatatcacgagccgcaacttcaacgtccgcagctttgctgaacggatggcgatgaacacgccgattcaagggagcgccgctgacattattaaaaaggcgatgatcgatctgaacgctagactgaaggaagagcggctgcaagcgcgccttttgctacaggtgcatgacgagctcattttggaggcgccgaaagaagagatggagcggctgtgccggctcgttccggaagtgatggagcaagcggtcacacttcgcgtgccgctcaaagtcgattaccattatggctcgacgtggtatgacgcgaaataaaaaggatcc

SEQ ID NO: 2340 - DNA, 2712 bp, Artificial Sequence
  Description of Artificial Sequence: Synthetic DNA sequence of Bacillus caldolyticus EA1 DNA polymerase P798S
atgaaatacctgctgccgaccgctgctgctggtctgctgctcctcgctgcccagccggcgatggccatgggattgaaaaaaaagcttgttttaatcgacggcagcagcgtggcgtaccgcgcctttttcgccttgccgcttttgcataacgacaaaggcatccatacgaacgccgtctacgggtttacgatgatgttgaataaaattttggcggaagaagagccaactcatatgcttgtcgcgtttgacgccgggaaaacgacgttccggcatgaagcgtttcaagagtataaaggtgggcgccagcagacgccaccggagctgtcggagcagtttccgctgttgcgcgagctgctgagggcgtatcgcatccccgcctatgaactcgagaactacgaagcggacgatattatcggaacgcttgccgcccgcgctgagcaggaagggtttgaggtgaaagtcatttccggcgaccgcgatctgacccagctcgcctccccccatgtgacggtggacattacgaaaaaagggattaccgatatcgaaccgtacacgccggaggcggtccgcgaaaaatacggcttaactccggaacaaatcgttgatttgaaaggattgatgggcgacaaatcggacaacattcccggagtgccgggcatcggggaaaagacggcggtcaagctgctcaagcaattcggcacggtcgaaaacgtgcttgcctccattgacgagatcaaaggcgaaaagttgaaagaaacgctgcgccaacaccgggagatggcgctgttaagcaaaaagctcgccgccattcgccgcgacgccccggtcgagctctcgcttgatgacatcgtctatcaaggggaagaccgggagaaagtggtcgctttatttaaagagcttgggtttcaatcgtttttagagaaaatggaatcgccgtcatcagaagaggaaaaaccgcttgccaagatggcatttacgcttgctgaccgcgtgacggaggagatgcttgccgacaaggcggcgcttgtcgttgaagtggtcgaggaaaattatcatgatgcgccgatcgtcggcatcgctgtggtcaacgaacatggacggtttttcctgcgcccggagacggcgcttgccgatccgcagtttgtcgcctggcttggtgatgaaacgaagaaaaaaagcatgtttgactcaaagcgcgcggcagtcgccttgaaatggaaaggaattgagctatgcggcgtttcctttgatttattgctggccgcctatttgcttgatccggcgcaaggtgttgatgatgtggctgccgcagcaaaaatgaagcaatacgaagcggtgcgctcggatgaagcggtgtatggcaaaggggcgaagcgggccgtgccggatgagccagtgctcgccgagcatctcgtccgcaaggcggcggcgatttgggcgctcgaacgtccgtttttggatgagctgcgccgcaacgaacaagatcggttgctcgtcgagctcgagcagccgttgtcttcgattttggcggaaatggaatttgccggagtgaaagtggatacgaagcggctcgaacagatgggcgaagagctcgccgagcagctgcgcacggtcgagcagcgcatttatgagctcgccggccaagaattcaacatcaattcaccgaaacagctcggcgtcattttatttgaaaaactgcagctgcccgtcttgaaaaaaacgaaaaccggctactccacttcggcggatgtgcttgaaaaacttgcgccttatcacgagatcgtggaaaacattttgcattaccgccagcttggcaagttgcagtcgacgtatattgaaggattgctgaaagtcgtgcgacccgatacaaagaaggtgcatacgattttcaatcaggcgttgacgcaaaccggacggctcagctcgacggagccgaacttgcaaaacattccgattcggcttgaggaaggacggaaaatccgccaagcgttcgtgccgtcggagtctgattggctcattttcgctgccgactactcgcaaattgagttgcgcgtcctcgcccatattgcggaagatgacaatttaatggaagcgttccgccgcgatttggatatccatacgaaaacagcgatggacattttccaagtgagcgaggacgaagtgacgcccaacatgcgccgtcaggcgaaggcggtcaactttgggatcgtttacgggatcagtgattacggcttggcgcaaaacttaaatatttcacgcaaagaggccgctgaattcatcgagcgctacttcgaaagcttccctggcgtgaagcggtatatggaaaacattgtgcaagaagcaaaacagaaagggtatgtgacgacgctgctgcatcggcgccgctatttgtctgatatcacgagccgcaacttcaacgtccgcagctttgctgaacggatggcgatgaacacgccgattcaagggagcgccgctgacattattaaaaaggcgatgatcgatctgaacgctagactgaaggaagagcggctgcaagcgcgccttttgctacaggtgcatgacgagctcattttggaggcgccgaaagaagagatggagcggctgtgccggctcgttccggaagtgatggagcaagcggtcacacttcgcgtgccgctcaaagtcgattaccattatggctcgacgtggtatgacgcgaaataaaaaggatcc

SEQ ID NO: 2341 - DNA, 2712 bp, Artificial Sequence
  Description of Artificial Sequence: Synthetic DNA sequence of Bacillus caldolyticus EA1 DNA polymerase P798Y
atgaaatacctgctgccgaccgctgctgctggtctgctgctcctcgctgcccagccggcgatggccatgggattgaaaaaaaagcttgttttaatcgacggcagcagcgtggcgtaccgcgcctttttcgccttgccgcttttgcataacgacaaaggcatccatacgaacgccgtctacgggtttacgatgatgttgaataaaattttggcggaagaagagccaactcatatgcttgtcgcgtttgacgccgggaaaacgacgttccggcatgaagcgtttcaagagtataaaggtgggcgccagcagacgccaccggagctgtcggagcagtttccgctgttgcgcgagctgctgagggcgtatcgcatccccgcctatgaactcgagaactacgaagcggacgatattatcggaacgcttgccgcccgcgctgagcaggaagggtttgaggtgaaagtcatttccggcgaccgcgatctgacccagctcgcctccccccatgtgacggtggacattacgaaaaaagggattaccgatatcgaaccgtacacgccggaggcggtccgcgaaaaatacggcttaactccggaacaaatcgttgatttgaaaggattgatgggcgacaaatcggacaacattcccggagtgccgggcatcggggaaaagacggcggtcaagctgctcaagcaattcggcacggtcgaaaacgtgcttgcctccattgacgagatcaaaggcgaaaagttgaaagaaacgctgcgccaacaccgggagatggcgctgttaagcaaaaagctcgccgccattcgccgcgacgccccggtcgagctctcgcttgatgacatcgtctatcaaggggaagaccgggagaaagtggtcgctttatttaaagagcttgggtttcaatcgtttttagagaaaatggaatcgccgtcatcagaagaggaaaaaccgcttgccaagatggcatttacgcttgctgaccgcgtgacggaggagatgcttgccgacaaggcggcgcttgtcgttgaagtggtcgaggaaaattatcatgatgcgccgatcgtcggcatcgctgtggtcaacgaacatggacggtttttcctgcgcccggagacggcgcttgccgatccgcagtttgtcgcctggcttggtgatgaaacgaagaaaaaaagcatgtttgactcaaagcgcgcggcagtcgccttgaaatggaaaggaattgagctatgcggcgtttcctttgatttattgctggccgcctatttgcttgatccggcgcaaggtgttgatgatgtggctgccgcagcaaaaatgaagcaatacgaagcggtgcgctcggatgaagcggtgtatggcaaaggggcgaagcgggccgtgccggatgagccagtgctcgccgagcatctcgtccgcaaggcggcggcgatttgggcgctcgaacgtccgtttttggatgagctgcgccgcaacgaacaagatcggttgctcgtcgagctcgagcagccgttgtcttcgattttggcggaaatggaatttgccggagtgaaagtggatacgaagcggctcgaacagatgggcgaagagctcgccgagcagctgcgcacggtcgagcagcgcatttatgagctcgccggccaagaattcaacatcaattcaccgaaacagctcggcgtcattttatttgaaaaactgcagctgcccgtcttgaaaaaaacgaaaaccggctactccacttcggcggatgtgcttgaaaaacttgcgccttatcacgagatcgtggaaaacattttgcattaccgccagcttggcaagttgcagtcgacgtatattgaaggattgctgaaagtcgtgcgacccgatacaaagaaggtgcatacgattttcaatcaggcgttgacgcaaaccggacggctcagctcgacggagccgaacttgcaaaacattccgattcggcttgaggaaggacggaaaatccgccaagcgttcgtgccgtcggagtctgattggctcattttcgctgccgactactcgcaaattgagttgcgcgtcctcgcccatattgcggaagatgacaatttaatggaagcgttccgccgcgatttggatatccatacgaaaacagcgatggacattttccaagtgagcgaggacgaagtgacgcccaacatgcgccgtcaggcgaaggcggtcaactttgggatcgtttacgggatcagtgattacggcttggcgcaaaacttaaatatttcacgcaaagaggccgctgaattcatcgagcgctacttcgaaagcttccctggcgtgaagcggtatatggaaaacattgtgcaagaagcaaaacagaaagggtatgtgacgacgctgctgcatcggcgccgctatttgtatgatatcacgagccgcaacttcaacgtccgcagctttgctgaacggatggcgatgaacacgccgattcaagggagcgccgctgacattattaaaaaggcgatgatcgatctgaacgctagactgaaggaagagcggctgcaagcgcgccttttgctacaggtgcatgacgagctcattttggaggcgccgaaagaagagatggagcggctgtgccggctcgttccggaagtgatggagcaagcggtcacacttcgcgtgccgctcaaagtcgattaccattatggctcgacgtggtatgacgcgaaataaaaaggatcc

SEQ ID NO: 2342 - DNA, 2712 bp, Artificial Sequence
  Description of Artificial Sequence: Synthetic DNA sequence of Bacillus caldolyticus EA1 DNA polymerase P798W
atgaaatacctgctgccgaccgctgctgctggtctgctgctcctcgctgcccagccggcgatggccatgggattgaaaaaaaagcttgttttaatcgacggcagcagcgtggcgtaccgcgcctttttcgccttgccgcttttgcataacgacaaaggcatccatacgaacgccgtctacgggtttacgatgatgttgaataaaattttggcggaagaagagccaactcatatgcttgtcgcgtttgacgccgggaaaacgacgttccggcatgaagcgtttcaagagtataaaggtgggcgccagcagacgccaccggagctgtcggagcagtttccgctgttgcgcgagctgctgagggcgtatcgcatccccgcctatgaactcgagaactacgaagcggacgatattatcggaacgcttgccgcccgcgctgagcaggaagggtttgaggtgaaagtcatttccggcgaccgcgatctgacccagctcgcctccccccatgtgacggtggacattacgaaaaaagggattaccgatatcgaaccgtacacgccggaggcggtccgcgaaaaatacggcttaactccggaacaaatcgttgatttgaaaggattgatgggcgacaaatcggacaacattcccggagtgccgggcatcggggaaaagacggcggtcaagctgctcaagcaattcggcacggtcgaaaacgtgcttgcctccattgacgagatcaaaggcgaaaagttgaaagaaacgctgcgccaacaccgggagatggcgctgttaagcaaaaagctcgccgccattcgccgcgacgccccggtcgagctctcgcttgatgacatcgtctatcaaggggaagaccgggagaaagtggtcgctttatttaaagagcttgggtttcaatcgtttttagagaaaatggaatcgccgtcatcagaagaggaaaaaccgcttgccaagatggcatttacgcttgctgaccgcgtgacggaggagatgcttgccgacaaggcggcgcttgtcgttgaagtggtcgaggaaaattatcatgatgcgccgatcgtcggcatcgctgtggtcaacgaacatggacggtttttcctgcgcccggagacggcgcttgccgatccgcagtttgtcgcctggcttggtgatgaaacgaagaaaaaaagcatgtttgactcaaagcgcgcggcagtcgccttgaaatggaaaggaattgagctatgcggcgtttcctttgatttattgctggccgcctatttgcttgatccggcgcaaggtgttgatgatgtggctgccgcagcaaaaatgaagcaatacgaagcggtgcgctcggatgaagcggtgtatggcaaaggggcgaagcgggccgtgccggatgagccagtgctcgccgagcatctcgtccgcaaggcggcggcgatttgggcgctcgaacgtccgtttttggatgagctgcgccgcaacgaacaagatcggttgctcgtcgagctcgagcagccgttgtcttcgattttggcggaaatggaatttgccggagtgaaagtggatacgaagcggctcgaacagatgggcgaagagctcgccgagcagctgcgcacggtcgagcagcgcatttatgagctcgccggccaagaattcaacatcaattcaccgaaacagctcggcgtcattttatttgaaaaactgcagctgcccgtcttgaaaaaaacgaaaaccggctactccacttcggcggatgtgcttgaaaaacttgcgccttatcacgagatcgtggaaaacattttgcattaccgccagcttggcaagttgcagtcgacgtatattgaaggattgctgaaagtcgtgcgacccgatacaaagaaggtgcatacgattttcaatcaggcgttgacgcaaaccggacggctcagctcgacggagccgaacttgcaaaacattccgattcggcttgaggaaggacggaaaatccgccaagcgttcgtgccgtcggagtctgattggctcattttcgctgccgactactcgcaaattgagttgcgcgtcctcgcccatattgcggaagatgacaatttaatggaagcgttccgccgcgatttggatatccatacgaaaacagcgatggacattttccaagtgagcgaggacgaagtgacgcccaacatgcgccgtcaggcgaaggcggtcaactttgggatcgtttacgggatcagtgattacggcttggcgcaaaacttaaatatttcacgcaaagaggccgctgaattcatcgagcgctacttcgaaagcttccctggcgtgaagcggtatatggaaaacattgtgcaagaagcaaaacagaaagggtatgtgacgacgctgctgcatcggcgccgctatttgtgggatatcacgagccgcaacttcaacgtccgcagctttgctgaacggatggcgatgaacacgccgattcaagggagcgccgctgacattattaaaaaggcgatgatcgatctgaacgctagactgaaggaagagcggctgcaagcgcgccttttgctacaggtgcatgacgagctcattttggaggcgccgaaagaagagatggagcggctgtgccggctcgttccggaagtgatggagcaagcggtcacacttcgcgtgccgctcaaagtcgattaccattatggctcgacgtggtatgacgcgaaataaaaaggatcc

SEQ ID NO: 2343 - DNA, 2712 bp, Artificial Sequence
  Description of Artificial Sequence: Synthetic DNA sequence of Bacillus caldolyticus EA1 DNA polymerase P798M
atgaaatacctgctgccgaccgctgctgctggtctgctgctcctcgctgcccagccggcgatggccatgggattgaaaaaaaagcttgttttaatcgacggcagcagcgtggcgtaccgcgcctttttcgccttgccgcttttgcataacgacaaaggcatccatacgaacgccgtctacgggtttacgatgatgttgaataaaattttggcggaagaagagccaactcatatgcttgtcgcgtttgacgccgggaaaacgacgttccggcatgaagcgtttcaagagtataaaggtgggcgccagcagacgccaccggagctgtcggagcagtttccgctgttgcgcgagctgctgagggcgtatcgcatccccgcctatgaactcgagaactacgaagcggacgatattatcggaacgcttgccgcccgcgctgagcaggaagggtttgaggtgaaagtcatttccggcgaccgcgatctgacccagctcgcctccccccatgtgacggtggacattacgaaaaaagggattaccgatatcgaaccgtacacgccggaggcggtccgcgaaaaatacggcttaactccggaacaaatcgttgatttgaaaggattgatgggcgacaaatcggacaacattcccggagtgccgggcatcggggaaaagacggcggtcaagctgctcaagcaattcggcacggtcgaaaacgtgcttgcctccattgacgagatcaaaggcgaaaagttgaaagaaacgctgcgccaacaccgggagatggcgctgttaagcaaaaagctcgccgccattcgccgcgacgccccggtcgagctctcgcttgatgacatcgtctatcaaggggaagaccgggagaaagtggtcgctttatttaaagagcttgggtttcaatcgtttttagagaaaatggaatcgccgtcatcagaagaggaaaaaccgcttgccaagatggcatttacgcttgctgaccgcgtgacggaggagatgcttgccgacaaggcggcgcttgtcgttgaagtggtcgaggaaaattatcatgatgcgccgatcgtcggcatcgctgtggtcaacgaacatggacggtttttcctgcgcccggagacggcgcttgccgatccgcagtttgtcgcctggcttggtgatgaaacgaagaaaaaaagcatgtttgactcaaagcgcgcggcagtcgccttgaaatggaaaggaattgagctatgcggcgtttcctttgatttattgctggccgcctatttgcttgatccggcgcaaggtgttgatgatgtggctgccgcagcaaaaatgaagcaatacgaagcggtgcgctcggatgaagcggtgtatggcaaaggggcgaagcgggccgtgccggatgagccagtgctcgccgagcatctcgtccgcaaggcggcggcgatttgggcgctcgaacgtccgtttttggatgagctgcgccgcaacgaacaagatcggttgctcgtcgagctcgagcagccgttgtcttcgattttggcggaaatggaatttgccggagtgaaagtggatacgaagcggctcgaacagatgggcgaagagctcgccgagcagctgcgcacggtcgagcagcgcatttatgagctcgccggccaagaattcaacatcaattcaccgaaacagctcggcgtcattttatttgaaaaactgcagctgcccgtcttgaaaaaaacgaaaaccggctactccacttcggcggatgtgcttgaaaaacttgcgccttatcacgagatcgtggaaaacattttgcattaccgccagcttggcaagttgcagtcgacgtatattgaaggattgctgaaagtcgtgcgacccgatacaaagaaggtgcatacgattttcaatcaggcgttgacgcaaaccggacggctcagctcgacggagccgaacttgcaaaacattccgattcggcttgaggaaggacggaaaatccgccaagcgttcgtgccgtcggagtctgattggctcattttcgctgccgactactcgcaaattgagttgcgcgtcctcgcccatattgcggaagatgacaatttaatggaagcgttccgccgcgatttggatatccatacgaaaacagcgatggacattttccaagtgagcgaggacgaagtgacgcccaacatgcgccgtcaggcgaaggcggtcaactttgggatcgtttacgggatcagtgattacggcttggcgcaaaacttaaatatttcacgcaaagaggccgctgaattcatcgagcgctacttcgaaagcttccctggcgtgaagcggtatatggaaaacattgtgcaagaagcaaaacagaaagggtatgtgacgacgctgctgcatcggcgccgctatttgatggatatcacgagccgcaacttcaacgtccgcagctttgctgaacggatggcgatgaacacgccgattcaagggagcgccgctgacattattaaaaaggcgatgatcgatctgaacgctagactgaaggaagagcggctgcaagcgcgccttttgctacaggtgcatgacgagctcattttggaggcgccgaaagaagagatggagcggctgtgccggctcgttccggaagtgatggagcaagcggtcacacttcgcgtgccgctcaaagtcgattaccattatggctcgacgtggtatgacgcgaaataaaaaggatcc

SEQ ID NO: 2344 - DNA, 2712 bp, Artificial Sequence
  Description of Artificial Sequence: Synthetic DNA sequence of Bacillus caldolyticus EA1 DNA polymerase P798T
atgaaatacctgctgccgaccgctgctgctggtctgctgctcctcgctgcccagccggcgatggccatgggattgaaaaaaaagcttgttttaatcgacggcagcagcgtggcgtaccgcgcctttttcgccttgccgcttttgcataacgacaaaggcatccatacgaacgccgtctacgggtttacgatgatgttgaataaaattttggcggaagaagagccaactcatatgcttgtcgcgtttgacgccgggaaaacgacgttccggcatgaagcgtttcaagagtataaaggtgggcgccagcagacgccaccggagctgtcggagcagtttccgctgttgcgcgagctgctgagggcgtatcgcatccccgcctatgaactcgagaactacgaagcggacgatattatcggaacgcttgccgcccgcgctgagcaggaagggtttgaggtgaaagtcatttccggcgaccgcgatctgacccagctcgcctccccccatgtgacggtggacattacgaaaaaagggattaccgatatcgaaccgtacacgccggaggcggtccgcgaaaaatacggcttaactccggaacaaatcgttgatttgaaaggattgatgggcgacaaatcggacaacattcccggagtgccgggcatcggggaaaagacggcggtcaagctgctcaagcaattcggcacggtcgaaaacgtgcttgcctccattgacgagatcaaaggcgaaaagttgaaagaaacgctgcgccaacaccgggagatggcgctgttaagcaaaaagctcgccgccattcgccgcgacgccccggtcgagctctcgcttgatgacatcgtctatcaaggggaagaccgggagaaagtggtcgctttatttaaagagcttgggtttcaatcgtttttagagaaaatggaatcgccgtcatcagaagaggaaaaaccgcttgccaagatggcatttacgcttgctgaccgcgtgacggaggagatgcttgccgacaaggcggcgcttgtcgttgaagtggtcgaggaaaattatcatgatgcgccgatcgtcggcatcgctgtggtcaacgaacatggacggtttttcctgcgcccggagacggcgcttgccgatccgcagtttgtcgcctggcttggtgatgaaacgaagaaaaaaagcatgtttgactcaaagcgcgcggcagtcgccttgaaatggaaaggaattgagctatgcggcgtttcctttgatttattgctggccgcctatttgcttgatccggcgcaaggtgttgatgatgtggctgccgcagcaaaaatgaagcaatacgaagcggtgcgctcggatgaagcggtgtatggcaaaggggcgaagcgggccgtgccggatgagccagtgctcgccgagcatctcgtccgcaaggcggcggcgatttgggcgctcgaacgtccgtttttggatgagctgcgccgcaacgaacaagatcggttgctcgtcgagctcgagcagccgttgtcttcgattttggcggaaatggaatttgccggagtgaaagtggatacgaagcggctcgaacagatgggcgaagagctcgccgagcagctgcgcacggtcgagcagcgcatttatgagctcgccggccaagaattcaacatcaattcaccgaaacagctcggcgtcattttatttgaaaaactgcagctgcccgtcttgaaaaaaacgaaaaccggctactccacttcggcggatgtgcttgaaaaacttgcgccttatcacgagatcgtggaaaacattttgcattaccgccagcttggcaagttgcagtcgacgtatattgaaggattgctgaaagtcgtgcgacccgatacaaagaaggtgcatacgattttcaatcaggcgttgacgcaaaccggacggctcagctcgacggagccgaacttgcaaaacattccgattcggcttgaggaaggacggaaaatccgccaagcgttcgtgccgtcggagtctgattggctcattttcgctgccgactactcgcaaattgagttgcgcgtcctcgcccatattgcggaagatgacaatttaatggaagcgttccgccgcgatttggatatccatacgaaaacagcgatggacattttccaagtgagcgaggacgaagtgacgcccaacatgcgccgtcaggcgaaggcggtcaactttgggatcgtttacgggatcagtgattacggcttggcgcaaaacttaaatatttcacgcaaagaggccgctgaattcatcgagcgctacttcgaaagcttccctggcgtgaagcggtatatggaaaacattgtgcaagaagcaaaacagaaagggtatgtgacgacgctgctgcatcggcgccgctatttgactgatatcacgagccgcaacttcaacgtccgcagctttgctgaacggatggcgatgaacacgccgattcaagggagcgccgctgacattattaaaaaggcgatgatcgatctgaacgctagactgaaggaagagcggctgcaagcgcgccttttgctacaggtgcatgacgagctcattttggaggcgccgaaagaagagatggagcggctgtgccggctcgttccggaagtgatggagcaagcggtcacacttcgcgtgccgctcaaagtcgattaccattatggctcgacgtggtatgacgcgaaataaaaaggatcc

SEQ ID NO: 2345 - DNA, 2712 bp, Artificial Sequence
  Description of Artificial Sequence: Synthetic DNA sequence of Bacillus caldolyticus EA1 DNA polymerase P798N
atgaaatacctgctgccgaccgctgctgctggtctgctgctcctcgctgcccagccggcgatggccatgggattgaaaaaaaagcttgttttaatcgacggcagcagcgtggcgtaccgcgcctttttcgccttgccgcttttgcataacgacaaaggcatccatacgaacgccgtctacgggtttacgatgatgttgaataaaattttggcggaagaagagccaactcatatgcttgtcgcgtttgacgccgggaaaacgacgttccggcatgaagcgtttcaagagtataaaggtgggcgccagcagacgccaccggagctgtcggagcagtttccgctgttgcgcgagctgctgagggcgtatcgcatccccgcctatgaactcgagaactacgaagcggacgatattatcggaacgcttgccgcccgcgctgagcaggaagggtttgaggtgaaagtcatttccggcgaccgcgatctgacccagctcgcctccccccatgtgacggtggacattacgaaaaaagggattaccgatatcgaaccgtacacgccggaggcggtccgcgaaaaatacggcttaactccggaacaaatcgttgatttgaaaggattgatgggcgacaaatcggacaacattcccggagtgccgggcatcggggaaaagacggcggtcaagctgctcaagcaattcggcacggtcgaaaacgtgcttgcctccattgacgagatcaaaggcgaaaagttgaaagaaacgctgcgccaacaccgggagatggcgctgttaagcaaaaagctcgccgccattcgccgcgacgccccggtcgagctctcgcttgatgacatcgtctatcaaggggaagaccgggagaaagtggtcgctttatttaaagagcttgggtttcaatcgtttttagagaaaatggaatcgccgtcatcagaagaggaaaaaccgcttgccaagatggcatttacgcttgctgaccgcgtgacggaggagatgcttgccgacaaggcggcgcttgtcgttgaagtggtcgaggaaaattatcatgatgcgccgatcgtcggcatcgctgtggtcaacgaacatggacggtttttcctgcgcccggagacggcgcttgccgatccgcagtttgtcgcctggcttggtgatgaaacgaagaaaaaaagcatgtttgactcaaagcgcgcggcagtcgccttgaaatggaaaggaattgagctatgcggcgtttcctttgatttattgctggccgcctatttgcttgatccggcgcaaggtgttgatgatgtggctgccgcagcaaaaatgaagcaatacgaagcggtgcgctcggatgaagcggtgtatggcaaaggggcgaagcgggccgtgccggatgagccagtgctcgccgagcatctcgtccgcaaggcggcggcgatttgggcgctcgaacgtccgtttttggatgagctgcgccgcaacgaacaagatcggttgctcgtcgagctcgagcagccgttgtcttcgattttggcggaaatggaatttgccggagtgaaagtggatacgaagcggctcgaacagatgggcgaagagctcgccgagcagctgcgcacggtcgagcagcgcatttatgagctcgccggccaagaattcaacatcaattcaccgaaacagctcggcgtcattttatttgaaaaactgcagctgcccgtcttgaaaaaaacgaaaaccggctactccacttcggcggatgtgcttgaaaaacttgcgccttatcacgagatcgtggaaaacattttgcattaccgccagcttggcaagttgcagtcgacgtatattgaaggattgctgaaagtcgtgcgacccgatacaaagaaggtgcatacgattttcaatcaggcgttgacgcaaaccggacggctcagctcgacggagccgaacttgcaaaacattccgattcggcttgaggaaggacggaaaatccgccaagcgttcgtgccgtcggagtctgattggctcattttcgctgccgactactcgcaaattgagttgcgcgtcctcgcccatattgcggaagatgacaatttaatggaagcgttccgccgcgatttggatatccatacgaaaacagcgatggacattttccaagtgagcgaggacgaagtgacgcccaacatgcgccgtcaggcgaaggcggtcaactttgggatcgtttacgggatcagtgattacggcttggcgcaaaacttaaatatttcacgcaaagaggccgctgaattcatcgagcgctacttcgaaagcttccctggcgtgaagcggtatatggaaaacattgtgcaagaagcaaaacagaaagggtatgtgacgacgctgctgcatcggcgccgctatttgaatgatatcacgagccgcaacttcaacgtccgcagctttgctgaacggatggcgatgaacacgccgattcaagggagcgccgctgacattattaaaaaggcgatgatcgatctgaacgctagactgaaggaagagcggctgcaagcgcgccttttgctacaggtgcatgacgagctcattttggaggcgccgaaagaagagatggagcggctgtgccggctcgttccggaagtgatggagcaagcggtcacacttcgcgtgccgctcaaagtcgattaccattatggctcgacgtggtatgacgcgaaataaaaaggatcc

SEQ ID NO: 2346 - DNA, 2712 bp, Artificial Sequence
  Description of Artificial Sequence: Synthetic DNA sequence of Bacillus caldolyticus EA1 DNA polymerase P798V
atgaaatacctgctgccgaccgctgctgctggtctgctgctcctcgctgcccagccggcgatggccatgggattgaaaaaaaagcttgttttaatcgacggcagcagcgtggcgtaccgcgcctttttcgccttgccgcttttgcataacgacaaaggcatccatacgaacgccgtctacgggtttacgatgatgttgaataaaattttggcggaagaagagccaactcatatgcttgtcgcgtttgacgccgggaaaacgacgttccggcatgaagcgtttcaagagtataaaggtgggcgccagcagacgccaccggagctgtcggagcagtttccgctgttgcgcgagctgctgagggcgtatcgcatccccgcctatgaactcgagaactacgaagcggacgatattatcggaacgcttgccgcccgcgctgagcaggaagggtttgaggtgaaagtcatttccggcgaccgcgatctgacccagctcgcctccccccatgtgacggtggacattacgaaaaaagggattaccgatatcgaaccgtacacgccggaggcggtccgcgaaaaatacggcttaactccggaacaaatcgttgatttgaaaggattgatgggcgacaaatcggacaacattcccggagtgccgggcatcggggaaaagacggcggtcaagctgctcaagcaattcggcacggtcgaaaacgtgcttgcctccattgacgagatcaaaggcgaaaagttgaaagaaacgctgcgccaacaccgggagatggcgctgttaagcaaaaagctcgccgccattcgccgcgacgccccggtcgagctctcgcttgatgacatcgtctatcaaggggaagaccgggagaaagtggtcgctttatttaaagagcttgggtttcaatcgtttttagagaaaatggaatcgccgtcatcagaagaggaaaaaccgcttgccaagatggcatttacgcttgctgaccgcgtgacggaggagatgcttgccgacaaggcggcgcttgtcgttgaagtggtcgaggaaaattatcatgatgcgccgatcgtcggcatcgctgtggtcaacgaacatggacggtttttcctgcgcccggagacggcgcttgccgatccgcagtttgtcgcctggcttggtgatgaaacgaagaaaaaaagcatgtttgactcaaagcgcgcggcagtcgccttgaaatggaaaggaattgagctatgcggcgtttcctttgatttattgctggccgcctatttgcttgatccggcgcaaggtgttgatgatgtggctgccgcagcaaaaatgaagcaatacgaagcggtgcgctcggatgaagcggtgtatggcaaaggggcgaagcgggccgtgccggatgagccagtgctcgccgagcatctcgtccgcaaggcggcggcgatttgggcgctcgaacgtccgtttttggatgagctgcgccgcaacgaacaagatcggttgctcgtcgagctcgagcagccgttgtcttcgattttggcggaaatggaatttgccggagtgaaagtggatacgaagcggctcgaacagatgggcgaagagctcgccgagcagctgcgcacggtcgagcagcgcatttatgagctcgccggccaagaattcaacatcaattcaccgaaacagctcggcgtcattttatttgaaaaactgcagctgcccgtcttgaaaaaaacgaaaaccggctactccacttcggcggatgtgcttgaaaaacttgcgccttatcacgagatcgtggaaaacattttgcattaccgccagcttggcaagttgcagtcgacgtatattgaaggattgctgaaagtcgtgcgacccgatacaaagaaggtgcatacgattttcaatcaggcgttgacgcaaaccggacggctcagctcgacggagccgaacttgcaaaacattccgattcggcttgaggaaggacggaaaatccgccaagcgttcgtgccgtcggagtctgattggctcattttcgctgccgactactcgcaaattgagttgcgcgtcctcgcccatattgcggaagatgacaatttaatggaagcgttccgccgcgatttggatatccatacgaaaacagcgatggacattttccaagtgagcgaggacgaagtgacgcccaacatgcgccgtcaggcgaaggcggtcaactttgggatcgtttacgggatcagtgattacggcttggcgcaaaacttaaatatttcacgcaaagaggccgctgaattcatcgagcgctacttcgaaagcttccctggcgtgaagcggtatatggaaaacattgtgcaagaagcaaaacagaaagggtatgtgacgacgctgctgcatcggcgccgctatttggtcgatatcacgagccgcaacttcaacgtccgcagctttgctgaacggatggcgatgaacacgccgattcaagggagcgccgctgacattattaaaaaggcgatgatcgatctgaacgctagactgaaggaagagcggctgcaagcgcgccttttgctacaggtgcatgacgagctcattttggaggcgccgaaagaagagatggagcggctgtgccggctcgttccggaagtgatggagcaagcggtcacacttcgcgtgccgctcaaagtcgattaccattatggctcgacgtggtatgacgcgaaataaaaaggatcc

SEQ ID NO: 2347 - DNA, 2712 bp, Artificial Sequence
  Description of Artificial Sequence: Synthetic DNA sequence of Bacillus caldolyticus EA1 DNA polymerase D799A
atgaaatacctgctgccgaccgctgctgctggtctgctgctcctcgctgcccagccggcgatggccatgggattgaaaaaaaagcttgttttaatcgacggcagcagcgtggcgtaccgcgcctttttcgccttgccgcttttgcataacgacaaaggcatccatacgaacgccgtctacgggtttacgatgatgttgaataaaattttggcggaagaagagccaactcatatgcttgtcgcgtttgacgccgggaaaacgacgttccggcatgaagcgtttcaagagtataaaggtgggcgccagcagacgccaccggagctgtcggagcagtttccgctgttgcgcgagctgctgagggcgtatcgcatccccgcctatgaactcgagaactacgaagcggacgatattatcggaacgcttgccgcccgcgctgagcaggaagggtttgaggtgaaagtcatttccggcgaccgcgatctgacccagctcgcctccccccatgtgacggtggacattacgaaaaaagggattaccgatatcgaaccgtacacgccggaggcggtccgcgaaaaatacggcttaactccggaacaaatcgttgatttgaaaggattgatgggcgacaaatcggacaacattcccggagtgccgggcatcggggaaaagacggcggtcaagctgctcaagcaattcggcacggtcgaaaacgtgcttgcctccattgacgagatcaaaggcgaaaagttgaaagaaacgctgcgccaacaccgggagatggcgctgttaagcaaaaagctcgccgccattcgccgcgacgccccggtcgagctctcgcttgatgacatcgtctatcaaggggaagaccgggagaaagtggtcgctttatttaaagagcttgggtttcaatcgtttttagagaaaatggaatcgccgtcatcagaagaggaaaaaccgcttgccaagatggcatttacgcttgctgaccgcgtgacggaggagatgcttgccgacaaggcggcgcttgtcgttgaagtggtcgaggaaaattatcatgatgcgccgatcgtcggcatcgctgtggtcaacgaacatggacggtttttcctgcgcccggagacggcgcttgccgatccgcagtttgtcgcctggcttggtgatgaaacgaagaaaaaaagcatgtttgactcaaagcgcgcggcagtcgccttgaaatggaaaggaattgagctatgcggcgtttcctttgatttattgctggccgcctatttgcttgatccggcgcaaggtgttgatgatgtggctgccgcagcaaaaatgaagcaatacgaagcggtgcgctcggatgaagcggtgtatggcaaaggggcgaagcgggccgtgccggatgagccagtgctcgccgagcatctcgtccgcaaggcggcggcgatttgggcgctcgaacgtccgtttttggatgagctgcgccgcaacgaacaagatcggttgctcgtcgagctcgagcagccgttgtcttcgattttggcggaaatggaatttgccggagtgaaagtggatacgaagcggctcgaacagatgggcgaagagctcgccgagcagctgcgcacggtcgagcagcgcatttatgagctcgccggccaagaattcaacatcaattcaccgaaacagctcggcgtcattttatttgaaaaactgcagctgcccgtcttgaaaaaaacgaaaaccggctactccacttcggcggatgtgcttgaaaaacttgcgccttatcacgagatcgtggaaaacattttgcattaccgccagcttggcaagttgcagtcgacgtatattgaaggattgctgaaagtcgtgcgacccgatacaaagaaggtgcatacgattttcaatcaggcgttgacgcaaaccggacggctcagctcgacggagccgaacttgcaaaacattccgattcggcttgaggaaggacggaaaatccgccaagcgttcgtgccgtcggagtctgattggctcattttcgctgccgactactcgcaaattgagttgcgcgtcctcgcccatattgcggaagatgacaatttaatggaagcgttccgccgcgatttggatatccatacgaaaacagcgatggacattttccaagtgagcgaggacgaagtgacgcccaacatgcgccgtcaggcgaaggcggtcaactttgggatcgtttacgggatcagtgattacggcttggcgcaaaacttaaatatttcacgcaaagaggccgctgaattcatcgagcgctacttcgaaagcttccctggcgtgaagcggtatatggaaaacattgtgcaagaagcaaaacagaaagggtatgtgacgacgctgctgcatcggcgccgctatttgccggctatcacgagccgcaacttcaacgtccgcagctttgctgaacggatggcgatgaacacgccgattcaagggagcgccgctgacattattaaaaaggcgatgatcgatctgaacgctagactgaaggaagagcggctgcaagcgcgccttttgctacaggtgcatgacgagctcattttggaggcgccgaaagaagagatggagcggctgtgccggctcgttccggaagtgatggagcaagcggtcacacttcgcgtgccgctcaaagtcgattaccattatggctcgacgtggtatgacgcgaaataaaaaggatcc

SEQ ID NO: 2348 - DNA, 2712 bp, Artificial Sequence
  Description of Artificial Sequence: Synthetic DNA sequence of Bacillus caldolyticus EA1 DNA polymerase D799R
atgaaatacctgctgccgaccgctgctgctggtctgctgctcctcgctgcccagccggcgatggccatgggattgaaaaaaaagcttgttttaatcgacggcagcagcgtggcgtaccgcgcctttttcgccttgccgcttttgcataacgacaaaggcatccatacgaacgccgtctacgggtttacgatgatgttgaataaaattttggcggaagaagagccaactcatatgcttgtcgcgtttgacgccgggaaaacgacgttccggcatgaagcgtttcaagagtataaaggtgggcgccagcagacgccaccggagctgtcggagcagtttccgctgttgcgcgagctgctgagggcgtatcgcatccccgcctatgaactcgagaactacgaagcggacgatattatcggaacgcttgccgcccgcgctgagcaggaagggtttgaggtgaaagtcatttccggcgaccgcgatctgacccagctcgcctccccccatgtgacggtggacattacgaaaaaagggattaccgatatcgaaccgtacacgccggaggcggtccgcgaaaaatacggcttaactccggaacaaatcgttgatttgaaaggattgatgggcgacaaatcggacaacattcccggagtgccgggcatcggggaaaagacggcggtcaagctgctcaagcaattcggcacggtcgaaaacgtgcttgcctccattgacgagatcaaaggcgaaaagttgaaagaaacgctgcgccaacaccgggagatggcgctgttaagcaaaaagctcgccgccattcgccgcgacgccccggtcgagctctcgcttgatgacatcgtctatcaaggggaagaccgggagaaagtggtcgctttatttaaagagcttgggtttcaatcgtttttagagaaaatggaatcgccgtcatcagaagaggaaaaaccgcttgccaagatggcatttacgcttgctgaccgcgtgacggaggagatgcttgccgacaaggcggcgcttgtcgttgaagtggtcgaggaaaattatcatgatgcgccgatcgtcggcatcgctgtggtcaacgaacatggacggtttttcctgcgcccggagacggcgcttgccgatccgcagtttgtcgcctggcttggtgatgaaacgaagaaaaaaagcatgtttgactcaaagcgcgcggcagtcgccttgaaatggaaaggaattgagctatgcggcgtttcctttgatttattgctggccgcctatttgcttgatccggcgcaaggtgttgatgatgtggctgccgcagcaaaaatgaagcaatacgaagcggtgcgctcggatgaagcggtgtatggcaaaggggcgaagcgggccgtgccggatgagccagtgctcgccgagcatctcgtccgcaaggcggcggcgatttgggcgctcgaacgtccgtttttggatgagctgcgccgcaacgaacaagatcggttgctcgtcgagctcgagcagccgttgtcttcgattttggcggaaatggaatttgccggagtgaaagtggatacgaagcggctcgaacagatgggcgaagagctcgccgagcagctgcgcacggtcgagcagcgcatttatgagctcgccggccaagaattcaacatcaattcaccgaaacagctcggcgtcattttatttgaaaaactgcagctgcccgtcttgaaaaaaacgaaaaccggctactccacttcggcggatgtgcttgaaaaacttgcgccttatcacgagatcgtggaaaacattttgcattaccgccagcttggcaagttgcagtcgacgtatattgaaggattgctgaaagtcgtgcgacccgatacaaagaaggtgcatacgattttcaatcaggcgttgacgcaaaccggacggctcagctcgacggagccgaacttgcaaaacattccgattcggcttgaggaaggacggaaaatccgccaagcgttcgtgccgtcggagtctgattggctcattttcgctgccgactactcgcaaattgagttgcgcgtcctcgcccatattgcggaagatgacaatttaatggaagcgttccgccgcgatttggatatccatacgaaaacagcgatggacattttccaagtgagcgaggacgaagtgacgcccaacatgcgccgtcaggcgaaggcggtcaactttgggatcgtttacgggatcagtgattacggcttggcgcaaaacttaaatatttcacgcaaagaggccgctgaattcatcgagcgctacttcgaaagcttccctggcgtgaagcggtatatggaaaacattgtgcaagaagcaaaacagaaagggtatgtgacgacgctgctgcatcggcgccgctatttgccgcgaatcacgagccgcaacttcaacgtccgcagctttgctgaacggatggcgatgaacacgccgattcaagggagcgccgctgacattattaaaaaggcgatgatcgatctgaacgctagactgaaggaagagcggctgcaagcgcgccttttgctacaggtgcatgacgagctcattttggaggcgccgaaagaagagatggagcggctgtgccggctcgttccggaagtgatggagcaagcggtcacacttcgcgtgccgctcaaagtcgattaccattatggctcgacgtggtatgacgcgaaataaaaaggatcc

SEQ ID NO: 2349 - DNA, 2712 bp, Artificial Sequence
  Description of Artificial Sequence: Synthetic DNA sequence of Bacillus caldolyticus EA1 DNA polymerase D799C
atgaaatacctgctgccgaccgctgctgctggtctgctgctcctcgctgcccagccggcgatggccatgggattgaaaaaaaagcttgttttaatcgacggcagcagcgtggcgtaccgcgcctttttcgccttgccgcttttgcataacgacaaaggcatccatacgaacgccgtctacgggtttacgatgatgttgaataaaattttggcggaagaagagccaactcatatgcttgtcgcgtttgacgccgggaaaacgacgttccggcatgaagcgtttcaagagtataaaggtgggcgccagcagacgccaccggagctgtcggagcagtttccgctgttgcgcgagctgctgagggcgtatcgcatccccgcctatgaactcgagaactacgaagcggacgatattatcggaacgcttgccgcccgcgctgagcaggaagggtttgaggtgaaagtcatttccggcgaccgcgatctgacccagctcgcctccccccatgtgacggtggacattacgaaaaaagggattaccgatatcgaaccgtacacgccggaggcggtccgcgaaaaatacggcttaactccggaacaaatcgttgatttgaaaggattgatgggcgacaaatcggacaacattcccggagtgccgggcatcggggaaaagacggcggtcaagctgctcaagcaattcggcacggtcgaaaacgtgcttgcctccattgacgagatcaaaggcgaaaagttgaaagaaacgctgcgccaacaccgggagatggcgctgttaagcaaaaagctcgccgccattcgccgcgacgccccggtcgagctctcgcttgatgacatcgtctatcaaggggaagaccgggagaaagtggtcgctttatttaaagagcttgggtttcaatcgtttttagagaaaatggaatcgccgtcatcagaagaggaaaaaccgcttgccaagatggcatttacgcttgctgaccgcgtgacggaggagatgcttgccgacaaggcggcgcttgtcgttgaagtggtcgaggaaaattatcatgatgcgccgatcgtcggcatcgctgtggtcaacgaacatggacggtttttcctgcgcccggagacggcgcttgccgatccgcagtttgtcgcctggcttggtgatgaaacgaagaaaaaaagcatgtttgactcaaagcgcgcggcagtcgccttgaaatggaaaggaattgagctatgcggcgtttcctttgatttattgctggccgcctatttgcttgatccggcgcaaggtgttgatgatgtggctgccgcagcaaaaatgaagcaatacgaagcggtgcgctcggatgaagcggtgtatggcaaaggggcgaagcgggccgtgccggatgagccagtgctcgccgagcatctcgtccgcaaggcggcggcgatttgggcgctcgaacgtccgtttttggatgagctgcgccgcaacgaacaagatcggttgctcgtcgagctcgagcagccgttgtcttcgattttggcggaaatggaatttgccggagtgaaagtggatacgaagcggctcgaacagatgggcgaagagctcgccgagcagctgcgcacggtcgagcagcgcatttatgagctcgccggccaagaattcaacatcaattcaccgaaacagctcggcgtcattttatttgaaaaactgcagctgcccgtcttgaaaaaaacgaaaaccggctactccacttcggcggatgtgcttgaaaaacttgcgccttatcacgagatcgtggaaaacattttgcattaccgccagcttggcaagttgcagtcgacgtatattgaaggattgctgaaagtcgtgcgacccgatacaaagaaggtgcatacgattttcaatcaggcgttgacgcaaaccggacggctcagctcgacggagccgaacttgcaaaacattccgattcggcttgaggaaggacggaaaatccgccaagcgttcgtgccgtcggagtctgattggctcattttcgctgccgactactcgcaaattgagttgcgcgtcctcgcccatattgcggaagatgacaatttaatggaagcgttccgccgcgatttggatatccatacgaaaacagcgatggacattttccaagtgagcgaggacgaagtgacgcccaacatgcgccgtcaggcgaaggcggtcaactttgggatcgtttacgggatcagtgattacggcttggcgcaaaacttaaatatttcacgcaaagaggccgctgaattcatcgagcgctacttcgaaagcttccctggcgtgaagcggtatatggaaaacattgtgcaagaagcaaaacagaaagggtatgtgacgacgctgctgcatcggcgccgctatttgccgtgtatcacgagccgcaacttcaacgtccgcagctttgctgaacggatggcgatgaacacgccgattcaagggagcgccgctgacattattaaaaaggcgatgatcgatctgaacgctagactgaaggaagagcggctgcaagcgcgccttttgctacaggtgcatgacgagctcattttggaggcgccgaaagaagagatggagcggctgtgccggctcgttccggaagtgatggagcaagcggtcacacttcgcgtgccgctcaaagtcgattaccattatggctcgacgtggtatgacgcgaaataaaaaggatcc

SEQ ID NO: 2350 - DNA, 2712 bp, Artificial Sequence
  Description of Artificial Sequence: Synthetic DNA sequence of Bacillus caldolyticus EA1 DNA polymerase D799G
atgaaatacctgctgccgaccgctgctgctggtctgctgctcctcgctgcccagccggcgatggccatgggattgaaaaaaaagcttgttttaatcgacggcagcagcgtggcgtaccgcgcctttttcgccttgccgcttttgcataacgacaaaggcatccatacgaacgccgtctacgggtttacgatgatgttgaataaaattttggcggaagaagagccaactcatatgcttgtcgcgtttgacgccgggaaaacgacgttccggcatgaagcgtttcaagagtataaaggtgggcgccagcagacgccaccggagctgtcggagcagtttccgctgttgcgcgagctgctgagggcgtatcgcatccccgcctatgaactcgagaactacgaagcggacgatattatcggaacgcttgccgcccgcgctgagcaggaagggtttgaggtgaaagtcatttccggcgaccgcgatctgacccagctcgcctccccccatgtgacggtggacattacgaaaaaagggattaccgatatcgaaccgtacacgccggaggcggtccgcgaaaaatacggcttaactccggaacaaatcgttgatttgaaaggattgatgggcgacaaatcggacaacattcccggagtgccgggcatcggggaaaagacggcggtcaagctgctcaagcaattcggcacggtcgaaaacgtgcttgcctccattgacgagatcaaaggcgaaaagttgaaagaaacgctgcgccaacaccgggagatggcgctgttaagcaaaaagctcgccgccattcgccgcgacgccccggtcgagctctcgcttgatgacatcgtctatcaaggggaagaccgggagaaagtggtcgctttatttaaagagcttgggtttcaatcgtttttagagaaaatggaatcgccgtcatcagaagaggaaaaaccgcttgccaagatggcatttacgcttgctgaccgcgtgacggaggagatgcttgccgacaaggcggcgcttgtcgttgaagtggtcgaggaaaattatcatgatgcgccgatcgtcggcatcgctgtggtcaacgaacatggacggtttttcctgcgcccggagacggcgcttgccgatccgcagtttgtcgcctggcttggtgatgaaacgaagaaaaaaagcatgtttgactcaaagcgcgcggcagtcgccttgaaatggaaaggaattgagctatgcggcgtttcctttgatttattgctggccgcctatttgcttgatccggcgcaaggtgttgatgatgtggctgccgcagcaaaaatgaagcaatacgaagcggtgcgctcggatgaagcggtgtatggcaaaggggcgaagcgggccgtgccggatgagccagtgctcgccgagcatctcgtccgcaaggcggcggcgatttgggcgctcgaacgtccgtttttggatgagctgcgccgcaacgaacaagatcggttgctcgtcgagctcgagcagccgttgtcttcgattttggcggaaatggaatttgccggagtgaaagtggatacgaagcggctcgaacagatgggcgaagagctcgccgagcagctgcgcacggtcgagcagcgcatttatgagctcgccggccaagaattcaacatcaattcaccgaaacagctcggcgtcattttatttgaaaaactgcagctgcccgtcttgaaaaaaacgaaaaccggctactccacttcggcggatgtgcttgaaaaacttgcgccttatcacgagatcgtggaaaacattttgcattaccgccagcttggcaagttgcagtcgacgtatattgaaggattgctgaaagtcgtgcgacccgatacaaagaaggtgcatacgattttcaatcaggcgttgacgcaaaccggacggctcagctcgacggagccgaacttgcaaaacattccgattcggcttgaggaaggacggaaaatccgccaagcgttcgtgccgtcggagtctgattggctcattttcgctgccgactactcgcaaattgagttgcgcgtcctcgcccatattgcggaagatgacaatttaatggaagcgttccgccgcgatttggatatccatacgaaaacagcgatggacattttccaagtgagcgaggacgaagtgacgcccaacatgcgccgtcaggcgaaggcggtcaactttgggatcgtttacgggatcagtgattacggcttggcgcaaaacttaaatatttcacgcaaagaggccgctgaattcatcgagcgctacttcgaaagcttccctggcgtgaagcggtatatggaaaacattgtgcaagaagcaaaacagaaagggtatgtgacgacgctgctgcatcggcgccgctatttgccgggtatcacgagccgcaacttcaacgtccgcagctttgctgaacggatggcgatgaacacgccgattcaagggagcgccgctgacattattaaaaaggcgatgatcgatctgaacgctagactgaaggaagagcggctgcaagcgcgccttttgctacaggtgcatgacgagctcattttggaggcgccgaaagaagagatggagcggctgtgccggctcgttccggaagtgatggagcaagcggtcacacttcgcgtgccgctcaaagtcgattaccattatggctcgacgtggtatgacgcgaaataaaaaggatcc

SEQ ID NO: 2351 - DNA, 2712 bp, Artificial Sequence
  Description of Artificial Sequence: Synthetic DNA sequence of Bacillus caldolyticus EA1 DNA polymerase D799Q
atgaaatacctgctgccgaccgctgctgctggtctgctgctcctcgctgcccagccggcgatggccatgggattgaaaaaaaagcttgttttaatcgacggcagcagcgtggcgtaccgcgcctttttcgccttgccgcttttgcataacgacaaaggcatccatacgaacgccgtctacgggtttacgatgatgttgaataaaattttggcggaagaagagccaactcatatgcttgtcgcgtttgacgccgggaaaacgacgttccggcatgaagcgtttcaagagtataaaggtgggcgccagcagacgccaccggagctgtcggagcagtttccgctgttgcgcgagctgctgagggcgtatcgcatccccgcctatgaactcgagaactacgaagcggacgatattatcggaacgcttgccgcccgcgctgagcaggaagggtttgaggtgaaagtcatttccggcgaccgcgatctgacccagctcgcctccccccatgtgacggtggacattacgaaaaaagggattaccgatatcgaaccgtacacgccggaggcggtccgcgaaaaatacggcttaactccggaacaaatcgttgatttgaaaggattgatgggcgacaaatcggacaacattcccggagtgccgggcatcggggaaaagacggcggtcaagctgctcaagcaattcggcacggtcgaaaacgtgcttgcctccattgacgagatcaaaggcgaaaagttgaaagaaacgctgcgccaacaccgggagatggcgctgttaagcaaaaagctcgccgccattcgccgcgacgccccggtcgagctctcgcttgatgacatcgtctatcaaggggaagaccgggagaaagtggtcgctttatttaaagagcttgggtttcaatcgtttttagagaaaatggaatcgccgtcatcagaagaggaaaaaccgcttgccaagatggcatttacgcttgctgaccgcgtgacggaggagatgcttgccgacaaggcggcgcttgtcgttgaagtggtcgaggaaaattatcatgatgcgccgatcgtcggcatcgctgtggtcaacgaacatggacggtttttcctgcgcccggagacggcgcttgccgatccgcagtttgtcgcctggcttggtgatgaaacgaagaaaaaaagcatgtttgactcaaagcgcgcggcagtcgccttgaaatggaaaggaattgagctatgcggcgtttcctttgatttattgctggccgcctatttgcttgatccggcgcaaggtgttgatgatgtggctgccgcagcaaaaatgaagcaatacgaagcggtgcgctcggatgaagcggtgtatggcaaaggggcgaagcgggccgtgccggatgagccagtgctcgccgagcatctcgtccgcaaggcggcggcgatttgggcgctcgaacgtccgtttttggatgagctgcgccgcaacgaacaagatcggttgctcgtcgagctcgagcagccgttgtcttcgattttggcggaaatggaatttgccggagtgaaagtggatacgaagcggctcgaacagatgggcgaagagctcgccgagcagctgcgcacggtcgagcagcgcatttatgagctcgccggccaagaattcaacatcaattcaccgaaacagctcggcgtcattttatttgaaaaactgcagctgcccgtcttgaaaaaaacgaaaaccggctactccacttcggcggatgtgcttgaaaaacttgcgccttatcacgagatcgtggaaaacattttgcattaccgccagcttggcaagttgcagtcgacgtatattgaaggattgctgaaagtcgtgcgacccgatacaaagaaggtgcatacgattttcaatcaggcgttgacgcaaaccggacggctcagctcgacggagccgaacttgcaaaacattccgattcggcttgaggaaggacggaaaatccgccaagcgttcgtgccgtcggagtctgattggctcattttcgctgccgactactcgcaaattgagttgcgcgtcctcgcccatattgcggaagatgacaatttaatggaagcgttccgccgcgatttggatatccatacgaaaacagcgatggacattttccaagtgagcgaggacgaagtgacgcccaacatgcgccgtcaggcgaaggcggtcaactttgggatcgtttacgggatcagtgattacggcttggcgcaaaacttaaatatttcacgcaaagaggccgctgaattcatcgagcgctacttcgaaagcttccctggcgtgaagcggtatatggaaaacattgtgcaagaagcaaaacagaaagggtatgtgacgacgctgctgcatcggcgccgctatttgccgcaaatcacgagccgcaacttcaacgtccgcagctttgctgaacggatggcgatgaacacgccgattcaagggagcgccgctgacattattaaaaaggcgatgatcgatctgaacgctagactgaaggaagagcggctgcaagcgcgccttttgctacaggtgcatgacgagctcattttggaggcgccgaaagaagagatggagcggctgtgccggctcgttccggaagtgatggagcaagcggtcacacttcgcgtgccgctcaaagtcgattaccattatggctcgacgtggtatgacgcgaaataaaaaggatcc

SEQ ID NO: 2352 - DNA, 2712 bp, Artificial Sequence
  Description of Artificial Sequence: Synthetic DNA sequence of Bacillus caldolyticus EA1 DNA polymerase D799H
atgaaatacctgctgccgaccgctgctgctggtctgctgctcctcgctgcccagccggcgatggccatgggattgaaaaaaaagcttgttttaatcgacggcagcagcgtggcgtaccgcgcctttttcgccttgccgcttttgcataacgacaaaggcatccatacgaacgccgtctacgggtttacgatgatgttgaataaaattttggcggaagaagagccaactcatatgcttgtcgcgtttgacgccgggaaaacgacgttccggcatgaagcgtttcaagagtataaaggtgggcgccagcagacgccaccggagctgtcggagcagtttccgctgttgcgcgagctgctgagggcgtatcgcatccccgcctatgaactcgagaactacgaagcggacgatattatcggaacgcttgccgcccgcgctgagcaggaagggtttgaggtgaaagtcatttccggcgaccgcgatctgacccagctcgcctccccccatgtgacggtggacattacgaaaaaagggattaccgatatcgaaccgtacacgccggaggcggtccgcgaaaaatacggcttaactccggaacaaatcgttgatttgaaaggattgatgggcgacaaatcggacaacattcccggagtgccgggcatcggggaaaagacggcggtcaagctgctcaagcaattcggcacggtcgaaaacgtgcttgcctccattgacgagatcaaaggcgaaaagttgaaagaaacgctgcgccaacaccgggagatggcgctgttaagcaaaaagctcgccgccattcgccgcgacgccccggtcgagctctcgcttgatgacatcgtctatcaaggggaagaccgggagaaagtggtcgctttatttaaagagcttgggtttcaatcgtttttagagaaaatggaatcgccgtcatcagaagaggaaaaaccgcttgccaagatggcatttacgcttgctgaccgcgtgacggaggagatgcttgccgacaaggcggcgcttgtcgttgaagtggtcgaggaaaattatcatgatgcgccgatcgtcggcatcgctgtggtcaacgaacatggacggtttttcctgcgcccggagacggcgcttgccgatccgcagtttgtcgcctggcttggtgatgaaacgaagaaaaaaagcatgtttgactcaaagcgcgcggcagtcgccttgaaatggaaaggaattgagctatgcggcgtttcctttgatttattgctggccgcctatttgcttgatccggcgcaaggtgttgatgatgtggctgccgcagcaaaaatgaagcaatacgaagcggtgcgctcggatgaagcggtgtatggcaaaggggcgaagcgggccgtgccggatgagccagtgctcgccgagcatctcgtccgcaaggcggcggcgatttgggcgctcgaacgtccgtttttggatgagctgcgccgcaacgaacaagatcggttgctcgtcgagctcgagcagccgttgtcttcgattttggcggaaatggaatttgccggagtgaaagtggatacgaagcggctcgaacagatgggcgaagagctcgccgagcagctgcgcacggtcgagcagcgcatttatgagctcgccggccaagaattcaacatcaattcaccgaaacagctcggcgtcattttatttgaaaaactgcagctgcccgtcttgaaaaaaacgaaaaccggctactccacttcggcggatgtgcttgaaaaacttgcgccttatcacgagatcgtggaaaacattttgcattaccgccagcttggcaagttgcagtcgacgtatattgaaggattgctgaaagtcgtgcgacccgatacaaagaaggtgcatacgattttcaatcaggcgttgacgcaaaccggacggctcagctcgacggagccgaacttgcaaaacattccgattcggcttgaggaaggacggaaaatccgccaagcgttcgtgccgtcggagtctgattggctcattttcgctgccgactactcgcaaattgagttgcgcgtcctcgcccatattgcggaagatgacaatttaatggaagcgttccgccgcgatttggatatccatacgaaaacagcgatggacattttccaagtgagcgaggacgaagtgacgcccaacatgcgccgtcaggcgaaggcggtcaactttgggatcgtttacgggatcagtgattacggcttggcgcaaaacttaaatatttcacgcaaagaggccgctgaattcatcgagcgctacttcgaaagcttccctggcgtgaagcggtatatggaaaacattgtgcaagaagcaaaacagaaagggtatgtgacgacgctgctgcatcggcgccgctatttgccgcatatcacgagccgcaacttcaacgtccgcagctttgctgaacggatggcgatgaacacgccgattcaagggagcgccgctgacattattaaaaaggcgatgatcgatctgaacgctagactgaaggaagagcggctgcaagcgcgccttttgctacaggtgcatgacgagctcattttggaggcgccgaaagaagagatggagcggctgtgccggctcgttccggaagtgatggagcaagcggtcacacttcgcgtgccgctcaaagtcgattaccattatggctcgacgtggtatgacgcgaaataaaaaggatcc

SEQ ID NO: 2353 - DNA, 2712 bp, Artificial Sequence
  Description of Artificial Sequence: Synthetic DNA sequence of Bacillus caldolyticus EA1 DNA polymerase D799I
atgaaatacctgctgccgaccgctgctgctggtctgctgctcctcgctgcccagccggcgatggccatgggattgaaaaaaaagcttgttttaatcgacggcagcagcgtggcgtaccgcgcctttttcgccttgccgcttttgcataacgacaaaggcatccatacgaacgccgtctacgggtttacgatgatgttgaataaaattttggcggaagaagagccaactcatatgcttgtcgcgtttgacgccgggaaaacgacgttccggcatgaagcgtttcaagagtataaaggtgggcgccagcagacgccaccggagctgtcggagcagtttccgctgttgcgcgagctgctgagggcgtatcgcatccccgcctatgaactcgagaactacgaagcggacgatattatcggaacgcttgccgcccgcgctgagcaggaagggtttgaggtgaaagtcatttccggcgaccgcgatctgacccagctcgcctccccccatgtgacggtggacattacgaaaaaagggattaccgatatcgaaccgtacacgccggaggcggtccgcgaaaaatacggcttaactccggaacaaatcgttgatttgaaaggattgatgggcgacaaatcggacaacattcccggagtgccgggcatcggggaaaagacggcggtcaagctgctcaagcaattcggcacggtcgaaaacgtgcttgcctccattgacgagatcaaaggcgaaaagttgaaagaaacgctgcgccaacaccgggagatggcgctgttaagcaaaaagctcgccgccattcgccgcgacgccccggtcgagctctcgcttgatgacatcgtctatcaaggggaagaccgggagaaagtggtcgctttatttaaagagcttgggtttcaatcgtttttagagaaaatggaatcgccgtcatcagaagaggaaaaaccgcttgccaagatggcatttacgcttgctgaccgcgtgacggaggagatgcttgccgacaaggcggcgcttgtcgttgaagtggtcgaggaaaattatcatgatgcgccgatcgtcggcatcgctgtggtcaacgaacatggacggtttttcctgcgcccggagacggcgcttgccgatccgcagtttgtcgcctggcttggtgatgaaacgaagaaaaaaagcatgtttgactcaaagcgcgcggcagtcgccttgaaatggaaaggaattgagctatgcggcgtttcctttgatttattgctggccgcctatttgcttgatccggcgcaaggtgttgatgatgtggctgccgcagcaaaaatgaagcaatacgaagcggtgcgctcggatgaagcggtgtatggcaaaggggcgaagcgggccgtgccggatgagccagtgctcgccgagcatctcgtccgcaaggcggcggcgatttgggcgctcgaacgtccgtttttggatgagctgcgccgcaacgaacaagatcggttgctcgtcgagctcgagcagccgttgtcttcgattttggcggaaatggaatttgccggagtgaaagtggatacgaagcggctcgaacagatgggcgaagagctcgccgagcagctgcgcacggtcgagcagcgcatttatgagctcgccggccaagaattcaacatcaattcaccgaaacagctcggcgtcattttatttgaaaaactgcagctgcccgtcttgaaaaaaacgaaaaccggctactccacttcggcggatgtgcttgaaaaacttgcgccttatcacgagatcgtggaaaacattttgcattaccgccagcttggcaagttgcagtcgacgtatattgaaggattgctgaaagtcgtgcgacccgatacaaagaaggtgcatacgattttcaatcaggcgttgacgcaaaccggacggctcagctcgacggagccgaacttgcaaaacattccgattcggcttgaggaaggacggaaaatccgccaagcgttcgtgccgtcggagtctgattggctcattttcgctgccgactactcgcaaattgagttgcgcgtcctcgcccatattgcggaagatgacaatttaatggaagcgttccgccgcgatttggatatccatacgaaaacagcgatggacattttccaagtgagcgaggacgaagtgacgcccaacatgcgccgtcaggcgaaggcggtcaactttgggatcgtttacgggatcagtgattacggcttggcgcaaaacttaaatatttcacgcaaagaggccgctgaattcatcgagcgctacttcgaaagcttccctggcgtgaagcggtatatggaaaacattgtgcaagaagcaaaacagaaagggtatgtgacgacgctgctgcatcggcgccgctatttgccgattatcacgagccgcaacttcaacgtccgcagctttgctgaacggatggcgatgaacacgccgattcaagggagcgccgctgacattattaaaaaggcgatgatcgatctgaacgctagactgaaggaagagcggctgcaagcgcgccttttgctacaggtgcatgacgagctcattttggaggcgccgaaagaagagatggagcggctgtgccggctcgttccggaagtgatggagcaagcggtcacacttcgcgtgccgctcaaagtcgattaccattatggctcgacgtggtatgacgcgaaataaaaaggatcc

SEQ ID NO: 2354 - DNA, 2712 bp, Artificial Sequence
  Description of Artificial Sequence: Synthetic DNA sequence of Bacillus caldolyticus EA1 DNA polymerase D799L
atgaaatacctgctgccgaccgctgctgctggtctgctgctcctcgctgcccagccggcgatggccatgggattgaaaaaaaagcttgttttaatcgacggcagcagcgtggcgtaccgcgcctttttcgccttgccgcttttgcataacgacaaaggcatccatacgaacgccgtctacgggtttacgatgatgttgaataaaattttggcggaagaagagccaactcatatgcttgtcgcgtttgacgccgggaaaacgacgttccggcatgaagcgtttcaagagtataaaggtgggcgccagcagacgccaccggagctgtcggagcagtttccgctgttgcgcgagctgctgagggcgtatcgcatccccgcctatgaactcgagaactacgaagcggacgatattatcggaacgcttgccgcccgcgctgagcaggaagggtttgaggtgaaagtcatttccggcgaccgcgatctgacccagctcgcctccccccatgtgacggtggacattacgaaaaaagggattaccgatatcgaaccgtacacgccggaggcggtccgcgaaaaatacggcttaactccggaacaaatcgttgatttgaaaggattgatgggcgacaaatcggacaacattcccggagtgccgggcatcggggaaaagacggcggtcaagctgctcaagcaattcggcacggtcgaaaacgtgcttgcctccattgacgagatcaaaggcgaaaagttgaaagaaacgctgcgccaacaccgggagatggcgctgttaagcaaaaagctcgccgccattcgccgcgacgccccggtcgagctctcgcttgatgacatcgtctatcaaggggaagaccgggagaaagtggtcgctttatttaaagagcttgggtttcaatcgtttttagagaaaatggaatcgccgtcatcagaagaggaaaaaccgcttgccaagatggcatttacgcttgctgaccgcgtgacggaggagatgcttgccgacaaggcggcgcttgtcgttgaagtggtcgaggaaaattatcatgatgcgccgatcgtcggcatcgctgtggtcaacgaacatggacggtttttcctgcgcccggagacggcgcttgccgatccgcagtttgtcgcctggcttggtgatgaaacgaagaaaaaaagcatgtttgactcaaagcgcgcggcagtcgccttgaaatggaaaggaattgagctatgcggcgtttcctttgatttattgctggccgcctatttgcttgatccggcgcaaggtgttgatgatgtggctgccgcagcaaaaatgaagcaatacgaagcggtgcgctcggatgaagcggtgtatggcaaaggggcgaagcgggccgtgccggatgagccagtgctcgccgagcatctcgtccgcaaggcggcggcgatttgggcgctcgaacgtccgtttttggatgagctgcgccgcaacgaacaagatcggttgctcgtcgagctcgagcagccgttgtcttcgattttggcggaaatggaatttgccggagtgaaagtggatacgaagcggctcgaacagatgggcgaagagctcgccgagcagctgcgcacggtcgagcagcgcatttatgagctcgccggccaagaattcaacatcaattcaccgaaacagctcggcgtcattttatttgaaaaactgcagctgcccgtcttgaaaaaaacgaaaaccggctactccacttcggcggatgtgcttgaaaaacttgcgccttatcacgagatcgtggaaaacattttgcattaccgccagcttggcaagttgcagtcgacgtatattgaaggattgctgaaagtcgtgcgacccgatacaaagaaggtgcatacgattttcaatcaggcgttgacgcaaaccggacggctcagctcgacggagccgaacttgcaaaacattccgattcggcttgaggaaggacggaaaatccgccaagcgttcgtgccgtcggagtctgattggctcattttcgctgccgactactcgcaaattgagttgcgcgtcctcgcccatattgcggaagatgacaatttaatggaagcgttccgccgcgatttggatatccatacgaaaacagcgatggacattttccaagtgagcgaggacgaagtgacgcccaacatgcgccgtcaggcgaaggcggtcaactttgggatcgtttacgggatcagtgattacggcttggcgcaaaacttaaatatttcacgcaaagaggccgctgaattcatcgagcgctacttcgaaagcttccctggcgtgaagcggtatatggaaaacattgtgcaagaagcaaaacagaaagggtatgtgacgacgctgctgcatcggcgccgctatttgccgttaatcacgagccgcaacttcaacgtccgcagctttgctgaacggatggcgatgaacacgccgattcaagggagcgccgctgacattattaaaaaggcgatgatcgatctgaacgctagactgaaggaagagcggctgcaagcgcgccttttgctacaggtgcatgacgagctcattttggaggcgccgaaagaagagatggagcggctgtgccggctcgttccggaagtgatggagcaagcggtcacacttcgcgtgccgctcaaagtcgattaccattatggctcgacgtggtatgacgcgaaataaaaaggatcc

SEQ ID NO: 2355 - DNA, 2712 bp, Artificial Sequence
  Description of Artificial Sequence: Synthetic DNA sequence of Bacillus caldolyticus EA1 DNA polymerase D799K
atgaaatacctgctgccgaccgctgctgctggtctgctgctcctcgctgcccagccggcgatggccatgggattgaaaaaaaagcttgttttaatcgacggcagcagcgtggcgtaccgcgcctttttcgccttgccgcttttgcataacgacaaaggcatccatacgaacgccgtctacgggtttacgatgatgttgaataaaattttggcggaagaagagccaactcatatgcttgtcgcgtttgacgccgggaaaacgacgttccggcatgaagcgtttcaagagtataaaggtgggcgccagcagacgccaccggagctgtcggagcagtttccgctgttgcgcgagctgctgagggcgtatcgcatccccgcctatgaactcgagaactacgaagcggacgatattatcggaacgcttgccgcccgcgctgagcaggaagggtttgaggtgaaagtcatttccggcgaccgcgatctgacccagctcgcctccccccatgtgacggtggacattacgaaaaaagggattaccgatatcgaaccgtacacgccggaggcggtccgcgaaaaatacggcttaactccggaacaaatcgttgatttgaaaggattgatgggcgacaaatcggacaacattcccggagtgccgggcatcggggaaaagacggcggtcaagctgctcaagcaattcggcacggtcgaaaacgtgcttgcctccattgacgagatcaaaggcgaaaagttgaaagaaacgctgcgccaacaccgggagatggcgctgttaagcaaaaagctcgccgccattcgccgcgacgccccggtcgagctctcgcttgatgacatcgtctatcaaggggaagaccgggagaaagtggtcgctttatttaaagagcttgggtttcaatcgtttttagagaaaatggaatcgccgtcatcagaagaggaaaaaccgcttgccaagatggcatttacgcttgctgaccgcgtgacggaggagatgcttgccgacaaggcggcgcttgtcgttgaagtggtcgaggaaaattatcatgatgcgccgatcgtcggcatcgctgtggtcaacgaacatggacggtttttcctgcgcccggagacggcgcttgccgatccgcagtttgtcgcctggcttggtgatgaaacgaagaaaaaaagcatgtttgactcaaagcgcgcggcagtcgccttgaaatggaaaggaattgagctatgcggcgtttcctttgatttattgctggccgcctatttgcttgatccggcgcaaggtgttgatgatgtggctgccgcagcaaaaatgaagcaatacgaagcggtgcgctcggatgaagcggtgtatggcaaaggggcgaagcgggccgtgccggatgagccagtgctcgccgagcatctcgtccgcaaggcggcggcgatttgggcgctcgaacgtccgtttttggatgagctgcgccgcaacgaacaagatcggttgctcgtcgagctcgagcagccgttgtcttcgattttggcggaaatggaatttgccggagtgaaagtggatacgaagcggctcgaacagatgggcgaagagctcgccgagcagctgcgcacggtcgagcagcgcatttatgagctcgccggccaagaattcaacatcaattcaccgaaacagctcggcgtcattttatttgaaaaactgcagctgcccgtcttgaaaaaaacgaaaaccggctactccacttcggcggatgtgcttgaaaaacttgcgccttatcacgagatcgtggaaaacattttgcattaccgccagcttggcaagttgcagtcgacgtatattgaaggattgctgaaagtcgtgcgacccgatacaaagaaggtgcatacgattttcaatcaggcgttgacgcaaaccggacggctcagctcgacggagccgaacttgcaaaacattccgattcggcttgaggaaggacggaaaatccgccaagcgttcgtgccgtcggagtctgattggctcattttcgctgccgactactcgcaaattgagttgcgcgtcctcgcccatattgcggaagatgacaatttaatggaagcgttccgccgcgatttggatatccatacgaaaacagcgatggacattttccaagtgagcgaggacgaagtgacgcccaacatgcgccgtcaggcgaaggcggtcaactttgggatcgtttacgggatcagtgattacggcttggcgcaaaacttaaatatttcacgcaaagaggccgctgaattcatcgagcgctacttcgaaagcttccctggcgtgaagcggtatatggaaaacattgtgcaagaagcaaaacagaaagggtatgtgacgacgctgctgcatcggcgccgctatttgccgaaaatcacgagccgcaacttcaacgtccgcagctttgctgaacggatggcgatgaacacgccgattcaagggagcgccgctgacattattaaaaaggcgatgatcgatctgaacgctagactgaaggaagagcggctgcaagcgcgccttttgctacaggtgcatgacgagctcattttggaggcgccgaaagaagagatggagcggctgtgccggctcgttccggaagtgatggagcaagcggtcacacttcgcgtgccgctcaaagtcgattaccattatggctcgacgtggtatgacgcgaaataaaaaggatcc

SEQ ID NO: 2356 - DNA, 2712 bp, Artificial Sequence
  Description of Artificial Sequence: Synthetic DNA sequence of Bacillus caldolyticus EA1 DNA polymerase D799E
atgaaatacctgctgccgaccgctgctgctggtctgctgctcctcgctgcccagccggcgatggccatgggattgaaaaaaaagcttgttttaatcgacggcagcagcgtggcgtaccgcgcctttttcgccttgccgcttttgcataacgacaaaggcatccatacgaacgccgtctacgggtttacgatgatgttgaataaaattttggcggaagaagagccaactcatatgcttgtcgcgtttgacgccgggaaaacgacgttccggcatgaagcgtttcaagagtataaaggtgggcgccagcagacgccaccggagctgtcggagcagtttccgctgttgcgcgagctgctgagggcgtatcgcatccccgcctatgaactcgagaactacgaagcggacgatattatcggaacgcttgccgcccgcgctgagcaggaagggtttgaggtgaaagtcatttccggcgaccgcgatctgacccagctcgcctccccccatgtgacggtggacattacgaaaaaagggattaccgatatcgaaccgtacacgccggaggcggtccgcgaaaaatacggcttaactccggaacaaatcgttgatttgaaaggattgatgggcgacaaatcggacaacattcccggagtgccgggcatcggggaaaagacggcggtcaagctgctcaagcaattcggcacggtcgaaaacgtgcttgcctccattgacgagatcaaaggcgaaaagttgaaagaaacgctgcgccaacaccgggagatggcgctgttaagcaaaaagctcgccgccattcgccgcgacgccccggtcgagctctcgcttgatgacatcgtctatcaaggggaagaccgggagaaagtggtcgctttatttaaagagcttgggtttcaatcgtttttagagaaaatggaatcgccgtcatcagaagaggaaaaaccgcttgccaagatggcatttacgcttgctgaccgcgtgacggaggagatgcttgccgacaaggcggcgcttgtcgttgaagtggtcgaggaaaattatcatgatgcgccgatcgtcggcatcgctgtggtcaacgaacatggacggtttttcctgcgcccggagacggcgcttgccgatccgcagtttgtcgcctggcttggtgatgaaacgaagaaaaaaagcatgtttgactcaaagcgcgcggcagtcgccttgaaatggaaaggaattgagctatgcggcgtttcctttgatttattgctggccgcctatttgcttgatccggcgcaaggtgttgatgatgtggctgccgcagcaaaaatgaagcaatacgaagcggtgcgctcggatgaagcggtgtatggcaaaggggcgaagcgggccgtgccggatgagccagtgctcgccgagcatctcgtccgcaaggcggcggcgatttgggcgctcgaacgtccgtttttggatgagctgcgccgcaacgaacaagatcggttgctcgtcgagctcgagcagccgttgtcttcgattttggcggaaatggaatttgccggagtgaaagtggatacgaagcggctcgaacagatgggcgaagagctcgccgagcagctgcgcacggtcgagcagcgcatttatgagctcgccggccaagaattcaacatcaattcaccgaaacagctcggcgtcattttatttgaaaaactgcagctgcccgtcttgaaaaaaacgaaaaccggctactccacttcggcggatgtgcttgaaaaacttgcgccttatcacgagatcgtggaaaacattttgcattaccgccagcttggcaagttgcagtcgacgtatattgaaggattgctgaaagtcgtgcgacccgatacaaagaaggtgcatacgattttcaatcaggcgttgacgcaaaccggacggctcagctcgacggagccgaacttgcaaaacattccgattcggcttgaggaaggacggaaaatccgccaagcgttcgtgccgtcggagtctgattggctcattttcgctgccgactactcgcaaattgagttgcgcgtcctcgcccatattgcggaagatgacaatttaatggaagcgttccgccgcgatttggatatccatacgaaaacagcgatggacattttccaagtgagcgaggacgaagtgacgcccaacatgcgccgtcaggcgaaggcggtcaactttgggatcgtttacgggatcagtgattacggcttggcgcaaaacttaaatatttcacgcaaagaggccgctgaattcatcgagcgctacttcgaaagcttccctggcgtgaagcggtatatggaaaacattgtgcaagaagcaaaacagaaagggtatgtgacgacgctgctgcatcggcgccgctatttgccggaaatcacgagccgcaacttcaacgtccgcagctttgctgaacggatggcgatgaacacgccgattcaagggagcgccgctgacattattaaaaaggcgatgatcgatctgaacgctagactgaaggaagagcggctgcaagcgcgccttttgctacaggtgcatgacgagctcattttggaggcgccgaaagaagagatggagcggctgtgccggctcgttccggaagtgatggagcaagcggtcacacttcgcgtgccgctcaaagtcgattaccattatggctcgacgtggtatgacgcgaaataaaaaggatcc

SEQ ID NO: 2357 - DNA, 2712 bp, Artificial Sequence
  Description of Artificial Sequence: Synthetic DNA sequence of Bacillus caldolyticus EA1 DNA polymerase D799F
atgaaatacctgctgccgaccgctgctgctggtctgctgctcctcgctgcccagccggcgatggccatgggattgaaaaaaaagcttgttttaatcgacggcagcagcgtggcgtaccgcgcctttttcgccttgccgcttttgcataacgacaaaggcatccatacgaacgccgtctacgggtttacgatgatgttgaataaaattttggcggaagaagagccaactcatatgcttgtcgcgtttgacgccgggaaaacgacgttccggcatgaagcgtttcaagagtataaaggtgggcgccagcagacgccaccggagctgtcggagcagtttccgctgttgcgcgagctgctgagggcgtatcgcatccccgcctatgaactcgagaactacgaagcggacgatattatcggaacgcttgccgcccgcgctgagcaggaagggtttgaggtgaaagtcatttccggcgaccgcgatctgacccagctcgcctccccccatgtgacggtggacattacgaaaaaagggattaccgatatcgaaccgtacacgccggaggcggtccgcgaaaaatacggcttaactccggaacaaatcgttgatttgaaaggattgatgggcgacaaatcggacaacattcccggagtgccgggcatcggggaaaagacggcggtcaagctgctcaagcaattcggcacggtcgaaaacgtgcttgcctccattgacgagatcaaaggcgaaaagttgaaagaaacgctgcgccaacaccgggagatggcgctgttaagcaaaaagctcgccgccattcgccgcgacgccccggtcgagctctcgcttgatgacatcgtctatcaaggggaagaccgggagaaagtggtcgctttatttaaagagcttgggtttcaatcgtttttagagaaaatggaatcgccgtcatcagaagaggaaaaaccgcttgccaagatggcatttacgcttgctgaccgcgtgacggaggagatgcttgccgacaaggcggcgcttgtcgttgaagtggtcgaggaaaattatcatgatgcgccgatcgtcggcatcgctgtggtcaacgaacatggacggtttttcctgcgcccggagacggcgcttgccgatccgcagtttgtcgcctggcttggtgatgaaacgaagaaaaaaagcatgtttgactcaaagcgcgcggcagtcgccttgaaatggaaaggaattgagctatgcggcgtttcctttgatttattgctggccgcctatttgcttgatccggcgcaaggtgttgatgatgtggctgccgcagcaaaaatgaagcaatacgaagcggtgcgctcggatgaagcggtgtatggcaaaggggcgaagcgggccgtgccggatgagccagtgctcgccgagcatctcgtccgcaaggcggcggcgatttgggcgctcgaacgtccgtttttggatgagctgcgccgcaacgaacaagatcggttgctcgtcgagctcgagcagccgttgtcttcgattttggcggaaatggaatttgccggagtgaaagtggatacgaagcggctcgaacagatgggcgaagagctcgccgagcagctgcgcacggtcgagcagcgcatttatgagctcgccggccaagaattcaacatcaattcaccgaaacagctcggcgtcattttatttgaaaaactgcagctgcccgtcttgaaaaaaacgaaaaccggctactccacttcggcggatgtgcttgaaaaacttgcgccttatcacgagatcgtggaaaacattttgcattaccgccagcttggcaagttgcagtcgacgtatattgaaggattgctgaaagtcgtgcgacccgatacaaagaaggtgcatacgattttcaatcaggcgttgacgcaaaccggacggctcagctcgacggagccgaacttgcaaaacattccgattcggcttgaggaaggacggaaaatccgccaagcgttcgtgccgtcggagtctgattggctcattttcgctgccgactactcgcaaattgagttgcgcgtcctcgcccatattgcggaagatgacaatttaatggaagcgttccgccgcgatttggatatccatacgaaaacagcgatggacattttccaagtgagcgaggacgaagtgacgcccaacatgcgccgtcaggcgaaggcggtcaactttgggatcgtttacgggatcagtgattacggcttggcgcaaaacttaaatatttcacgcaaagaggccgctgaattcatcgagcgctacttcgaaagcttccctggcgtgaagcggtatatggaaaacattgtgcaagaagcaaaacagaaagggtatgtgacgacgctgctgcatcggcgccgctatttgccgtttatcacgagccgcaacttcaacgtccgcagctttgctgaacggatggcgatgaacacgccgattcaagggagcgccgctgacattattaaaaaggcgatgatcgatctgaacgctagactgaaggaagagcggctgcaagcgcgccttttgctacaggtgcatgacgagctcattttggaggcgccgaaagaagagatggagcggctgtgccggctcgttccggaagtgatggagcaagcggtcacacttcgcgtgccgctcaaagtcgattaccattatggctcgacgtggtatgacgcgaaataaaaaggatcc

SEQ ID NO: 2358 - DNA, 2712 bp, Artificial Sequence
  Description of Artificial Sequence: Synthetic DNA sequence of Bacillus caldolyticus EA1 DNA polymerase D799S
atgaaatacctgctgccgaccgctgctgctggtctgctgctcctcgctgcccagccggcgatggccatgggattgaaaaaaaagcttgttttaatcgacggcagcagcgtggcgtaccgcgcctttttcgccttgccgcttttgcataacgacaaaggcatccatacgaacgccgtctacgggtttacgatgatgttgaataaaattttggcggaagaagagccaactcatatgcttgtcgcgtttgacgccgggaaaacgacgttccggcatgaagcgtttcaagagtataaaggtgggcgccagcagacgccaccggagctgtcggagcagtttccgctgttgcgcgagctgctgagggcgtatcgcatccccgcctatgaactcgagaactacgaagcggacgatattatcggaacgcttgccgcccgcgctgagcaggaagggtttgaggtgaaagtcatttccggcgaccgcgatctgacccagctcgcctccccccatgtgacggtggacattacgaaaaaagggattaccgatatcgaaccgtacacgccggaggcggtccgcgaaaaatacggcttaactccggaacaaatcgttgatttgaaaggattgatgggcgacaaatcggacaacattcccggagtgccgggcatcggggaaaagacggcggtcaagctgctcaagcaattcggcacggtcgaaaacgtgcttgcctccattgacgagatcaaaggcgaaaagttgaaagaaacgctgcgccaacaccgggagatggcgctgttaagcaaaaagctcgccgccattcgccgcgacgccccggtcgagctctcgcttgatgacatcgtctatcaaggggaagaccgggagaaagtggtcgctttatttaaagagcttgggtttcaatcgtttttagagaaaatggaatcgccgtcatcagaagaggaaaaaccgcttgccaagatggcatttacgcttgctgaccgcgtgacggaggagatgcttgccgacaaggcggcgcttgtcgttgaagtggtcgaggaaaattatcatgatgcgccgatcgtcggcatcgctgtggtcaacgaacatggacggtttttcctgcgcccggagacggcgcttgccgatccgcagtttgtcgcctggcttggtgatgaaacgaagaaaaaaagcatgtttgactcaaagcgcgcggcagtcgccttgaaatggaaaggaattgagctatgcggcgtttcctttgatttattgctggccgcctatttgcttgatccggcgcaaggtgttgatgatgtggctgccgcagcaaaaatgaagcaatacgaagcggtgcgctcggatgaagcggtgtatggcaaaggggcgaagcgggccgtgccggatgagccagtgctcgccgagcatctcgtccgcaaggcggcggcgatttgggcgctcgaacgtccgtttttggatgagctgcgccgcaacgaacaagatcggttgctcgtcgagctcgagcagccgttgtcttcgattttggcggaaatggaatttgccggagtgaaagtggatacgaagcggctcgaacagatgggcgaagagctcgccgagcagctgcgcacggtcgagcagcgcatttatgagctcgccggccaagaattcaacatcaattcaccgaaacagctcggcgtcattttatttgaaaaactgcagctgcccgtcttgaaaaaaacgaaaaccggctactccacttcggcggatgtgcttgaaaaacttgcgccttatcacgagatcgtggaaaacattttgcattaccgccagcttggcaagttgcagtcgacgtatattgaaggattgctgaaagtcgtgcgacccgatacaaagaaggtgcatacgattttcaatcaggcgttgacgcaaaccggacggctcagctcgacggagccgaacttgcaaaacattccgattcggcttgaggaaggacggaaaatccgccaagcgttcgtgccgtcggagtctgattggctcattttcgctgccgactactcgcaaattgagttgcgcgtcctcgcccatattgcggaagatgacaatttaatggaagcgttccgccgcgatttggatatccatacgaaaacagcgatggacattttccaagtgagcgaggacgaagtgacgcccaacatgcgccgtcaggcgaaggcggtcaactttgggatcgtttacgggatcagtgattacggcttggcgcaaaacttaaatatttcacgcaaagaggccgctgaattcatcgagcgctacttcgaaagcttccctggcgtgaagcggtatatggaaaacattgtgcaagaagcaaaacagaaagggtatgtgacgacgctgctgcatcggcgccgctatttgccgtctatcacgagccgcaacttcaacgtccgcagctttgctgaacggatggcgatgaacacgccgattcaagggagcgccgctgacattattaaaaaggcgatgatcgatctgaacgctagactgaaggaagagcggctgcaagcgcgccttttgctacaggtgcatgacgagctcattttggaggcgccgaaagaagagatggagcggctgtgccggctcgttccggaagtgatggagcaagcggtcacacttcgcgtgccgctcaaagtcgattaccattatggctcgacgtggtatgacgcgaaataaaaaggatcc

SEQ ID NO: 2359 - DNA, 2712 bp, Artificial Sequence
  Description of Artificial Sequence: Synthetic DNA sequence of Bacillus caldolyticus EA1 DNA polymerase D799Y
atgaaatacctgctgccgaccgctgctgctggtctgctgctcctcgctgcccagccggcgatggccatgggattgaaaaaaaagcttgttttaatcgacggcagcagcgtggcgtaccgcgcctttttcgccttgccgcttttgcataacgacaaaggcatccatacgaacgccgtctacgggtttacgatgatgttgaataaaattttggcggaagaagagccaactcatatgcttgtcgcgtttgacgccgggaaaacgacgttccggcatgaagcgtttcaagagtataaaggtgggcgccagcagacgccaccggagctgtcggagcagtttccgctgttgcgcgagctgctgagggcgtatcgcatccccgcctatgaactcgagaactacgaagcggacgatattatcggaacgcttgccgcccgcgctgagcaggaagggtttgaggtgaaagtcatttccggcgaccgcgatctgacccagctcgcctccccccatgtgacggtggacattacgaaaaaagggattaccgatatcgaaccgtacacgccggaggcggtccgcgaaaaatacggcttaactccggaacaaatcgttgatttgaaaggattgatgggcgacaaatcggacaacattcccggagtgccgggcatcggggaaaagacggcggtcaagctgctcaagcaattcggcacggtcgaaaacgtgcttgcctccattgacgagatcaaaggcgaaaagttgaaagaaacgctgcgccaacaccgggagatggcgctgttaagcaaaaagctcgccgccattcgccgcgacgccccggtcgagctctcgcttgatgacatcgtctatcaaggggaagaccgggagaaagtggtcgctttatttaaagagcttgggtttcaatcgtttttagagaaaatggaatcgccgtcatcagaagaggaaaaaccgcttgccaagatggcatttacgcttgctgaccgcgtgacggaggagatgcttgccgacaaggcggcgcttgtcgttgaagtggtcgaggaaaattatcatgatgcgccgatcgtcggcatcgctgtggtcaacgaacatggacggtttttcctgcgcccggagacggcgcttgccgatccgcagtttgtcgcctggcttggtgatgaaacgaagaaaaaaagcatgtttgactcaaagcgcgcggcagtcgccttgaaatggaaaggaattgagctatgcggcgtttcctttgatttattgctggccgcctatttgcttgatccggcgcaaggtgttgatgatgtggctgccgcagcaaaaatgaagcaatacgaagcggtgcgctcggatgaagcggtgtatggcaaaggggcgaagcgggccgtgccggatgagccagtgctcgccgagcatctcgtccgcaaggcggcggcgatttgggcgctcgaacgtccgtttttggatgagctgcgccgcaacgaacaagatcggttgctcgtcgagctcgagcagccgttgtcttcgattttggcggaaatggaatttgccggagtgaaagtggatacgaagcggctcgaacagatgggcgaagagctcgccgagcagctgcgcacggtcgagcagcgcatttatgagctcgccggccaagaattcaacatcaattcaccgaaacagctcggcgtcattttatttgaaaaactgcagctgcccgtcttgaaaaaaacgaaaaccggctactccacttcggcggatgtgcttgaaaaacttgcgccttatcacgagatcgtggaaaacattttgcattaccgccagcttggcaagttgcagtcgacgtatattgaaggattgctgaaagtcgtgcgacccgatacaaagaaggtgcatacgattttcaatcaggcgttgacgcaaaccggacggctcagctcgacggagccgaacttgcaaaacattccgattcggcttgaggaaggacggaaaatccgccaagcgttcgtgccgtcggagtctgattggctcattttcgctgccgactactcgcaaattgagttgcgcgtcctcgcccatattgcggaagatgacaatttaatggaagcgttccgccgcgatttggatatccatacgaaaacagcgatggacattttccaagtgagcgaggacgaagtgacgcccaacatgcgccgtcaggcgaaggcggtcaactttgggatcgtttacgggatcagtgattacggcttggcgcaaaacttaaatatttcacgcaaagaggccgctgaattcatcgagcgctacttcgaaagcttccctggcgtgaagcggtatatggaaaacattgtgcaagaagcaaaacagaaagggtatgtgacgacgctgctgcatcggcgccgctatttgccgtatatcacgagccgcaacttcaacgtccgcagctttgctgaacggatggcgatgaacacgccgattcaagggagcgccgctgacattattaaaaaggcgatgatcgatctgaacgctagactgaaggaagagcggctgcaagcgcgccttttgctacaggtgcatgacgagctcattttggaggcgccgaaagaagagatggagcggctgtgccggctcgttccggaagtgatggagcaagcggtcacacttcgcgtgccgctcaaagtcgattaccattatggctcgacgtggtatgacgcgaaataaaaaggatcc

SEQ ID NO: 2360 - DNA, 2712 bp, Artificial Sequence
  Description of Artificial Sequence: Synthetic DNA sequence of Bacillus caldolyticus EA1 DNA polymerase D799W
atgaaatacctgctgccgaccgctgctgctggtctgctgctcctcgctgcccagccggcgatggccatgggattgaaaaaaaagcttgttttaatcgacggcagcagcgtggcgtaccgcgcctttttcgccttgccgcttttgcataacgacaaaggcatccatacgaacgccgtctacgggtttacgatgatgttgaataaaattttggcggaagaagagccaactcatatgcttgtcgcgtttgacgccgggaaaacgacgttccggcatgaagcgtttcaagagtataaaggtgggcgccagcagacgccaccggagctgtcggagcagtttccgctgttgcgcgagctgctgagggcgtatcgcatccccgcctatgaactcgagaactacgaagcggacgatattatcggaacgcttgccgcccgcgctgagcaggaagggtttgaggtgaaagtcatttccggcgaccgcgatctgacccagctcgcctccccccatgtgacggtggacattacgaaaaaagggattaccgatatcgaaccgtacacgccggaggcggtccgcgaaaaatacggcttaactccggaacaaatcgttgatttgaaaggattgatgggcgacaaatcggacaacattcccggagtgccgggcatcggggaaaagacggcggtcaagctgctcaagcaattcggcacggtcgaaaacgtgcttgcctccattgacgagatcaaaggcgaaaagttgaaagaaacgctgcgccaacaccgggagatggcgctgttaagcaaaaagctcgccgccattcgccgcgacgccccggtcgagctctcgcttgatgacatcgtctatcaaggggaagaccgggagaaagtggtcgctttatttaaagagcttgggtttcaatcgtttttagagaaaatggaatcgccgtcatcagaagaggaaaaaccgcttgccaagatggcatttacgcttgctgaccgcgtgacggaggagatgcttgccgacaaggcggcgcttgtcgttgaagtggtcgaggaaaattatcatgatgcgccgatcgtcggcatcgctgtggtcaacgaacatggacggtttttcctgcgcccggagacggcgcttgccgatccgcagtttgtcgcctggcttggtgatgaaacgaagaaaaaaagcatgtttgactcaaagcgcgcggcagtcgccttgaaatggaaaggaattgagctatgcggcgtttcctttgatttattgctggccgcctatttgcttgatccggcgcaaggtgttgatgatgtggctgccgcagcaaaaatgaagcaatacgaagcggtgcgctcggatgaagcggtgtatggcaaaggggcgaagcgggccgtgccggatgagccagtgctcgccgagcatctcgtccgcaaggcggcggcgatttgggcgctcgaacgtccgtttttggatgagctgcgccgcaacgaacaagatcggttgctcgtcgagctcgagcagccgttgtcttcgattttggcggaaatggaatttgccggagtgaaagtggatacgaagcggctcgaacagatgggcgaagagctcgccgagcagctgcgcacggtcgagcagcgcatttatgagctcgccggccaagaattcaacatcaattcaccgaaacagctcggcgtcattttatttgaaaaactgcagctgcccgtcttgaaaaaaacgaaaaccggctactccacttcggcggatgtgcttgaaaaacttgcgccttatcacgagatcgtggaaaacattttgcattaccgccagcttggcaagttgcagtcgacgtatattgaaggattgctgaaagtcgtgcgacccgatacaaagaaggtgcatacgattttcaatcaggcgttgacgcaaaccggacggctcagctcgacggagccgaacttgcaaaacattccgattcggcttgaggaaggacggaaaatccgccaagcgttcgtgccgtcggagtctgattggctcattttcgctgccgactactcgcaaattgagttgcgcgtcctcgcccatattgcggaagatgacaatttaatggaagcgttccgccgcgatttggatatccatacgaaaacagcgatggacattttccaagtgagcgaggacgaagtgacgcccaacatgcgccgtcaggcgaaggcggtcaactttgggatcgtttacgggatcagtgattacggcttggcgcaaaacttaaatatttcacgcaaagaggccgctgaattcatcgagcgctacttcgaaagcttccctggcgtgaagcggtatatggaaaacattgtgcaagaagcaaaacagaaagggtatgtgacgacgctgctgcatcggcgccgctatttgccgtggatcacgagccgcaacttcaacgtccgcagctttgctgaacggatggcgatgaacacgccgattcaagggagcgccgctgacattattaaaaaggcgatgatcgatctgaacgctagactgaaggaagagcggctgcaagcgcgccttttgctacaggtgcatgacgagctcattttggaggcgccgaaagaagagatggagcggctgtgccggctcgttccggaagtgatggagcaagcggtcacacttcgcgtgccgctcaaagtcgattaccattatggctcgacgtggtatgacgcgaaataaaaaggatcc

SEQ ID NO: 2361 - DNA, 2712 bp, Artificial Sequence
  Description of Artificial Sequence: Synthetic DNA sequence of Bacillus caldolyticus EA1 DNA polymerase D799P
atgaaatacctgctgccgaccgctgctgctggtctgctgctcctcgctgcccagccggcgatggccatgggattgaaaaaaaagcttgttttaatcgacggcagcagcgtggcgtaccgcgcctttttcgccttgccgcttttgcataacgacaaaggcatccatacgaacgccgtctacgggtttacgatgatgttgaataaaattttggcggaagaagagccaactcatatgcttgtcgcgtttgacgccgggaaaacgacgttccggcatgaagcgtttcaagagtataaaggtgggcgccagcagacgccaccggagctgtcggagcagtttccgctgttgcgcgagctgctgagggcgtatcgcatccccgcctatgaactcgagaactacgaagcggacgatattatcggaacgcttgccgcccgcgctgagcaggaagggtttgaggtgaaagtcatttccggcgaccgcgatctgacccagctcgcctccccccatgtgacggtggacattacgaaaaaagggattaccgatatcgaaccgtacacgccggaggcggtccgcgaaaaatacggcttaactccggaacaaatcgttgatttgaaaggattgatgggcgacaaatcggacaacattcccggagtgccgggcatcggggaaaagacggcggtcaagctgctcaagcaattcggcacggtcgaaaacgtgcttgcctccattgacgagatcaaaggcgaaaagttgaaagaaacgctgcgccaacaccgggagatggcgctgttaagcaaaaagctcgccgccattcgccgcgacgccccggtcgagctctcgcttgatgacatcgtctatcaaggggaagaccgggagaaagtggtcgctttatttaaagagcttgggtttcaatcgtttttagagaaaatggaatcgccgtcatcagaagaggaaaaaccgcttgccaagatggcatttacgcttgctgaccgcgtgacggaggagatgcttgccgacaaggcggcgcttgtcgttgaagtggtcgaggaaaattatcatgatgcgccgatcgtcggcatcgctgtggtcaacgaacatggacggtttttcctgcgcccggagacggcgcttgccgatccgcagtttgtcgcctggcttggtgatgaaacgaagaaaaaaagcatgtttgactcaaagcgcgcggcagtcgccttgaaatggaaaggaattgagctatgcggcgtttcctttgatttattgctggccgcctatttgcttgatccggcgcaaggtgttgatgatgtggctgccgcagcaaaaatgaagcaatacgaagcggtgcgctcggatgaagcggtgtatggcaaaggggcgaagcgggccgtgccggatgagccagtgctcgccgagcatctcgtccgcaaggcggcggcgatttgggcgctcgaacgtccgtttttggatgagctgcgccgcaacgaacaagatcggttgctcgtcgagctcgagcagccgttgtcttcgattttggcggaaatggaatttgccggagtgaaagtggatacgaagcggctcgaacagatgggcgaagagctcgccgagcagctgcgcacggtcgagcagcgcatttatgagctcgccggccaagaattcaacatcaattcaccgaaacagctcggcgtcattttatttgaaaaactgcagctgcccgtcttgaaaaaaacgaaaaccggctactccacttcggcggatgtgcttgaaaaacttgcgccttatcacgagatcgtggaaaacattttgcattaccgccagcttggcaagttgcagtcgacgtatattgaaggattgctgaaagtcgtgcgacccgatacaaagaaggtgcatacgattttcaatcaggcgttgacgcaaaccggacggctcagctcgacggagccgaacttgcaaaacattccgattcggcttgaggaaggacggaaaatccgccaagcgttcgtgccgtcggagtctgattggctcattttcgctgccgactactcgcaaattgagttgcgcgtcctcgcccatattgcggaagatgacaatttaatggaagcgttccgccgcgatttggatatccatacgaaaacagcgatggacattttccaagtgagcgaggacgaagtgacgcccaacatgcgccgtcaggcgaaggcggtcaactttgggatcgtttacgggatcagtgattacggcttggcgcaaaacttaaatatttcacgcaaagaggccgctgaattcatcgagcgctacttcgaaagcttccctggcgtgaagcggtatatggaaaacattgtgcaagaagcaaaacagaaagggtatgtgacgacgctgctgcatcggcgccgctatttgccgcctatcacgagccgcaacttcaacgtccgcagctttgctgaacggatggcgatgaacacgccgattcaagggagcgccgctgacattattaaaaaggcgatgatcgatctgaacgctagactgaaggaagagcggctgcaagcgcgccttttgctacaggtgcatgacgagctcattttggaggcgccgaaagaagagatggagcggctgtgccggctcgttccggaagtgatggagcaagcggtcacacttcgcgtgccgctcaaagtcgattaccattatggctcgacgtggtatgacgcgaaataaaaaggatcc

SEQ ID NO: 2362 - DNA, 2712 bp, Artificial Sequence
  Description of Artificial Sequence: Synthetic DNA sequence of Bacillus caldolyticus EA1 DNA polymerase D799M
atgaaatacctgctgccgaccgctgctgctggtctgctgctcctcgctgcccagccggcgatggccatgggattgaaaaaaaagcttgttttaatcgacggcagcagcgtggcgtaccgcgcctttttcgccttgccgcttttgcataacgacaaaggcatccatacgaacgccgtctacgggtttacgatgatgttgaataaaattttggcggaagaagagccaactcatatgcttgtcgcgtttgacgccgggaaaacgacgttccggcatgaagcgtttcaagagtataaaggtgggcgccagcagacgccaccggagctgtcggagcagtttccgctgttgcgcgagctgctgagggcgtatcgcatccccgcctatgaactcgagaactacgaagcggacgatattatcggaacgcttgccgcccgcgctgagcaggaagggtttgaggtgaaagtcatttccggcgaccgcgatctgacccagctcgcctccccccatgtgacggtggacattacgaaaaaagggattaccgatatcgaaccgtacacgccggaggcggtccgcgaaaaatacggcttaactccggaacaaatcgttgatttgaaaggattgatgggcgacaaatcggacaacattcccggagtgccgggcatcggggaaaagacggcggtcaagctgctcaagcaattcggcacggtcgaaaacgtgcttgcctccattgacgagatcaaaggcgaaaagttgaaagaaacgctgcgccaacaccgggagatggcgctgttaagcaaaaagctcgccgccattcgccgcgacgccccggtcgagctctcgcttgatgacatcgtctatcaaggggaagaccgggagaaagtggtcgctttatttaaagagcttgggtttcaatcgtttttagagaaaatggaatcgccgtcatcagaagaggaaaaaccgcttgccaagatggcatttacgcttgctgaccgcgtgacggaggagatgcttgccgacaaggcggcgcttgtcgttgaagtggtcgaggaaaattatcatgatgcgccgatcgtcggcatcgctgtggtcaacgaacatggacggtttttcctgcgcccggagacggcgcttgccgatccgcagtttgtcgcctggcttggtgatgaaacgaagaaaaaaagcatgtttgactcaaagcgcgcggcagtcgccttgaaatggaaaggaattgagctatgcggcgtttcctttgatttattgctggccgcctatttgcttgatccggcgcaaggtgttgatgatgtggctgccgcagcaaaaatgaagcaatacgaagcggtgcgctcggatgaagcggtgtatggcaaaggggcgaagcgggccgtgccggatgagccagtgctcgccgagcatctcgtccgcaaggcggcggcgatttgggcgctcgaacgtccgtttttggatgagctgcgccgcaacgaacaagatcggttgctcgtcgagctcgagcagccgttgtcttcgattttggcggaaatggaatttgccggagtgaaagtggatacgaagcggctcgaacagatgggcgaagagctcgccgagcagctgcgcacggtcgagcagcgcatttatgagctcgccggccaagaattcaacatcaattcaccgaaacagctcggcgtcattttatttgaaaaactgcagctgcccgtcttgaaaaaaacgaaaaccggctactccacttcggcggatgtgcttgaaaaacttgcgccttatcacgagatcgtggaaaacattttgcattaccgccagcttggcaagttgcagtcgacgtatattgaaggattgctgaaagtcgtgcgacccgatacaaagaaggtgcatacgattttcaatcaggcgttgacgcaaaccggacggctcagctcgacggagccgaacttgcaaaacattccgattcggcttgaggaaggacggaaaatccgccaagcgttcgtgccgtcggagtctgattggctcattttcgctgccgactactcgcaaattgagttgcgcgtcctcgcccatattgcggaagatgacaatttaatggaagcgttccgccgcgatttggatatccatacgaaaacagcgatggacattttccaagtgagcgaggacgaagtgacgcccaacatgcgccgtcaggcgaaggcggtcaactttgggatcgtttacgggatcagtgattacggcttggcgcaaaacttaaatatttcacgcaaagaggccgctgaattcatcgagcgctacttcgaaagcttccctggcgtgaagcggtatatggaaaacattgtgcaagaagcaaaacagaaagggtatgtgacgacgctgctgcatcggcgccgctatttgccgatgatcacgagccgcaacttcaacgtccgcagctttgctgaacggatggcgatgaacacgccgattcaagggagcgccgctgacattattaaaaaggcgatgatcgatctgaacgctagactgaaggaagagcggctgcaagcgcgccttttgctacaggtgcatgacgagctcattttggaggcgccgaaagaagagatggagcggctgtgccggctcgttccggaagtgatggagcaagcggtcacacttcgcgtgccgctcaaagtcgattaccattatggctcgacgtggtatgacgcgaaataaaaaggatcc

SEQ ID NO: 2363 - DNA, 2712 bp, Artificial Sequence
  Description of Artificial Sequence: Synthetic DNA sequence of Bacillus caldolyticus EA1 DNA polymerase D799T
atgaaatacctgctgccgaccgctgctgctggtctgctgctcctcgctgcccagccggcgatggccatgggattgaaaaaaaagcttgttttaatcgacggcagcagcgtggcgtaccgcgcctttttcgccttgccgcttttgcataacgacaaaggcatccatacgaacgccgtctacgggtttacgatgatgttgaataaaattttggcggaagaagagccaactcatatgcttgtcgcgtttgacgccgggaaaacgacgttccggcatgaagcgtttcaagagtataaaggtgggcgccagcagacgccaccggagctgtcggagcagtttccgctgttgcgcgagctgctgagggcgtatcgcatccccgcctatgaactcgagaactacgaagcggacgatattatcggaacgcttgccgcccgcgctgagcaggaagggtttgaggtgaaagtcatttccggcgaccgcgatctgacccagctcgcctccccccatgtgacggtggacattacgaaaaaagggattaccgatatcgaaccgtacacgccggaggcggtccgcgaaaaatacggcttaactccggaacaaatcgttgatttgaaaggattgatgggcgacaaatcggacaacattcccggagtgccgggcatcggggaaaagacggcggtcaagctgctcaagcaattcggcacggtcgaaaacgtgcttgcctccattgacgagatcaaaggcgaaaagttgaaagaaacgctgcgccaacaccgggagatggcgctgttaagcaaaaagctcgccgccattcgccgcgacgccccggtcgagctctcgcttgatgacatcgtctatcaaggggaagaccgggagaaagtggtcgctttatttaaagagcttgggtttcaatcgtttttagagaaaatggaatcgccgtcatcagaagaggaaaaaccgcttgccaagatggcatttacgcttgctgaccgcgtgacggaggagatgcttgccgacaaggcggcgcttgtcgttgaagtggtcgaggaaaattatcatgatgcgccgatcgtcggcatcgctgtggtcaacgaacatggacggtttttcctgcgcccggagacggcgcttgccgatccgcagtttgtcgcctggcttggtgatgaaacgaagaaaaaaagcatgtttgactcaaagcgcgcggcagtcgccttgaaatggaaaggaattgagctatgcggcgtttcctttgatttattgctggccgcctatttgcttgatccggcgcaaggtgttgatgatgtggctgccgcagcaaaaatgaagcaatacgaagcggtgcgctcggatgaagcggtgtatggcaaaggggcgaagcgggccgtgccggatgagccagtgctcgccgagcatctcgtccgcaaggcggcggcgatttgggcgctcgaacgtccgtttttggatgagctgcgccgcaacgaacaagatcggttgctcgtcgagctcgagcagccgttgtcttcgattttggcggaaatggaatttgccggagtgaaagtggatacgaagcggctcgaacagatgggcgaagagctcgccgagcagctgcgcacggtcgagcagcgcatttatgagctcgccggccaagaattcaacatcaattcaccgaaacagctcggcgtcattttatttgaaaaactgcagctgcccgtcttgaaaaaaacgaaaaccggctactccacttcggcggatgtgcttgaaaaacttgcgccttatcacgagatcgtggaaaacattttgcattaccgccagcttggcaagttgcagtcgacgtatattgaaggattgctgaaagtcgtgcgacccgatacaaagaaggtgcatacgattttcaatcaggcgttgacgcaaaccggacggctcagctcgacggagccgaacttgcaaaacattccgattcggcttgaggaaggacggaaaatccgccaagcgttcgtgccgtcggagtctgattggctcattttcgctgccgactactcgcaaattgagttgcgcgtcctcgcccatattgcggaagatgacaatttaatggaagcgttccgccgcgatttggatatccatacgaaaacagcgatggacattttccaagtgagcgaggacgaagtgacgcccaacatgcgccgtcaggcgaaggcggtcaactttgggatcgtttacgggatcagtgattacggcttggcgcaaaacttaaatatttcacgcaaagaggccgctgaattcatcgagcgctacttcgaaagcttccctggcgtgaagcggtatatggaaaacattgtgcaagaagcaaaacagaaagggtatgtgacgacgctgctgcatcggcgccgctatttgccgactatcacgagccgcaacttcaacgtccgcagctttgctgaacggatggcgatgaacacgccgattcaagggagcgccgctgacattattaaaaaggcgatgatcgatctgaacgctagactgaaggaagagcggctgcaagcgcgccttttgctacaggtgcatgacgagctcattttggaggcgccgaaagaagagatggagcggctgtgccggctcgttccggaagtgatggagcaagcggtcacacttcgcgtgccgctcaaagtcgattaccattatggctcgacgtggtatgacgcgaaataaaaaggatcc

SEQ ID NO: 2364 - DNA, 2712 bp, Artificial Sequence
  Description of Artificial Sequence: Synthetic DNA sequence of Bacillus caldolyticus EA1 DNA polymerase D799N
atgaaatacctgctgccgaccgctgctgctggtctgctgctcctcgctgcccagccggcgatggccatgggattgaaaaaaaagcttgttttaatcgacggcagcagcgtggcgtaccgcgcctttttcgccttgccgcttttgcataacgacaaaggcatccatacgaacgccgtctacgggtttacgatgatgttgaataaaattttggcggaagaagagccaactcatatgcttgtcgcgtttgacgccgggaaaacgacgttccggcatgaagcgtttcaagagtataaaggtgggcgccagcagacgccaccggagctgtcggagcagtttccgctgttgcgcgagctgctgagggcgtatcgcatccccgcctatgaactcgagaactacgaagcggacgatattatcggaacgcttgccgcccgcgctgagcaggaagggtttgaggtgaaagtcatttccggcgaccgcgatctgacccagctcgcctccccccatgtgacggtggacattacgaaaaaagggattaccgatatcgaaccgtacacgccggaggcggtccgcgaaaaatacggcttaactccggaacaaatcgttgatttgaaaggattgatgggcgacaaatcggacaacattcccggagtgccgggcatcggggaaaagacggcggtcaagctgctcaagcaattcggcacggtcgaaaacgtgcttgcctccattgacgagatcaaaggcgaaaagttgaaagaaacgctgcgccaacaccgggagatggcgctgttaagcaaaaagctcgccgccattcgccgcgacgccccggtcgagctctcgcttgatgacatcgtctatcaaggggaagaccgggagaaagtggtcgctttatttaaagagcttgggtttcaatcgtttttagagaaaatggaatcgccgtcatcagaagaggaaaaaccgcttgccaagatggcatttacgcttgctgaccgcgtgacggaggagatgcttgccgacaaggcggcgcttgtcgttgaagtggtcgaggaaaattatcatgatgcgccgatcgtcggcatcgctgtggtcaacgaacatggacggtttttcctgcgcccggagacggcgcttgccgatccgcagtttgtcgcctggcttggtgatgaaacgaagaaaaaaagcatgtttgactcaaagcgcgcggcagtcgccttgaaatggaaaggaattgagctatgcggcgtttcctttgatttattgctggccgcctatttgcttgatccggcgcaaggtgttgatgatgtggctgccgcagcaaaaatgaagcaatacgaagcggtgcgctcggatgaagcggtgtatggcaaaggggcgaagcgggccgtgccggatgagccagtgctcgccgagcatctcgtccgcaaggcggcggcgatttgggcgctcgaacgtccgtttttggatgagctgcgccgcaacgaacaagatcggttgctcgtcgagctcgagcagccgttgtcttcgattttggcggaaatggaatttgccggagtgaaagtggatacgaagcggctcgaacagatgggcgaagagctcgccgagcagctgcgcacggtcgagcagcgcatttatgagctcgccggccaagaattcaacatcaattcaccgaaacagctcggcgtcattttatttgaaaaactgcagctgcccgtcttgaaaaaaacgaaaaccggctactccacttcggcggatgtgcttgaaaaacttgcgccttatcacgagatcgtggaaaacattttgcattaccgccagcttggcaagttgcagtcgacgtatattgaaggattgctgaaagtcgtgcgacccgatacaaagaaggtgcatacgattttcaatcaggcgttgacgcaaaccggacggctcagctcgacggagccgaacttgcaaaacattccgattcggcttgaggaaggacggaaaatccgccaagcgttcgtgccgtcggagtctgattggctcattttcgctgccgactactcgcaaattgagttgcgcgtcctcgcccatattgcggaagatgacaatttaatggaagcgttccgccgcgatttggatatccatacgaaaacagcgatggacattttccaagtgagcgaggacgaagtgacgcccaacatgcgccgtcaggcgaaggcggtcaactttgggatcgtttacgggatcagtgattacggcttggcgcaaaacttaaatatttcacgcaaagaggccgctgaattcatcgagcgctacttcgaaagcttccctggcgtgaagcggtatatggaaaacattgtgcaagaagcaaaacagaaagggtatgtgacgacgctgctgcatcggcgccgctatttgccgaatatcacgagccgcaacttcaacgtccgcagctttgctgaacggatggcgatgaacacgccgattcaagggagcgccgctgacattattaaaaaggcgatgatcgatctgaacgctagactgaaggaagagcggctgcaagcgcgccttttgctacaggtgcatgacgagctcattttggaggcgccgaaagaagagatggagcggctgtgccggctcgttccggaagtgatggagcaagcggtcacacttcgcgtgccgctcaaagtcgattaccattatggctcgacgtggtatgacgcgaaataaaaaggatcc

SEQ ID NO: 2365 - DNA, 2712 bp, Artificial Sequence
  Description of Artificial Sequence: Synthetic DNA sequence of Bacillus caldolyticus EA1 DNA polymerase D799V
atgaaatacctgctgccgaccgctgctgctggtctgctgctcctcgctgcccagccggcgatggccatgggattgaaaaaaaagcttgttttaatcgacggcagcagcgtggcgtaccgcgcctttttcgccttgccgcttttgcataacgacaaaggcatccatacgaacgccgtctacgggtttacgatgatgttgaataaaattttggcggaagaagagccaactcatatgcttgtcgcgtttgacgccgggaaaacgacgttccggcatgaagcgtttcaagagtataaaggtgggcgccagcagacgccaccggagctgtcggagcagtttccgctgttgcgcgagctgctgagggcgtatcgcatccccgcctatgaactcgagaactacgaagcggacgatattatcggaacgcttgccgcccgcgctgagcaggaagggtttgaggtgaaagtcatttccggcgaccgcgatctgacccagctcgcctccccccatgtgacggtggacattacgaaaaaagggattaccgatatcgaaccgtacacgccggaggcggtccgcgaaaaatacggcttaactccggaacaaatcgttgatttgaaaggattgatgggcgacaaatcggacaacattcccggagtgccgggcatcggggaaaagacggcggtcaagctgctcaagcaattcggcacggtcgaaaacgtgcttgcctccattgacgagatcaaaggcgaaaagttgaaagaaacgctgcgccaacaccgggagatggcgctgttaagcaaaaagctcgccgccattcgccgcgacgccccggtcgagctctcgcttgatgacatcgtctatcaaggggaagaccgggagaaagtggtcgctttatttaaagagcttgggtttcaatcgtttttagagaaaatggaatcgccgtcatcagaagaggaaaaaccgcttgccaagatggcatttacgcttgctgaccgcgtgacggaggagatgcttgccgacaaggcggcgcttgtcgttgaagtggtcgaggaaaattatcatgatgcgccgatcgtcggcatcgctgtggtcaacgaacatggacggtttttcctgcgcccggagacggcgcttgccgatccgcagtttgtcgcctggcttggtgatgaaacgaagaaaaaaagcatgtttgactcaaagcgcgcggcagtcgccttgaaatggaaaggaattgagctatgcggcgtttcctttgatttattgctggccgcctatttgcttgatccggcgcaaggtgttgatgatgtggctgccgcagcaaaaatgaagcaatacgaagcggtgcgctcggatgaagcggtgtatggcaaaggggcgaagcgggccgtgccggatgagccagtgctcgccgagcatctcgtccgcaaggcggcggcgatttgggcgctcgaacgtccgtttttggatgagctgcgccgcaacgaacaagatcggttgctcgtcgagctcgagcagccgttgtcttcgattttggcggaaatggaatttgccggagtgaaagtggatacgaagcggctcgaacagatgggcgaagagctcgccgagcagctgcgcacggtcgagcagcgcatttatgagctcgccggccaagaattcaacatcaattcaccgaaacagctcggcgtcattttatttgaaaaactgcagctgcccgtcttgaaaaaaacgaaaaccggctactccacttcggcggatgtgcttgaaaaacttgcgccttatcacgagatcgtggaaaacattttgcattaccgccagcttggcaagttgcagtcgacgtatattgaaggattgctgaaagtcgtgcgacccgatacaaagaaggtgcatacgattttcaatcaggcgttgacgcaaaccggacggctcagctcgacggagccgaacttgcaaaacattccgattcggcttgaggaaggacggaaaatccgccaagcgttcgtgccgtcggagtctgattggctcattttcgctgccgactactcgcaaattgagttgcgcgtcctcgcccatattgcggaagatgacaatttaatggaagcgttccgccgcgatttggatatccatacgaaaacagcgatggacattttccaagtgagcgaggacgaagtgacgcccaacatgcgccgtcaggcgaaggcggtcaactttgggatcgtttacgggatcagtgattacggcttggcgcaaaacttaaatatttcacgcaaagaggccgctgaattcatcgagcgctacttcgaaagcttccctggcgtgaagcggtatatggaaaacattgtgcaagaagcaaaacagaaagggtatgtgacgacgctgctgcatcggcgccgctatttgccggtcatcacgagccgcaacttcaacgtccgcagctttgctgaacggatggcgatgaacacgccgattcaagggagcgccgctgacattattaaaaaggcgatgatcgatctgaacgctagactgaaggaagagcggctgcaagcgcgccttttgctacaggtgcatgacgagctcattttggaggcgccgaaagaagagatggagcggctgtgccggctcgttccggaagtgatggagcaagcggtcacacttcgcgtgccgctcaaagtcgattaccattatggctcgacgtggtatgacgcgaaataaaaaggatcc

SEQ ID NO: 2366 - DNA, 2712 bp, Artificial Sequence
  Description of Artificial Sequence: Synthetic DNA sequence of Bacillus caldolyticus EA1 DNA polymerase I800A
atgaaatacctgctgccgaccgctgctgctggtctgctgctcctcgctgcccagccggcgatggccatgggattgaaaaaaaagcttgttttaatcgacggcagcagcgtggcgtaccgcgcctttttcgccttgccgcttttgcataacgacaaaggcatccatacgaacgccgtctacgggtttacgatgatgttgaataaaattttggcggaagaagagccaactcatatgcttgtcgcgtttgacgccgggaaaacgacgttccggcatgaagcgtttcaagagtataaaggtgggcgccagcagacgccaccggagctgtcggagcagtttccgctgttgcgcgagctgctgagggcgtatcgcatccccgcctatgaactcgagaactacgaagcggacgatattatcggaacgcttgccgcccgcgctgagcaggaagggtttgaggtgaaagtcatttccggcgaccgcgatctgacccagctcgcctccccccatgtgacggtggacattacgaaaaaagggattaccgatatcgaaccgtacacgccggaggcggtccgcgaaaaatacggcttaactccggaacaaatcgttgatttgaaaggattgatgggcgacaaatcggacaacattcccggagtgccgggcatcggggaaaagacggcggtcaagctgctcaagcaattcggcacggtcgaaaacgtgcttgcctccattgacgagatcaaaggcgaaaagttgaaagaaacgctgcgccaacaccgggagatggcgctgttaagcaaaaagctcgccgccattcgccgcgacgccccggtcgagctctcgcttgatgacatcgtctatcaaggggaagaccgggagaaagtggtcgctttatttaaagagcttgggtttcaatcgtttttagagaaaatggaatcgccgtcatcagaagaggaaaaaccgcttgccaagatggcatttacgcttgctgaccgcgtgacggaggagatgcttgccgacaaggcggcgcttgtcgttgaagtggtcgaggaaaattatcatgatgcgccgatcgtcggcatcgctgtggtcaacgaacatggacggtttttcctgcgcccggagacggcgcttgccgatccgcagtttgtcgcctggcttggtgatgaaacgaagaaaaaaagcatgtttgactcaaagcgcgcggcagtcgccttgaaatggaaaggaattgagctatgcggcgtttcctttgatttattgctggccgcctatttgcttgatccggcgcaaggtgttgatgatgtggctgccgcagcaaaaatgaagcaatacgaagcggtgcgctcggatgaagcggtgtatggcaaaggggcgaagcgggccgtgccggatgagccagtgctcgccgagcatctcgtccgcaaggcggcggcgatttgggcgctcgaacgtccgtttttggatgagctgcgccgcaacgaacaagatcggttgctcgtcgagctcgagcagccgttgtcttcgattttggcggaaatggaatttgccggagtgaaagtggatacgaagcggctcgaacagatgggcgaagagctcgccgagcagctgcgcacggtcgagcagcgcatttatgagctcgccggccaagaattcaacatcaattcaccgaaacagctcggcgtcattttatttgaaaaactgcagctgcccgtcttgaaaaaaacgaaaaccggctactccacttcggcggatgtgcttgaaaaacttgcgccttatcacgagatcgtggaaaacattttgcattaccgccagcttggcaagttgcagtcgacgtatattgaaggattgctgaaagtcgtgcgacccgatacaaagaaggtgcatacgattttcaatcaggcgttgacgcaaaccggacggctcagctcgacggagccgaacttgcaaaacattccgattcggcttgaggaaggacggaaaatccgccaagcgttcgtgccgtcggagtctgattggctcattttcgctgccgactactcgcaaattgagttgcgcgtcctcgcccatattgcggaagatgacaatttaatggaagcgttccgccgcgatttggatatccatacgaaaacagcgatggacattttccaagtgagcgaggacgaagtgacgcccaacatgcgccgtcaggcgaaggcggtcaactttgggatcgtttacgggatcagtgattacggcttggcgcaaaacttaaatatttcacgcaaagaggccgctgaattcatcgagcgctacttcgaaagcttccctggcgtgaagcggtatatggaaaacattgtgcaagaagcaaaacagaaagggtatgtgacgacgctgctgcatcggcgccgctatttgccggatgctacgagccgcaacttcaacgtccgcagctttgctgaacggatggcgatgaacacgccgattcaagggagcgccgctgacattattaaaaaggcgatgatcgatctgaacgctagactgaaggaagagcggctgcaagcgcgccttttgctacaggtgcatgacgagctcattttggaggcgccgaaagaagagatggagcggctgtgccggctcgttccggaagtgatggagcaagcggtcacacttcgcgtgccgctcaaagtcgattaccattatggctcgacgtggtatgacgcgaaataaaaaggatcc

SEQ ID NO: 2367 - DNA, 2712 bp, Artificial Sequence
  Description of Artificial Sequence: Synthetic DNA sequence of Bacillus caldolyticus EA1 DNA polymerase I800R
atgaaatacctgctgccgaccgctgctgctggtctgctgctcctcgctgcccagccggcgatggccatgggattgaaaaaaaagcttgttttaatcgacggcagcagcgtggcgtaccgcgcctttttcgccttgccgcttttgcataacgacaaaggcatccatacgaacgccgtctacgggtttacgatgatgttgaataaaattttggcggaagaagagccaactcatatgcttgtcgcgtttgacgccgggaaaacgacgttccggcatgaagcgtttcaagagtataaaggtgggcgccagcagacgccaccggagctgtcggagcagtttccgctgttgcgcgagctgctgagggcgtatcgcatccccgcctatgaactcgagaactacgaagcggacgatattatcggaacgcttgccgcccgcgctgagcaggaagggtttgaggtgaaagtcatttccggcgaccgcgatctgacccagctcgcctccccccatgtgacggtggacattacgaaaaaagggattaccgatatcgaaccgtacacgccggaggcggtccgcgaaaaatacggcttaactccggaacaaatcgttgatttgaaaggattgatgggcgacaaatcggacaacattcccggagtgccgggcatcggggaaaagacggcggtcaagctgctcaagcaattcggcacggtcgaaaacgtgcttgcctccattgacgagatcaaaggcgaaaagttgaaagaaacgctgcgccaacaccgggagatggcgctgttaagcaaaaagctcgccgccattcgccgcgacgccccggtcgagctctcgcttgatgacatcgtctatcaaggggaagaccgggagaaagtggtcgctttatttaaagagcttgggtttcaatcgtttttagagaaaatggaatcgccgtcatcagaagaggaaaaaccgcttgccaagatggcatttacgcttgctgaccgcgtgacggaggagatgcttgccgacaaggcggcgcttgtcgttgaagtggtcgaggaaaattatcatgatgcgccgatcgtcggcatcgctgtggtcaacgaacatggacggtttttcctgcgcccggagacggcgcttgccgatccgcagtttgtcgcctggcttggtgatgaaacgaagaaaaaaagcatgtttgactcaaagcgcgcggcagtcgccttgaaatggaaaggaattgagctatgcggcgtttcctttgatttattgctggccgcctatttgcttgatccggcgcaaggtgttgatgatgtggctgccgcagcaaaaatgaagcaatacgaagcggtgcgctcggatgaagcggtgtatggcaaaggggcgaagcgggccgtgccggatgagccagtgctcgccgagcatctcgtccgcaaggcggcggcgatttgggcgctcgaacgtccgtttttggatgagctgcgccgcaacgaacaagatcggttgctcgtcgagctcgagcagccgttgtcttcgattttggcggaaatggaatttgccggagtgaaagtggatacgaagcggctcgaacagatgggcgaagagctcgccgagcagctgcgcacggtcgagcagcgcatttatgagctcgccggccaagaattcaacatcaattcaccgaaacagctcggcgtcattttatttgaaaaactgcagctgcccgtcttgaaaaaaacgaaaaccggctactccacttcggcggatgtgcttgaaaaacttgcgccttatcacgagatcgtggaaaacattttgcattaccgccagcttggcaagttgcagtcgacgtatattgaaggattgctgaaagtcgtgcgacccgatacaaagaaggtgcatacgattttcaatcaggcgttgacgcaaaccggacggctcagctcgacggagccgaacttgcaaaacattccgattcggcttgaggaaggacggaaaatccgccaagcgttcgtgccgtcggagtctgattggctcattttcgctgccgactactcgcaaattgagttgcgcgtcctcgcccatattgcggaagatgacaatttaatggaagcgttccgccgcgatttggatatccatacgaaaacagcgatggacattttccaagtgagcgaggacgaagtgacgcccaacatgcgccgtcaggcgaaggcggtcaactttgggatcgtttacgggatcagtgattacggcttggcgcaaaacttaaatatttcacgcaaagaggccgctgaattcatcgagcgctacttcgaaagcttccctggcgtgaagcggtatatggaaaacattgtgcaagaagcaaaacagaaagggtatgtgacgacgctgctgcatcggcgccgctatttgccggatcgaacgagccgcaacttcaacgtccgcagctttgctgaacggatggcgatgaacacgccgattcaagggagcgccgctgacattattaaaaaggcgatgatcgatctgaacgctagactgaaggaagagcggctgcaagcgcgccttttgctacaggtgcatgacgagctcattttggaggcgccgaaagaagagatggagcggctgtgccggctcgttccggaagtgatggagcaagcggtcacacttcgcgtgccgctcaaagtcgattaccattatggctcgacgtggtatgacgcgaaataaaaaggatcc

SEQ ID NO: 2368 - DNA, 2712 bp, Artificial Sequence
  Description of Artificial Sequence: Synthetic DNA sequence of Bacillus caldolyticus EA1 DNA polymerase I800C
atgaaatacctgctgccgaccgctgctgctggtctgctgctcctcgctgcccagccggcgatggccatgggattgaaaaaaaagcttgttttaatcgacggcagcagcgtggcgtaccgcgcctttttcgccttgccgcttttgcataacgacaaaggcatccatacgaacgccgtctacgggtttacgatgatgttgaataaaattttggcggaagaagagccaactcatatgcttgtcgcgtttgacgccgggaaaacgacgttccggcatgaagcgtttcaagagtataaaggtgggcgccagcagacgccaccggagctgtcggagcagtttccgctgttgcgcgagctgctgagggcgtatcgcatccccgcctatgaactcgagaactacgaagcggacgatattatcggaacgcttgccgcccgcgctgagcaggaagggtttgaggtgaaagtcatttccggcgaccgcgatctgacccagctcgcctccccccatgtgacggtggacattacgaaaaaagggattaccgatatcgaaccgtacacgccggaggcggtccgcgaaaaatacggcttaactccggaacaaatcgttgatttgaaaggattgatgggcgacaaatcggacaacattcccggagtgccgggcatcggggaaaagacggcggtcaagctgctcaagcaattcggcacggtcgaaaacgtgcttgcctccattgacgagatcaaaggcgaaaagttgaaagaaacgctgcgccaacaccgggagatggcgctgttaagcaaaaagctcgccgccattcgccgcgacgccccggtcgagctctcgcttgatgacatcgtctatcaaggggaagaccgggagaaagtggtcgctttatttaaagagcttgggtttcaatcgtttttagagaaaatggaatcgccgtcatcagaagaggaaaaaccgcttgccaagatggcatttacgcttgctgaccgcgtgacggaggagatgcttgccgacaaggcggcgcttgtcgttgaagtggtcgaggaaaattatcatgatgcgccgatcgtcggcatcgctgtggtcaacgaacatggacggtttttcctgcgcccggagacggcgcttgccgatccgcagtttgtcgcctggcttggtgatgaaacgaagaaaaaaagcatgtttgactcaaagcgcgcggcagtcgccttgaaatggaaaggaattgagctatgcggcgtttcctttgatttattgctggccgcctatttgcttgatccggcgcaaggtgttgatgatgtggctgccgcagcaaaaatgaagcaatacgaagcggtgcgctcggatgaagcggtgtatggcaaaggggcgaagcgggccgtgccggatgagccagtgctcgccgagcatctcgtccgcaaggcggcggcgatttgggcgctcgaacgtccgtttttggatgagctgcgccgcaacgaacaagatcggttgctcgtcgagctcgagcagccgttgtcttcgattttggcggaaatggaatttgccggagtgaaagtggatacgaagcggctcgaacagatgggcgaagagctcgccgagcagctgcgcacggtcgagcagcgcatttatgagctcgccggccaagaattcaacatcaattcaccgaaacagctcggcgtcattttatttgaaaaactgcagctgcccgtcttgaaaaaaacgaaaaccggctactccacttcggcggatgtgcttgaaaaacttgcgccttatcacgagatcgtggaaaacattttgcattaccgccagcttggcaagttgcagtcgacgtatattgaaggattgctgaaagtcgtgcgacccgatacaaagaaggtgcatacgattttcaatcaggcgttgacgcaaaccggacggctcagctcgacggagccgaacttgcaaaacattccgattcggcttgaggaaggacggaaaatccgccaagcgttcgtgccgtcggagtctgattggctcattttcgctgccgactactcgcaaattgagttgcgcgtcctcgcccatattgcggaagatgacaatttaatggaagcgttccgccgcgatttggatatccatacgaaaacagcgatggacattttccaagtgagcgaggacgaagtgacgcccaacatgcgccgtcaggcgaaggcggtcaactttgggatcgtttacgggatcagtgattacggcttggcgcaaaacttaaatatttcacgcaaagaggccgctgaattcatcgagcgctacttcgaaagcttccctggcgtgaagcggtatatggaaaacattgtgcaagaagcaaaacagaaagggtatgtgacgacgctgctgcatcggcgccgctatttgccggattgtacgagccgcaacttcaacgtccgcagctttgctgaacggatggcgatgaacacgccgattcaagggagcgccgctgacattattaaaaaggcgatgatcgatctgaacgctagactgaaggaagagcggctgcaagcgcgccttttgctacaggtgcatgacgagctcattttggaggcgccgaaagaagagatggagcggctgtgccggctcgttccggaagtgatggagcaagcggtcacacttcgcgtgccgctcaaagtcgattaccattatggctcgacgtggtatgacgcgaaataaaaaggatcc

SEQ ID NO: 2369 - DNA, 2712 bp, Artificial Sequence
  Description of Artificial Sequence: Synthetic DNA sequence of Bacillus caldolyticus EA1 DNA polymerase I800G
atgaaatacctgctgccgaccgctgctgctggtctgctgctcctcgctgcccagccggcgatggccatgggattgaaaaaaaagcttgttttaatcgacggcagcagcgtggcgtaccgcgcctttttcgccttgccgcttttgcataacgacaaaggcatccatacgaacgccgtctacgggtttacgatgatgttgaataaaattttggcggaagaagagccaactcatatgcttgtcgcgtttgacgccgggaaaacgacgttccggcatgaagcgtttcaagagtataaaggtgggcgccagcagacgccaccggagctgtcggagcagtttccgctgttgcgcgagctgctgagggcgtatcgcatccccgcctatgaactcgagaactacgaagcggacgatattatcggaacgcttgccgcccgcgctgagcaggaagggtttgaggtgaaagtcatttccggcgaccgcgatctgacccagctcgcctccccccatgtgacggtggacattacgaaaaaagggattaccgatatcgaaccgtacacgccggaggcggtccgcgaaaaatacggcttaactccggaacaaatcgttgatttgaaaggattgatgggcgacaaatcggacaacattcccggagtgccgggcatcggggaaaagacggcggtcaagctgctcaagcaattcggcacggtcgaaaacgtgcttgcctccattgacgagatcaaaggcgaaaagttgaaagaaacgctgcgccaacaccgggagatggcgctgttaagcaaaaagctcgccgccattcgccgcgacgccccggtcgagctctcgcttgatgacatcgtctatcaaggggaagaccgggagaaagtggtcgctttatttaaagagcttgggtttcaatcgtttttagagaaaatggaatcgccgtcatcagaagaggaaaaaccgcttgccaagatggcatttacgcttgctgaccgcgtgacggaggagatgcttgccgacaaggcggcgcttgtcgttgaagtggtcgaggaaaattatcatgatgcgccgatcgtcggcatcgctgtggtcaacgaacatggacggtttttcctgcgcccggagacggcgcttgccgatccgcagtttgtcgcctggcttggtgatgaaacgaagaaaaaaagcatgtttgactcaaagcgcgcggcagtcgccttgaaatggaaaggaattgagctatgcggcgtttcctttgatttattgctggccgcctatttgcttgatccggcgcaaggtgttgatgatgtggctgccgcagcaaaaatgaagcaatacgaagcggtgcgctcggatgaagcggtgtatggcaaaggggcgaagcgggccgtgccggatgagccagtgctcgccgagcatctcgtccgcaaggcggcggcgatttgggcgctcgaacgtccgtttttggatgagctgcgccgcaacgaacaagatcggttgctcgtcgagctcgagcagccgttgtcttcgattttggcggaaatggaatttgccggagtgaaagtggatacgaagcggctcgaacagatgggcgaagagctcgccgagcagctgcgcacggtcgagcagcgcatttatgagctcgccggccaagaattcaacatcaattcaccgaaacagctcggcgtcattttatttgaaaaactgcagctgcccgtcttgaaaaaaacgaaaaccggctactccacttcggcggatgtgcttgaaaaacttgcgccttatcacgagatcgtggaaaacattttgcattaccgccagcttggcaagttgcagtcgacgtatattgaaggattgctgaaagtcgtgcgacccgatacaaagaaggtgcatacgattttcaatcaggcgttgacgcaaaccggacggctcagctcgacggagccgaacttgcaaaacattccgattcggcttgaggaaggacggaaaatccgccaagcgttcgtgccgtcggagtctgattggctcattttcgctgccgactactcgcaaattgagttgcgcgtcctcgcccatattgcggaagatgacaatttaatggaagcgttccgccgcgatttggatatccatacgaaaacagcgatggacattttccaagtgagcgaggacgaagtgacgcccaacatgcgccgtcaggcgaaggcggtcaactttgggatcgtttacgggatcagtgattacggcttggcgcaaaacttaaatatttcacgcaaagaggccgctgaattcatcgagcgctacttcgaaagcttccctggcgtgaagcggtatatggaaaacattgtgcaagaagcaaaacagaaagggtatgtgacgacgctgctgcatcggcgccgctatttgccggatggtacgagccgcaacttcaacgtccgcagctttgctgaacggatggcgatgaacacgccgattcaagggagcgccgctgacattattaaaaaggcgatgatcgatctgaacgctagactgaaggaagagcggctgcaagcgcgccttttgctacaggtgcatgacgagctcattttggaggcgccgaaagaagagatggagcggctgtgccggctcgttccggaagtgatggagcaagcggtcacacttcgcgtgccgctcaaagtcgattaccattatggctcgacgtggtatgacgcgaaataaaaaggatcc

SEQ ID NO: 2370 - DNA, 2712 bp, Artificial Sequence
  Description of Artificial Sequence: Synthetic DNA sequence of Bacillus caldolyticus EA1 DNA polymerase I800Q
atgaaatacctgctgccgaccgctgctgctggtctgctgctcctcgctgcccagccggcgatggccatgggattgaaaaaaaagcttgttttaatcgacggcagcagcgtggcgtaccgcgcctttttcgccttgccgcttttgcataacgacaaaggcatccatacgaacgccgtctacgggtttacgatgatgttgaataaaattttggcggaagaagagccaactcatatgcttgtcgcgtttgacgccgggaaaacgacgttccggcatgaagcgtttcaagagtataaaggtgggcgccagcagacgccaccggagctgtcggagcagtttccgctgttgcgcgagctgctgagggcgtatcgcatccccgcctatgaactcgagaactacgaagcggacgatattatcggaacgcttgccgcccgcgctgagcaggaagggtttgaggtgaaagtcatttccggcgaccgcgatctgacccagctcgcctccccccatgtgacggtggacattacgaaaaaagggattaccgatatcgaaccgtacacgccggaggcggtccgcgaaaaatacggcttaactccggaacaaatcgttgatttgaaaggattgatgggcgacaaatcggacaacattcccggagtgccgggcatcggggaaaagacggcggtcaagctgctcaagcaattcggcacggtcgaaaacgtgcttgcctccattgacgagatcaaaggcgaaaagttgaaagaaacgctgcgccaacaccgggagatggcgctgttaagcaaaaagctcgccgccattcgccgcgacgccccggtcgagctctcgcttgatgacatcgtctatcaaggggaagaccgggagaaagtggtcgctttatttaaagagcttgggtttcaatcgtttttagagaaaatggaatcgccgtcatcagaagaggaaaaaccgcttgccaagatggcatttacgcttgctgaccgcgtgacggaggagatgcttgccgacaaggcggcgcttgtcgttgaagtggtcgaggaaaattatcatgatgcgccgatcgtcggcatcgctgtggtcaacgaacatggacggtttttcctgcgcccggagacggcgcttgccgatccgcagtttgtcgcctggcttggtgatgaaacgaagaaaaaaagcatgtttgactcaaagcgcgcggcagtcgccttgaaatggaaaggaattgagctatgcggcgtttcctttgatttattgctggccgcctatttgcttgatccggcgcaaggtgttgatgatgtggctgccgcagcaaaaatgaagcaatacgaagcggtgcgctcggatgaagcggtgtatggcaaaggggcgaagcgggccgtgccggatgagccagtgctcgccgagcatctcgtccgcaaggcggcggcgatttgggcgctcgaacgtccgtttttggatgagctgcgccgcaacgaacaagatcggttgctcgtcgagctcgagcagccgttgtcttcgattttggcggaaatggaatttgccggagtgaaagtggatacgaagcggctcgaacagatgggcgaagagctcgccgagcagctgcgcacggtcgagcagcgcatttatgagctcgccggccaagaattcaacatcaattcaccgaaacagctcggcgtcattttatttgaaaaactgcagctgcccgtcttgaaaaaaacgaaaaccggctactccacttcggcggatgtgcttgaaaaacttgcgccttatcacgagatcgtggaaaacattttgcattaccgccagcttggcaagttgcagtcgacgtatattgaaggattgctgaaagtcgtgcgacccgatacaaagaaggtgcatacgattttcaatcaggcgttgacgcaaaccggacggctcagctcgacggagccgaacttgcaaaacattccgattcggcttgaggaaggacggaaaatccgccaagcgttcgtgccgtcggagtctgattggctcattttcgctgccgactactcgcaaattgagttgcgcgtcctcgcccatattgcggaagatgacaatttaatggaagcgttccgccgcgatttggatatccatacgaaaacagcgatggacattttccaagtgagcgaggacgaagtgacgcccaacatgcgccgtcaggcgaaggcggtcaactttgggatcgtttacgggatcagtgattacggcttggcgcaaaacttaaatatttcacgcaaagaggccgctgaattcatcgagcgctacttcgaaagcttccctggcgtgaagcggtatatggaaaacattgtgcaagaagcaaaacagaaagggtatgtgacgacgctgctgcatcggcgccgctatttgccggatcaaacgagccgcaacttcaacgtccgcagctttgctgaacggatggcgatgaacacgccgattcaagggagcgccgctgacattattaaaaaggcgatgatcgatctgaacgctagactgaaggaagagcggctgcaagcgcgccttttgctacaggtgcatgacgagctcattttggaggcgccgaaagaagagatggagcggctgtgccggctcgttccggaagtgatggagcaagcggtcacacttcgcgtgccgctcaaagtcgattaccattatggctcgacgtggtatgacgcgaaataaaaaggatcc

SEQ ID NO: 2371 - DNA, 2712 bp, Artificial Sequence
  Description of Artificial Sequence: Synthetic DNA sequence of Bacillus caldolyticus EA1 DNA polymerase I800H
atgaaatacctgctgccgaccgctgctgctggtctgctgctcctcgctgcccagccggcgatggccatgggattgaaaaaaaagcttgttttaatcgacggcagcagcgtggcgtaccgcgcctttttcgccttgccgcttttgcataacgacaaaggcatccatacgaacgccgtctacgggtttacgatgatgttgaataaaattttggcggaagaagagccaactcatatgcttgtcgcgtttgacgccgggaaaacgacgttccggcatgaagcgtttcaagagtataaaggtgggcgccagcagacgccaccggagctgtcggagcagtttccgctgttgcgcgagctgctgagggcgtatcgcatccccgcctatgaactcgagaactacgaagcggacgatattatcggaacgcttgccgcccgcgctgagcaggaagggtttgaggtgaaagtcatttccggcgaccgcgatctgacccagctcgcctccccccatgtgacggtggacattacgaaaaaagggattaccgatatcgaaccgtacacgccggaggcggtccgcgaaaaatacggcttaactccggaacaaatcgttgatttgaaaggattgatgggcgacaaatcggacaacattcccggagtgccgggcatcggggaaaagacggcggtcaagctgctcaagcaattcggcacggtcgaaaacgtgcttgcctccattgacgagatcaaaggcgaaaagttgaaagaaacgctgcgccaacaccgggagatggcgctgttaagcaaaaagctcgccgccattcgccgcgacgccccggtcgagctctcgcttgatgacatcgtctatcaaggggaagaccgggagaaagtggtcgctttatttaaagagcttgggtttcaatcgtttttagagaaaatggaatcgccgtcatcagaagaggaaaaaccgcttgccaagatggcatttacgcttgctgaccgcgtgacggaggagatgcttgccgacaaggcggcgcttgtcgttgaagtggtcgaggaaaattatcatgatgcgccgatcgtcggcatcgctgtggtcaacgaacatggacggtttttcctgcgcccggagacggcgcttgccgatccgcagtttgtcgcctggcttggtgatgaaacgaagaaaaaaagcatgtttgactcaaagcgcgcggcagtcgccttgaaatggaaaggaattgagctatgcggcgtttcctttgatttattgctggccgcctatttgcttgatccggcgcaaggtgttgatgatgtggctgccgcagcaaaaatgaagcaatacgaagcggtgcgctcggatgaagcggtgtatggcaaaggggcgaagcgggccgtgccggatgagccagtgctcgccgagcatctcgtccgcaaggcggcggcgatttgggcgctcgaacgtccgtttttggatgagctgcgccgcaacgaacaagatcggttgctcgtcgagctcgagcagccgttgtcttcgattttggcggaaatggaatttgccggagtgaaagtggatacgaagcggctcgaacagatgggcgaagagctcgccgagcagctgcgcacggtcgagcagcgcatttatgagctcgccggccaagaattcaacatcaattcaccgaaacagctcggcgtcattttatttgaaaaactgcagctgcccgtcttgaaaaaaacgaaaaccggctactccacttcggcggatgtgcttgaaaaacttgcgccttatcacgagatcgtggaaaacattttgcattaccgccagcttggcaagttgcagtcgacgtatattgaaggattgctgaaagtcgtgcgacccgatacaaagaaggtgcatacgattttcaatcaggcgttgacgcaaaccggacggctcagctcgacggagccgaacttgcaaaacattccgattcggcttgaggaaggacggaaaatccgccaagcgttcgtgccgtcggagtctgattggctcattttcgctgccgactactcgcaaattgagttgcgcgtcctcgcccatattgcggaagatgacaatttaatggaagcgttccgccgcgatttggatatccatacgaaaacagcgatggacattttccaagtgagcgaggacgaagtgacgcccaacatgcgccgtcaggcgaaggcggtcaactttgggatcgtttacgggatcagtgattacggcttggcgcaaaacttaaatatttcacgcaaagaggccgctgaattcatcgagcgctacttcgaaagcttccctggcgtgaagcggtatatggaaaacattgtgcaagaagcaaaacagaaagggtatgtgacgacgctgctgcatcggcgccgctatttgccggatcatacgagccgcaacttcaacgtccgcagctttgctgaacggatggcgatgaacacgccgattcaagggagcgccgctgacattattaaaaaggcgatgatcgatctgaacgctagactgaaggaagagcggctgcaagcgcgccttttgctacaggtgcatgacgagctcattttggaggcgccgaaagaagagatggagcggctgtgccggctcgttccggaagtgatggagcaagcggtcacacttcgcgtgccgctcaaagtcgattaccattatggctcgacgtggtatgacgcgaaataaaaaggatcc

SEQ ID NO: 2372 - DNA, 2712 bp, Artificial Sequence
  Description of Artificial Sequence: Synthetic DNA sequence of Bacillus caldolyticus EA1 DNA polymerase I800L
atgaaatacctgctgccgaccgctgctgctggtctgctgctcctcgctgcccagccggcgatggccatgggattgaaaaaaaagcttgttttaatcgacggcagcagcgtggcgtaccgcgcctttttcgccttgccgcttttgcataacgacaaaggcatccatacgaacgccgtctacgggtttacgatgatgttgaataaaattttggcggaagaagagccaactcatatgcttgtcgcgtttgacgccgggaaaacgacgttccggcatgaagcgtttcaagagtataaaggtgggcgccagcagacgccaccggagctgtcggagcagtttccgctgttgcgcgagctgctgagggcgtatcgcatccccgcctatgaactcgagaactacgaagcggacgatattatcggaacgcttgccgcccgcgctgagcaggaagggtttgaggtgaaagtcatttccggcgaccgcgatctgacccagctcgcctccccccatgtgacggtggacattacgaaaaaagggattaccgatatcgaaccgtacacgccggaggcggtccgcgaaaaatacggcttaactccggaacaaatcgttgatttgaaaggattgatgggcgacaaatcggacaacattcccggagtgccgggcatcggggaaaagacggcggtcaagctgctcaagcaattcggcacggtcgaaaacgtgcttgcctccattgacgagatcaaaggcgaaaagttgaaagaaacgctgcgccaacaccgggagatggcgctgttaagcaaaaagctcgccgccattcgccgcgacgccccggtcgagctctcgcttgatgacatcgtctatcaaggggaagaccgggagaaagtggtcgctttatttaaagagcttgggtttcaatcgtttttagagaaaatggaatcgccgtcatcagaagaggaaaaaccgcttgccaagatggcatttacgcttgctgaccgcgtgacggaggagatgcttgccgacaaggcggcgcttgtcgttgaagtggtcgaggaaaattatcatgatgcgccgatcgtcggcatcgctgtggtcaacgaacatggacggtttttcctgcgcccggagacggcgcttgccgatccgcagtttgtcgcctggcttggtgatgaaacgaagaaaaaaagcatgtttgactcaaagcgcgcggcagtcgccttgaaatggaaaggaattgagctatgcggcgtttcctttgatttattgctggccgcctatttgcttgatccggcgcaaggtgttgatgatgtggctgccgcagcaaaaatgaagcaatacgaagcggtgcgctcggatgaagcggtgtatggcaaaggggcgaagcgggccgtgccggatgagccagtgctcgccgagcatctcgtccgcaaggcggcggcgatttgggcgctcgaacgtccgtttttggatgagctgcgccgcaacgaacaagatcggttgctcgtcgagctcgagcagccgttgtcttcgattttggcggaaatggaatttgccggagtgaaagtggatacgaagcggctcgaacagatgggcgaagagctcgccgagcagctgcgcacggtcgagcagcgcatttatgagctcgccggccaagaattcaacatcaattcaccgaaacagctcggcgtcattttatttgaaaaactgcagctgcccgtcttgaaaaaaacgaaaaccggctactccacttcggcggatgtgcttgaaaaacttgcgccttatcacgagatcgtggaaaacattttgcattaccgccagcttggcaagttgcagtcgacgtatattgaaggattgctgaaagtcgtgcgacccgatacaaagaaggtgcatacgattttcaatcaggcgttgacgcaaaccggacggctcagctcgacggagccgaacttgcaaaacattccgattcggcttgaggaaggacggaaaatccgccaagcgttcgtgccgtcggagtctgattggctcattttcgctgccgactactcgcaaattgagttgcgcgtcctcgcccatattgcggaagatgacaatttaatggaagcgttccgccgcgatttggatatccatacgaaaacagcgatggacattttccaagtgagcgaggacgaagtgacgcccaacatgcgccgtcaggcgaaggcggtcaactttgggatcgtttacgggatcagtgattacggcttggcgcaaaacttaaatatttcacgcaaagaggccgctgaattcatcgagcgctacttcgaaagcttccctggcgtgaagcggtatatggaaaacattgtgcaagaagcaaaacagaaagggtatgtgacgacgctgctgcatcggcgccgctatttgccggatttaacgagccgcaacttcaacgtccgcagctttgctgaacggatggcgatgaacacgccgattcaagggagcgccgctgacattattaaaaaggcgatgatcgatctgaacgctagactgaaggaagagcggctgcaagcgcgccttttgctacaggtgcatgacgagctcattttggaggcgccgaaagaagagatggagcggctgtgccggctcgttccggaagtgatggagcaagcggtcacacttcgcgtgccgctcaaagtcgattaccattatggctcgacgtggtatgacgcgaaataaaaaggatcc

SEQ ID NO: 2373 - DNA, 2712 bp, Artificial Sequence
  Description of Artificial Sequence: Synthetic DNA sequence of Bacillus caldolyticus EA1 DNA polymerase I800K
atgaaatacctgctgccgaccgctgctgctggtctgctgctcctcgctgcccagccggcgatggccatgggattgaaaaaaaagcttgttttaatcgacggcagcagcgtggcgtaccgcgcctttttcgccttgccgcttttgcataacgacaaaggcatccatacgaacgccgtctacgggtttacgatgatgttgaataaaattttggcggaagaagagccaactcatatgcttgtcgcgtttgacgccgggaaaacgacgttccggcatgaagcgtttcaagagtataaaggtgggcgccagcagacgccaccggagctgtcggagcagtttccgctgttgcgcgagctgctgagggcgtatcgcatccccgcctatgaactcgagaactacgaagcggacgatattatcggaacgcttgccgcccgcgctgagcaggaagggtttgaggtgaaagtcatttccggcgaccgcgatctgacccagctcgcctccccccatgtgacggtggacattacgaaaaaagggattaccgatatcgaaccgtacacgccggaggcggtccgcgaaaaatacggcttaactccggaacaaatcgttgatttgaaaggattgatgggcgacaaatcggacaacattcccggagtgccgggcatcggggaaaagacggcggtcaagctgctcaagcaattcggcacggtcgaaaacgtgcttgcctccattgacgagatcaaaggcgaaaagttgaaagaaacgctgcgccaacaccgggagatggcgctgttaagcaaaaagctcgccgccattcgccgcgacgccccggtcgagctctcgcttgatgacatcgtctatcaaggggaagaccgggagaaagtggtcgctttatttaaagagcttgggtttcaatcgtttttagagaaaatggaatcgccgtcatcagaagaggaaaaaccgcttgccaagatggcatttacgcttgctgaccgcgtgacggaggagatgcttgccgacaaggcggcgcttgtcgttgaagtggtcgaggaaaattatcatgatgcgccgatcgtcggcatcgctgtggtcaacgaacatggacggtttttcctgcgcccggagacggcgcttgccgatccgcagtttgtcgcctggcttggtgatgaaacgaagaaaaaaagcatgtttgactcaaagcgcgcggcagtcgccttgaaatggaaaggaattgagctatgcggcgtttcctttgatttattgctggccgcctatttgcttgatccggcgcaaggtgttgatgatgtggctgccgcagcaaaaatgaagcaatacgaagcggtgcgctcggatgaagcggtgtatggcaaaggggcgaagcgggccgtgccggatgagccagtgctcgccgagcatctcgtccgcaaggcggcggcgatttgggcgctcgaacgtccgtttttggatgagctgcgccgcaacgaacaagatcggttgctcgtcgagctcgagcagccgttgtcttcgattttggcggaaatggaatttgccggagtgaaagtggatacgaagcggctcgaacagatgggcgaagagctcgccgagcagctgcgcacggtcgagcagcgcatttatgagctcgccggccaagaattcaacatcaattcaccgaaacagctcggcgtcattttatttgaaaaactgcagctgcccgtcttgaaaaaaacgaaaaccggctactccacttcggcggatgtgcttgaaaaacttgcgccttatcacgagatcgtggaaaacattttgcattaccgccagcttggcaagttgcagtcgacgtatattgaaggattgctgaaagtcgtgcgacccgatacaaagaaggtgcatacgattttcaatcaggcgttgacgcaaaccggacggctcagctcgacggagccgaacttgcaaaacattccgattcggcttgaggaaggacggaaaatccgccaagcgttcgtgccgtcggagtctgattggctcattttcgctgccgactactcgcaaattgagttgcgcgtcctcgcccatattgcggaagatgacaatttaatggaagcgttccgccgcgatttggatatccatacgaaaacagcgatggacattttccaagtgagcgaggacgaagtgacgcccaacatgcgccgtcaggcgaaggcggtcaactttgggatcgtttacgggatcagtgattacggcttggcgcaaaacttaaatatttcacgcaaagaggccgctgaattcatcgagcgctacttcgaaagcttccctggcgtgaagcggtatatggaaaacattgtgcaagaagcaaaacagaaagggtatgtgacgacgctgctgcatcggcgccgctatttgccggataaaacgagccgcaacttcaacgtccgcagctttgctgaacggatggcgatgaacacgccgattcaagggagcgccgctgacattattaaaaaggcgatgatcgatctgaacgctagactgaaggaagagcggctgcaagcgcgccttttgctacaggtgcatgacgagctcattttggaggcgccgaaagaagagatggagcggctgtgccggctcgttccggaagtgatggagcaagcggtcacacttcgcgtgccgctcaaagtcgattaccattatggctcgacgtggtatgacgcgaaataaaaaggatcc

SEQ ID NO: 2374 - DNA, 2712 bp, Artificial Sequence
  Description of Artificial Sequence: Synthetic DNA sequence of Bacillus caldolyticus EA1 DNA polymerase I800E
atgaaatacctgctgccgaccgctgctgctggtctgctgctcctcgctgcccagccggcgatggccatgggattgaaaaaaaagcttgttttaatcgacggcagcagcgtggcgtaccgcgcctttttcgccttgccgcttttgcataacgacaaaggcatccatacgaacgccgtctacgggtttacgatgatgttgaataaaattttggcggaagaagagccaactcatatgcttgtcgcgtttgacgccgggaaaacgacgttccggcatgaagcgtttcaagagtataaaggtgggcgccagcagacgccaccggagctgtcggagcagtttccgctgttgcgcgagctgctgagggcgtatcgcatccccgcctatgaactcgagaactacgaagcggacgatattatcggaacgcttgccgcccgcgctgagcaggaagggtttgaggtgaaagtcatttccggcgaccgcgatctgacccagctcgcctccccccatgtgacggtggacattacgaaaaaagggattaccgatatcgaaccgtacacgccggaggcggtccgcgaaaaatacggcttaactccggaacaaatcgttgatttgaaaggattgatgggcgacaaatcggacaacattcccggagtgccgggcatcggggaaaagacggcggtcaagctgctcaagcaattcggcacggtcgaaaacgtgcttgcctccattgacgagatcaaaggcgaaaagttgaaagaaacgctgcgccaacaccgggagatggcgctgttaagcaaaaagctcgccgccattcgccgcgacgccccggtcgagctctcgcttgatgacatcgtctatcaaggggaagaccgggagaaagtggtcgctttatttaaagagcttgggtttcaatcgtttttagagaaaatggaatcgccgtcatcagaagaggaaaaaccgcttgccaagatggcatttacgcttgctgaccgcgtgacggaggagatgcttgccgacaaggcggcgcttgtcgttgaagtggtcgaggaaaattatcatgatgcgccgatcgtcggcatcgctgtggtcaacgaacatggacggtttttcctgcgcccggagacggcgcttgccgatccgcagtttgtcgcctggcttggtgatgaaacgaagaaaaaaagcatgtttgactcaaagcgcgcggcagtcgccttgaaatggaaaggaattgagctatgcggcgtttcctttgatttattgctggccgcctatttgcttgatccggcgcaaggtgttgatgatgtggctgccgcagcaaaaatgaagcaatacgaagcggtgcgctcggatgaagcggtgtatggcaaaggggcgaagcgggccgtgccggatgagccagtgctcgccgagcatctcgtccgcaaggcggcggcgatttgggcgctcgaacgtccgtttttggatgagctgcgccgcaacgaacaagatcggttgctcgtcgagctcgagcagccgttgtcttcgattttggcggaaatggaatttgccggagtgaaagtggatacgaagcggctcgaacagatgggcgaagagctcgccgagcagctgcgcacggtcgagcagcgcatttatgagctcgccggccaagaattcaacatcaattcaccgaaacagctcggcgtcattttatttgaaaaactgcagctgcccgtcttgaaaaaaacgaaaaccggctactccacttcggcggatgtgcttgaaaaacttgcgccttatcacgagatcgtggaaaacattttgcattaccgccagcttggcaagttgcagtcgacgtatattgaaggattgctgaaagtcgtgcgacccgatacaaagaaggtgcatacgattttcaatcaggcgttgacgcaaaccggacggctcagctcgacggagccgaacttgcaaaacattccgattcggcttgaggaaggacggaaaatccgccaagcgttcgtgccgtcggagtctgattggctcattttcgctgccgactactcgcaaattgagttgcgcgtcctcgcccatattgcggaagatgacaatttaatggaagcgttccgccgcgatttggatatccatacgaaaacagcgatggacattttccaagtgagcgaggacgaagtgacgcccaacatgcgccgtcaggcgaaggcggtcaactttgggatcgtttacgggatcagtgattacggcttggcgcaaaacttaaatatttcacgcaaagaggccgctgaattcatcgagcgctacttcgaaagcttccctggcgtgaagcggtatatggaaaacattgtgcaagaagcaaaacagaaagggtatgtgacgacgctgctgcatcggcgccgctatttgccggatgaaacgagccgcaacttcaacgtccgcagctttgctgaacggatggcgatgaacacgccgattcaagggagcgccgctgacattattaaaaaggcgatgatcgatctgaacgctagactgaaggaagagcggctgcaagcgcgccttttgctacaggtgcatgacgagctcattttggaggcgccgaaagaagagatggagcggctgtgccggctcgttccggaagtgatggagcaagcggtcacacttcgcgtgccgctcaaagtcgattaccattatggctcgacgtggtatgacgcgaaataaaaaggatcc

SEQ ID NO: 2375 - DNA, 2712 bp, Artificial Sequence
  Description of Artificial Sequence: Synthetic DNA sequence of Bacillus caldolyticus EA1 DNA polymerase I800D
atgaaatacctgctgccgaccgctgctgctggtctgctgctcctcgctgcccagccggcgatggccatgggattgaaaaaaaagcttgttttaatcgacggcagcagcgtggcgtaccgcgcctttttcgccttgccgcttttgcataacgacaaaggcatccatacgaacgccgtctacgggtttacgatgatgttgaataaaattttggcggaagaagagccaactcatatgcttgtcgcgtttgacgccgggaaaacgacgttccggcatgaagcgtttcaagagtataaaggtgggcgccagcagacgccaccggagctgtcggagcagtttccgctgttgcgcgagctgctgagggcgtatcgcatccccgcctatgaactcgagaactacgaagcggacgatattatcggaacgcttgccgcccgcgctgagcaggaagggtttgaggtgaaagtcatttccggcgaccgcgatctgacccagctcgcctccccccatgtgacggtggacattacgaaaaaagggattaccgatatcgaaccgtacacgccggaggcggtccgcgaaaaatacggcttaactccggaacaaatcgttgatttgaaaggattgatgggcgacaaatcggacaacattcccggagtgccgggcatcggggaaaagacggcggtcaagctgctcaagcaattcggcacggtcgaaaacgtgcttgcctccattgacgagatcaaaggcgaaaagttgaaagaaacgctgcgccaacaccgggagatggcgctgttaagcaaaaagctcgccgccattcgccgcgacgccccggtcgagctctcgcttgatgacatcgtctatcaaggggaagaccgggagaaagtggtcgctttatttaaagagcttgggtttcaatcgtttttagagaaaatggaatcgccgtcatcagaagaggaaaaaccgcttgccaagatggcatttacgcttgctgaccgcgtgacggaggagatgcttgccgacaaggcggcgcttgtcgttgaagtggtcgaggaaaattatcatgatgcgccgatcgtcggcatcgctgtggtcaacgaacatggacggtttttcctgcgcccggagacggcgcttgccgatccgcagtttgtcgcctggcttggtgatgaaacgaagaaaaaaagcatgtttgactcaaagcgcgcggcagtcgccttgaaatggaaaggaattgagctatgcggcgtttcctttgatttattgctggccgcctatttgcttgatccggcgcaaggtgttgatgatgtggctgccgcagcaaaaatgaagcaatacgaagcggtgcgctcggatgaagcggtgtatggcaaaggggcgaagcgggccgtgccggatgagccagtgctcgccgagcatctcgtccgcaaggcggcggcgatttgggcgctcgaacgtccgtttttggatgagctgcgccgcaacgaacaagatcggttgctcgtcgagctcgagcagccgttgtcttcgattttggcggaaatggaatttgccggagtgaaagtggatacgaagcggctcgaacagatgggcgaagagctcgccgagcagctgcgcacggtcgagcagcgcatttatgagctcgccggccaagaattcaacatcaattcaccgaaacagctcggcgtcattttatttgaaaaactgcagctgcccgtcttgaaaaaaacgaaaaccggctactccacttcggcggatgtgcttgaaaaacttgcgccttatcacgagatcgtggaaaacattttgcattaccgccagcttggcaagttgcagtcgacgtatattgaaggattgctgaaagtcgtgcgacccgatacaaagaaggtgcatacgattttcaatcaggcgttgacgcaaaccggacggctcagctcgacggagccgaacttgcaaaacattccgattcggcttgaggaaggacggaaaatccgccaagcgttcgtgccgtcggagtctgattggctcattttcgctgccgactactcgcaaattgagttgcgcgtcctcgcccatattgcggaagatgacaatttaatggaagcgttccgccgcgatttggatatccatacgaaaacagcgatggacattttccaagtgagcgaggacgaagtgacgcccaacatgcgccgtcaggcgaaggcggtcaactttgggatcgtttacgggatcagtgattacggcttggcgcaaaacttaaatatttcacgcaaagaggccgctgaattcatcgagcgctacttcgaaagcttccctggcgtgaagcggtatatggaaaacattgtgcaagaagcaaaacagaaagggtatgtgacgacgctgctgcatcggcgccgctatttgccggatgatacgagccgcaacttcaacgtccgcagctttgctgaacggatggcgatgaacacgccgattcaagggagcgccgctgacattattaaaaaggcgatgatcgatctgaacgctagactgaaggaagagcggctgcaagcgcgccttttgctacaggtgcatgacgagctcattttggaggcgccgaaagaagagatggagcggctgtgccggctcgttccggaagtgatggagcaagcggtcacacttcgcgtgccgctcaaagtcgattaccattatggctcgacgtggtatgacgcgaaataaaaaggatcc

SEQ ID NO: 2376 - DNA, 2712 bp, Artificial Sequence
  Description of Artificial Sequence: Synthetic DNA sequence of Bacillus caldolyticus EA1 DNA polymerase I800F
atgaaatacctgctgccgaccgctgctgctggtctgctgctcctcgctgcccagccggcgatggccatgggattgaaaaaaaagcttgttttaatcgacggcagcagcgtggcgtaccgcgcctttttcgccttgccgcttttgcataacgacaaaggcatccatacgaacgccgtctacgggtttacgatgatgttgaataaaattttggcggaagaagagccaactcatatgcttgtcgcgtttgacgccgggaaaacgacgttccggcatgaagcgtttcaagagtataaaggtgggcgccagcagacgccaccggagctgtcggagcagtttccgctgttgcgcgagctgctgagggcgtatcgcatccccgcctatgaactcgagaactacgaagcggacgatattatcggaacgcttgccgcccgcgctgagcaggaagggtttgaggtgaaagtcatttccggcgaccgcgatctgacccagctcgcctccccccatgtgacggtggacattacgaaaaaagggattaccgatatcgaaccgtacacgccggaggcggtccgcgaaaaatacggcttaactccggaacaaatcgttgatttgaaaggattgatgggcgacaaatcggacaacattcccggagtgccgggcatcggggaaaagacggcggtcaagctgctcaagcaattcggcacggtcgaaaacgtgcttgcctccattgacgagatcaaaggcgaaaagttgaaagaaacgctgcgccaacaccgggagatggcgctgttaagcaaaaagctcgccgccattcgccgcgacgccccggtcgagctctcgcttgatgacatcgtctatcaaggggaagaccgggagaaagtggtcgctttatttaaagagcttgggtttcaatcgtttttagagaaaatggaatcgccgtcatcagaagaggaaaaaccgcttgccaagatggcatttacgcttgctgaccgcgtgacggaggagatgcttgccgacaaggcggcgcttgtcgttgaagtggtcgaggaaaattatcatgatgcgccgatcgtcggcatcgctgtggtcaacgaacatggacggtttttcctgcgcccggagacggcgcttgccgatccgcagtttgtcgcctggcttggtgatgaaacgaagaaaaaaagcatgtttgactcaaagcgcgcggcagtcgccttgaaatggaaaggaattgagctatgcggcgtttcctttgatttattgctggccgcctatttgcttgatccggcgcaaggtgttgatgatgtggctgccgcagcaaaaatgaagcaatacgaagcggtgcgctcggatgaagcggtgtatggcaaaggggcgaagcgggccgtgccggatgagccagtgctcgccgagcatctcgtccgcaaggcggcggcgatttgggcgctcgaacgtccgtttttggatgagctgcgccgcaacgaacaagatcggttgctcgtcgagctcgagcagccgttgtcttcgattttggcggaaatggaatttgccggagtgaaagtggatacgaagcggctcgaacagatgggcgaagagctcgccgagcagctgcgcacggtcgagcagcgcatttatgagctcgccggccaagaattcaacatcaattcaccgaaacagctcggcgtcattttatttgaaaaactgcagctgcccgtcttgaaaaaaacgaaaaccggctactccacttcggcggatgtgcttgaaaaacttgcgccttatcacgagatcgtggaaaacattttgcattaccgccagcttggcaagttgcagtcgacgtatattgaaggattgctgaaagtcgtgcgacccgatacaaagaaggtgcatacgattttcaatcaggcgttgacgcaaaccggacggctcagctcgacggagccgaacttgcaaaacattccgattcggcttgaggaaggacggaaaatccgccaagcgttcgtgccgtcggagtctgattggctcattttcgctgccgactactcgcaaattgagttgcgcgtcctcgcccatattgcggaagatgacaatttaatggaagcgttccgccgcgatttggatatccatacgaaaacagcgatggacattttccaagtgagcgaggacgaagtgacgcccaacatgcgccgtcaggcgaaggcggtcaactttgggatcgtttacgggatcagtgattacggcttggcgcaaaacttaaatatttcacgcaaagaggccgctgaattcatcgagcgctacttcgaaagcttccctggcgtgaagcggtatatggaaaacattgtgcaagaagcaaaacagaaagggtatgtgacgacgctgctgcatcggcgccgctatttgccggattttacgagccgcaacttcaacgtccgcagctttgctgaacggatggcgatgaacacgccgattcaagggagcgccgctgacattattaaaaaggcgatgatcgatctgaacgctagactgaaggaagagcggctgcaagcgcgccttttgctacaggtgcatgacgagctcattttggaggcgccgaaagaagagatggagcggctgtgccggctcgttccggaagtgatggagcaagcggtcacacttcgcgtgccgctcaaagtcgattaccattatggctcgacgtggtatgacgcgaaataaaaaggatcc

SEQ ID NO: 2377 - DNA, 2712 bp, Artificial Sequence
  Description of Artificial Sequence: Synthetic DNA sequence of Bacillus caldolyticus EA1 DNA polymerase I800S
atgaaatacctgctgccgaccgctgctgctggtctgctgctcctcgctgcccagccggcgatggccatgggattgaaaaaaaagcttgttttaatcgacggcagcagcgtggcgtaccgcgcctttttcgccttgccgcttttgcataacgacaaaggcatccatacgaacgccgtctacgggtttacgatgatgttgaataaaattttggcggaagaagagccaactcatatgcttgtcgcgtttgacgccgggaaaacgacgttccggcatgaagcgtttcaagagtataaaggtgggcgccagcagacgccaccggagctgtcggagcagtttccgctgttgcgcgagctgctgagggcgtatcgcatccccgcctatgaactcgagaactacgaagcggacgatattatcggaacgcttgccgcccgcgctgagcaggaagggtttgaggtgaaagtcatttccggcgaccgcgatctgacccagctcgcctccccccatgtgacggtggacattacgaaaaaagggattaccgatatcgaaccgtacacgccggaggcggtccgcgaaaaatacggcttaactccggaacaaatcgttgatttgaaaggattgatgggcgacaaatcggacaacattcccggagtgccgggcatcggggaaaagacggcggtcaagctgctcaagcaattcggcacggtcgaaaacgtgcttgcctccattgacgagatcaaaggcgaaaagttgaaagaaacgctgcgccaacaccgggagatggcgctgttaagcaaaaagctcgccgccattcgccgcgacgccccggtcgagctctcgcttgatgacatcgtctatcaaggggaagaccgggagaaagtggtcgctttatttaaagagcttgggtttcaatcgtttttagagaaaatggaatcgccgtcatcagaagaggaaaaaccgcttgccaagatggcatttacgcttgctgaccgcgtgacggaggagatgcttgccgacaaggcggcgcttgtcgttgaagtggtcgaggaaaattatcatgatgcgccgatcgtcggcatcgctgtggtcaacgaacatggacggtttttcctgcgcccggagacggcgcttgccgatccgcagtttgtcgcctggcttggtgatgaaacgaagaaaaaaagcatgtttgactcaaagcgcgcggcagtcgccttgaaatggaaaggaattgagctatgcggcgtttcctttgatttattgctggccgcctatttgcttgatccggcgcaaggtgttgatgatgtggctgccgcagcaaaaatgaagcaatacgaagcggtgcgctcggatgaagcggtgtatggcaaaggggcgaagcgggccgtgccggatgagccagtgctcgccgagcatctcgtccgcaaggcggcggcgatttgggcgctcgaacgtccgtttttggatgagctgcgccgcaacgaacaagatcggttgctcgtcgagctcgagcagccgttgtcttcgattttggcggaaatggaatttgccggagtgaaagtggatacgaagcggctcgaacagatgggcgaagagctcgccgagcagctgcgcacggtcgagcagcgcatttatgagctcgccggccaagaattcaacatcaattcaccgaaacagctcggcgtcattttatttgaaaaactgcagctgcccgtcttgaaaaaaacgaaaaccggctactccacttcggcggatgtgcttgaaaaacttgcgccttatcacgagatcgtggaaaacattttgcattaccgccagcttggcaagttgcagtcgacgtatattgaaggattgctgaaagtcgtgcgacccgatacaaagaaggtgcatacgattttcaatcaggcgttgacgcaaaccggacggctcagctcgacggagccgaacttgcaaaacattccgattcggcttgaggaaggacggaaaatccgccaagcgttcgtgccgtcggagtctgattggctcattttcgctgccgactactcgcaaattgagttgcgcgtcctcgcccatattgcggaagatgacaatttaatggaagcgttccgccgcgatttggatatccatacgaaaacagcgatggacattttccaagtgagcgaggacgaagtgacgcccaacatgcgccgtcaggcgaaggcggtcaactttgggatcgtttacgggatcagtgattacggcttggcgcaaaacttaaatatttcacgcaaagaggccgctgaattcatcgagcgctacttcgaaagcttccctggcgtgaagcggtatatggaaaacattgtgcaagaagcaaaacagaaagggtatgtgacgacgctgctgcatcggcgccgctatttgccggattctacgagccgcaacttcaacgtccgcagctttgctgaacggatggcgatgaacacgccgattcaagggagcgccgctgacattattaaaaaggcgatgatcgatctgaacgctagactgaaggaagagcggctgcaagcgcgccttttgctacaggtgcatgacgagctcattttggaggcgccgaaagaagagatggagcggctgtgccggctcgttccggaagtgatggagcaagcggtcacacttcgcgtgccgctcaaagtcgattaccattatggctcgacgtggtatgacgcgaaataaaaaggatcc

SEQ ID NO: 2378 - DNA, 2712 bp, Artificial Sequence
  Description of Artificial Sequence: Synthetic DNA sequence of Bacillus caldolyticus EA1 DNA polymerase I800Y
atgaaatacctgctgccgaccgctgctgctggtctgctgctcctcgctgcccagccggcgatggccatgggattgaaaaaaaagcttgttttaatcgacggcagcagcgtggcgtaccgcgcctttttcgccttgccgcttttgcataacgacaaaggcatccatacgaacgccgtctacgggtttacgatgatgttgaataaaattttggcggaagaagagccaactcatatgcttgtcgcgtttgacgccgggaaaacgacgttccggcatgaagcgtttcaagagtataaaggtgggcgccagcagacgccaccggagctgtcggagcagtttccgctgttgcgcgagctgctgagggcgtatcgcatccccgcctatgaactcgagaactacgaagcggacgatattatcggaacgcttgccgcccgcgctgagcaggaagggtttgaggtgaaagtcatttccggcgaccgcgatctgacccagctcgcctccccccatgtgacggtggacattacgaaaaaagggattaccgatatcgaaccgtacacgccggaggcggtccgcgaaaaatacggcttaactccggaacaaatcgttgatttgaaaggattgatgggcgacaaatcggacaacattcccggagtgccgggcatcggggaaaagacggcggtcaagctgctcaagcaattcggcacggtcgaaaacgtgcttgcctccattgacgagatcaaaggcgaaaagttgaaagaaacgctgcgccaacaccgggagatggcgctgttaagcaaaaagctcgccgccattcgccgcgacgccccggtcgagctctcgcttgatgacatcgtctatcaaggggaagaccgggagaaagtggtcgctttatttaaagagcttgggtttcaatcgtttttagagaaaatggaatcgccgtcatcagaagaggaaaaaccgcttgccaagatggcatttacgcttgctgaccgcgtgacggaggagatgcttgccgacaaggcggcgcttgtcgttgaagtggtcgaggaaaattatcatgatgcgccgatcgtcggcatcgctgtggtcaacgaacatggacggtttttcctgcgcccggagacggcgcttgccgatccgcagtttgtcgcctggcttggtgatgaaacgaagaaaaaaagcatgtttgactcaaagcgcgcggcagtcgccttgaaatggaaaggaattgagctatgcggcgtttcctttgatttattgctggccgcctatttgcttgatccggcgcaaggtgttgatgatgtggctgccgcagcaaaaatgaagcaatacgaagcggtgcgctcggatgaagcggtgtatggcaaaggggcgaagcgggccgtgccggatgagccagtgctcgccgagcatctcgtccgcaaggcggcggcgatttgggcgctcgaacgtccgtttttggatgagctgcgccgcaacgaacaagatcggttgctcgtcgagctcgagcagccgttgtcttcgattttggcggaaatggaatttgccggagtgaaagtggatacgaagcggctcgaacagatgggcgaagagctcgccgagcagctgcgcacggtcgagcagcgcatttatgagctcgccggccaagaattcaacatcaattcaccgaaacagctcggcgtcattttatttgaaaaactgcagctgcccgtcttgaaaaaaacgaaaaccggctactccacttcggcggatgtgcttgaaaaacttgcgccttatcacgagatcgtggaaaacattttgcattaccgccagcttggcaagttgcagtcgacgtatattgaaggattgctgaaagtcgtgcgacccgatacaaagaaggtgcatacgattttcaatcaggcgttgacgcaaaccggacggctcagctcgacggagccgaacttgcaaaacattccgattcggcttgaggaaggacggaaaatccgccaagcgttcgtgccgtcggagtctgattggctcattttcgctgccgactactcgcaaattgagttgcgcgtcctcgcccatattgcggaagatgacaatttaatggaagcgttccgccgcgatttggatatccatacgaaaacagcgatggacattttccaagtgagcgaggacgaagtgacgcccaacatgcgccgtcaggcgaaggcggtcaactttgggatcgtttacgggatcagtgattacggcttggcgcaaaacttaaatatttcacgcaaagaggccgctgaattcatcgagcgctacttcgaaagcttccctggcgtgaagcggtatatggaaaacattgtgcaagaagcaaaacagaaagggtatgtgacgacgctgctgcatcggcgccgctatttgccggattatacgagccgcaacttcaacgtccgcagctttgctgaacggatggcgatgaacacgccgattcaagggagcgccgctgacattattaaaaaggcgatgatcgatctgaacgctagactgaaggaagagcggctgcaagcgcgccttttgctacaggtgcatgacgagctcattttggaggcgccgaaagaagagatggagcggctgtgccggctcgttccggaagtgatggagcaagcggtcacacttcgcgtgccgctcaaagtcgattaccattatggctcgacgtggtatgacgcgaaataaaaaggatcc

SEQ ID NO: 2379 - DNA, 2712 bp, Artificial Sequence
  Description of Artificial Sequence: Synthetic DNA sequence of Bacillus caldolyticus EA1 DNA polymerase I800W
atgaaatacctgctgccgaccgctgctgctggtctgctgctcctcgctgcccagccggcgatggccatgggattgaaaaaaaagcttgttttaatcgacggcagcagcgtggcgtaccgcgcctttttcgccttgccgcttttgcataacgacaaaggcatccatacgaacgccgtctacgggtttacgatgatgttgaataaaattttggcggaagaagagccaactcatatgcttgtcgcgtttgacgccgggaaaacgacgttccggcatgaagcgtttcaagagtataaaggtgggcgccagcagacgccaccggagctgtcggagcagtttccgctgttgcgcgagctgctgagggcgtatcgcatccccgcctatgaactcgagaactacgaagcggacgatattatcggaacgcttgccgcccgcgctgagcaggaagggtttgaggtgaaagtcatttccggcgaccgcgatctgacccagctcgcctccccccatgtgacggtggacattacgaaaaaagggattaccgatatcgaaccgtacacgccggaggcggtccgcgaaaaatacggcttaactccggaacaaatcgttgatttgaaaggattgatgggcgacaaatcggacaacattcccggagtgccgggcatcggggaaaagacggcggtcaagctgctcaagcaattcggcacggtcgaaaacgtgcttgcctccattgacgagatcaaaggcgaaaagttgaaagaaacgctgcgccaacaccgggagatggcgctgttaagcaaaaagctcgccgccattcgccgcgacgccccggtcgagctctcgcttgatgacatcgtctatcaaggggaagaccgggagaaagtggtcgctttatttaaagagcttgggtttcaatcgtttttagagaaaatggaatcgccgtcatcagaagaggaaaaaccgcttgccaagatggcatttacgcttgctgaccgcgtgacggaggagatgcttgccgacaaggcggcgcttgtcgttgaagtggtcgaggaaaattatcatgatgcgccgatcgtcggcatcgctgtggtcaacgaacatggacggtttttcctgcgcccggagacggcgcttgccgatccgcagtttgtcgcctggcttggtgatgaaacgaagaaaaaaagcatgtttgactcaaagcgcgcggcagtcgccttgaaatggaaaggaattgagctatgcggcgtttcctttgatttattgctggccgcctatttgcttgatccggcgcaaggtgttgatgatgtggctgccgcagcaaaaatgaagcaatacgaagcggtgcgctcggatgaagcggtgtatggcaaaggggcgaagcgggccgtgccggatgagccagtgctcgccgagcatctcgtccgcaaggcggcggcgatttgggcgctcgaacgtccgtttttggatgagctgcgccgcaacgaacaagatcggttgctcgtcgagctcgagcagccgttgtcttcgattttggcggaaatggaatttgccggagtgaaagtggatacgaagcggctcgaacagatgggcgaagagctcgccgagcagctgcgcacggtcgagcagcgcatttatgagctcgccggccaagaattcaacatcaattcaccgaaacagctcggcgtcattttatttgaaaaactgcagctgcccgtcttgaaaaaaacgaaaaccggctactccacttcggcggatgtgcttgaaaaacttgcgccttatcacgagatcgtggaaaacattttgcattaccgccagcttggcaagttgcagtcgacgtatattgaaggattgctgaaagtcgtgcgacccgatacaaagaaggtgcatacgattttcaatcaggcgttgacgcaaaccggacggctcagctcgacggagccgaacttgcaaaacattccgattcggcttgaggaaggacggaaaatccgccaagcgttcgtgccgtcggagtctgattggctcattttcgctgccgactactcgcaaattgagttgcgcgtcctcgcccatattgcggaagatgacaatttaatggaagcgttccgccgcgatttggatatccatacgaaaacagcgatggacattttccaagtgagcgaggacgaagtgacgcccaacatgcgccgtcaggcgaaggcggtcaactttgggatcgtttacgggatcagtgattacggcttggcgcaaaacttaaatatttcacgcaaagaggccgctgaattcatcgagcgctacttcgaaagcttccctggcgtgaagcggtatatggaaaacattgtgcaagaagcaaaacagaaagggtatgtgacgacgctgctgcatcggcgccgctatttgccggattggacgagccgcaacttcaacgtccgcagctttgctgaacggatggcgatgaacacgccgattcaagggagcgccgctgacattattaaaaaggcgatgatcgatctgaacgctagactgaaggaagagcggctgcaagcgcgccttttgctacaggtgcatgacgagctcattttggaggcgccgaaagaagagatggagcggctgtgccggctcgttccggaagtgatggagcaagcggtcacacttcgcgtgccgctcaaagtcgattaccattatggctcgacgtggtatgacgcgaaataaaaaggatcc

SEQ ID NO: 2380 - DNA, 2712 bp, Artificial Sequence
  Description of Artificial Sequence: Synthetic DNA sequence of Bacillus caldolyticus EA1 DNA polymerase I800P
atgaaatacctgctgccgaccgctgctgctggtctgctgctcctcgctgcccagccggcgatggccatgggattgaaaaaaaagcttgttttaatcgacggcagcagcgtggcgtaccgcgcctttttcgccttgccgcttttgcataacgacaaaggcatccatacgaacgccgtctacgggtttacgatgatgttgaataaaattttggcggaagaagagccaactcatatgcttgtcgcgtttgacgccgggaaaacgacgttccggcatgaagcgtttcaagagtataaaggtgggcgccagcagacgccaccggagctgtcggagcagtttccgctgttgcgcgagctgctgagggcgtatcgcatccccgcctatgaactcgagaactacgaagcggacgatattatcggaacgcttgccgcccgcgctgagcaggaagggtttgaggtgaaagtcatttccggcgaccgcgatctgacccagctcgcctccccccatgtgacggtggacattacgaaaaaagggattaccgatatcgaaccgtacacgccggaggcggtccgcgaaaaatacggcttaactccggaacaaatcgttgatttgaaaggattgatgggcgacaaatcggacaacattcccggagtgccgggcatcggggaaaagacggcggtcaagctgctcaagcaattcggcacggtcgaaaacgtgcttgcctccattgacgagatcaaaggcgaaaagttgaaagaaacgctgcgccaacaccgggagatggcgctgttaagcaaaaagctcgccgccattcgccgcgacgccccggtcgagctctcgcttgatgacatcgtctatcaaggggaagaccgggagaaagtggtcgctttatttaaagagcttgggtttcaatcgtttttagagaaaatggaatcgccgtcatcagaagaggaaaaaccgcttgccaagatggcatttacgcttgctgaccgcgtgacggaggagatgcttgccgacaaggcggcgcttgtcgttgaagtggtcgaggaaaattatcatgatgcgccgatcgtcggcatcgctgtggtcaacgaacatggacggtttttcctgcgcccggagacggcgcttgccgatccgcagtttgtcgcctggcttggtgatgaaacgaagaaaaaaagcatgtttgactcaaagcgcgcggcagtcgccttgaaatggaaaggaattgagctatgcggcgtttcctttgatttattgctggccgcctatttgcttgatccggcgcaaggtgttgatgatgtggctgccgcagcaaaaatgaagcaatacgaagcggtgcgctcggatgaagcggtgtatggcaaaggggcgaagcgggccgtgccggatgagccagtgctcgccgagcatctcgtccgcaaggcggcggcgatttgggcgctcgaacgtccgtttttggatgagctgcgccgcaacgaacaagatcggttgctcgtcgagctcgagcagccgttgtcttcgattttggcggaaatggaatttgccggagtgaaagtggatacgaagcggctcgaacagatgggcgaagagctcgccgagcagctgcgcacggtcgagcagcgcatttatgagctcgccggccaagaattcaacatcaattcaccgaaacagctcggcgtcattttatttgaaaaactgcagctgcccgtcttgaaaaaaacgaaaaccggctactccacttcggcggatgtgcttgaaaaacttgcgccttatcacgagatcgtggaaaacattttgcattaccgccagcttggcaagttgcagtcgacgtatattgaaggattgctgaaagtcgtgcgacccgatacaaagaaggtgcatacgattttcaatcaggcgttgacgcaaaccggacggctcagctcgacggagccgaacttgcaaaacattccgattcggcttgaggaaggacggaaaatccgccaagcgttcgtgccgtcggagtctgattggctcattttcgctgccgactactcgcaaattgagttgcgcgtcctcgcccatattgcggaagatgacaatttaatggaagcgttccgccgcgatttggatatccatacgaaaacagcgatggacattttccaagtgagcgaggacgaagtgacgcccaacatgcgccgtcaggcgaaggcggtcaactttgggatcgtttacgggatcagtgattacggcttggcgcaaaacttaaatatttcacgcaaagaggccgctgaattcatcgagcgctacttcgaaagcttccctggcgtgaagcggtatatggaaaacattgtgcaagaagcaaaacagaaagggtatgtgacgacgctgctgcatcggcgccgctatttgccggatcctacgagccgcaacttcaacgtccgcagctttgctgaacggatggcgatgaacacgccgattcaagggagcgccgctgacattattaaaaaggcgatgatcgatctgaacgctagactgaaggaagagcggctgcaagcgcgccttttgctacaggtgcatgacgagctcattttggaggcgccgaaagaagagatggagcggctgtgccggctcgttccggaagtgatggagcaagcggtcacacttcgcgtgccgctcaaagtcgattaccattatggctcgacgtggtatgacgcgaaataaaaaggatcc

SEQ ID NO: 2381 - DNA, 2712 bp, Artificial Sequence
  Description of Artificial Sequence: Synthetic DNA sequence of Bacillus caldolyticus EA1 DNA polymerase I800M
atgaaatacctgctgccgaccgctgctgctggtctgctgctcctcgctgcccagccggcgatggccatgggattgaaaaaaaagcttgttttaatcgacggcagcagcgtggcgtaccgcgcctttttcgccttgccgcttttgcataacgacaaaggcatccatacgaacgccgtctacgggtttacgatgatgttgaataaaattttggcggaagaagagccaactcatatgcttgtcgcgtttgacgccgggaaaacgacgttccggcatgaagcgtttcaagagtataaaggtgggcgccagcagacgccaccggagctgtcggagcagtttccgctgttgcgcgagctgctgagggcgtatcgcatccccgcctatgaactcgagaactacgaagcggacgatattatcggaacgcttgccgcccgcgctgagcaggaagggtttgaggtgaaagtcatttccggcgaccgcgatctgacccagctcgcctccccccatgtgacggtggacattacgaaaaaagggattaccgatatcgaaccgtacacgccggaggcggtccgcgaaaaatacggcttaactccggaacaaatcgttgatttgaaaggattgatgggcgacaaatcggacaacattcccggagtgccgggcatcggggaaaagacggcggtcaagctgctcaagcaattcggcacggtcgaaaacgtgcttgcctccattgacgagatcaaaggcgaaaagttgaaagaaacgctgcgccaacaccgggagatggcgctgttaagcaaaaagctcgccgccattcgccgcgacgccccggtcgagctctcgcttgatgacatcgtctatcaaggggaagaccgggagaaagtggtcgctttatttaaagagcttgggtttcaatcgtttttagagaaaatggaatcgccgtcatcagaagaggaaaaaccgcttgccaagatggcatttacgcttgctgaccgcgtgacggaggagatgcttgccgacaaggcggcgcttgtcgttgaagtggtcgaggaaaattatcatgatgcgccgatcgtcggcatcgctgtggtcaacgaacatggacggtttttcctgcgcccggagacggcgcttgccgatccgcagtttgtcgcctggcttggtgatgaaacgaagaaaaaaagcatgtttgactcaaagcgcgcggcagtcgccttgaaatggaaaggaattgagctatgcggcgtttcctttgatttattgctggccgcctatttgcttgatccggcgcaaggtgttgatgatgtggctgccgcagcaaaaatgaagcaatacgaagcggtgcgctcggatgaagcggtgtatggcaaaggggcgaagcgggccgtgccggatgagccagtgctcgccgagcatctcgtccgcaaggcggcggcgatttgggcgctcgaacgtccgtttttggatgagctgcgccgcaacgaacaagatcggttgctcgtcgagctcgagcagccgttgtcttcgattttggcggaaatggaatttgccggagtgaaagtggatacgaagcggctcgaacagatgggcgaagagctcgccgagcagctgcgcacggtcgagcagcgcatttatgagctcgccggccaagaattcaacatcaattcaccgaaacagctcggcgtcattttatttgaaaaactgcagctgcccgtcttgaaaaaaacgaaaaccggctactccacttcggcggatgtgcttgaaaaacttgcgccttatcacgagatcgtggaaaacattttgcattaccgccagcttggcaagttgcagtcgacgtatattgaaggattgctgaaagtcgtgcgacccgatacaaagaaggtgcatacgattttcaatcaggcgttgacgcaaaccggacggctcagctcgacggagccgaacttgcaaaacattccgattcggcttgaggaaggacggaaaatccgccaagcgttcgtgccgtcggagtctgattggctcattttcgctgccgactactcgcaaattgagttgcgcgtcctcgcccatattgcggaagatgacaatttaatggaagcgttccgccgcgatttggatatccatacgaaaacagcgatggacattttccaagtgagcgaggacgaagtgacgcccaacatgcgccgtcaggcgaaggcggtcaactttgggatcgtttacgggatcagtgattacggcttggcgcaaaacttaaatatttcacgcaaagaggccgctgaattcatcgagcgctacttcgaaagcttccctggcgtgaagcggtatatggaaaacattgtgcaagaagcaaaacagaaagggtatgtgacgacgctgctgcatcggcgccgctatttgccggatatgacgagccgcaacttcaacgtccgcagctttgctgaacggatggcgatgaacacgccgattcaagggagcgccgctgacattattaaaaaggcgatgatcgatctgaacgctagactgaaggaagagcggctgcaagcgcgccttttgctacaggtgcatgacgagctcattttggaggcgccgaaagaagagatggagcggctgtgccggctcgttccggaagtgatggagcaagcggtcacacttcgcgtgccgctcaaagtcgattaccattatggctcgacgtggtatgacgcgaaataaaaaggatcc

SEQ ID NO: 2382 - DNA, 2712 bp, Artificial Sequence
  Description of Artificial Sequence: Synthetic DNA sequence of Bacillus caldolyticus EA1 DNA polymerase I800T
atgaaatacctgctgccgaccgctgctgctggtctgctgctcctcgctgcccagccggcgatggccatgggattgaaaaaaaagcttgttttaatcgacggcagcagcgtggcgtaccgcgcctttttcgccttgccgcttttgcataacgacaaaggcatccatacgaacgccgtctacgggtttacgatgatgttgaataaaattttggcggaagaagagccaactcatatgcttgtcgcgtttgacgccgggaaaacgacgttccggcatgaagcgtttcaagagtataaaggtgggcgccagcagacgccaccggagctgtcggagcagtttccgctgttgcgcgagctgctgagggcgtatcgcatccccgcctatgaactcgagaactacgaagcggacgatattatcggaacgcttgccgcccgcgctgagcaggaagggtttgaggtgaaagtcatttccggcgaccgcgatctgacccagctcgcctccccccatgtgacggtggacattacgaaaaaagggattaccgatatcgaaccgtacacgccggaggcggtccgcgaaaaatacggcttaactccggaacaaatcgttgatttgaaaggattgatgggcgacaaatcggacaacattcccggagtgccgggcatcggggaaaagacggcggtcaagctgctcaagcaattcggcacggtcgaaaacgtgcttgcctccattgacgagatcaaaggcgaaaagttgaaagaaacgctgcgccaacaccgggagatggcgctgttaagcaaaaagctcgccgccattcgccgcgacgccccggtcgagctctcgcttgatgacatcgtctatcaaggggaagaccgggagaaagtggtcgctttatttaaagagcttgggtttcaatcgtttttagagaaaatggaatcgccgtcatcagaagaggaaaaaccgcttgccaagatggcatttacgcttgctgaccgcgtgacggaggagatgcttgccgacaaggcggcgcttgtcgttgaagtggtcgaggaaaattatcatgatgcgccgatcgtcggcatcgctgtggtcaacgaacatggacggtttttcctgcgcccggagacggcgcttgccgatccgcagtttgtcgcctggcttggtgatgaaacgaagaaaaaaagcatgtttgactcaaagcgcgcggcagtcgccttgaaatggaaaggaattgagctatgcggcgtttcctttgatttattgctggccgcctatttgcttgatccggcgcaaggtgttgatgatgtggctgccgcagcaaaaatgaagcaatacgaagcggtgcgctcggatgaagcggtgtatggcaaaggggcgaagcgggccgtgccggatgagccagtgctcgccgagcatctcgtccgcaaggcggcggcgatttgggcgctcgaacgtccgtttttggatgagctgcgccgcaacgaacaagatcggttgctcgtcgagctcgagcagccgttgtcttcgattttggcggaaatggaatttgccggagtgaaagtggatacgaagcggctcgaacagatgggcgaagagctcgccgagcagctgcgcacggtcgagcagcgcatttatgagctcgccggccaagaattcaacatcaattcaccgaaacagctcggcgtcattttatttgaaaaactgcagctgcccgtcttgaaaaaaacgaaaaccggctactccacttcggcggatgtgcttgaaaaacttgcgccttatcacgagatcgtggaaaacattttgcattaccgccagcttggcaagttgcagtcgacgtatattgaaggattgctgaaagtcgtgcgacccgatacaaagaaggtgcatacgattttcaatcaggcgttgacgcaaaccggacggctcagctcgacggagccgaacttgcaaaacattccgattcggcttgaggaaggacggaaaatccgccaagcgttcgtgccgtcggagtctgattggctcattttcgctgccgactactcgcaaattgagttgcgcgtcctcgcccatattgcggaagatgacaatttaatggaagcgttccgccgcgatttggatatccatacgaaaacagcgatggacattttccaagtgagcgaggacgaagtgacgcccaacatgcgccgtcaggcgaaggcggtcaactttgggatcgtttacgggatcagtgattacggcttggcgcaaaacttaaatatttcacgcaaagaggccgctgaattcatcgagcgctacttcgaaagcttccctggcgtgaagcggtatatggaaaacattgtgcaagaagcaaaacagaaagggtatgtgacgacgctgctgcatcggcgccgctatttgccggatactacgagccgcaacttcaacgtccgcagctttgctgaacggatggcgatgaacacgccgattcaagggagcgccgctgacattattaaaaaggcgatgatcgatctgaacgctagactgaaggaagagcggctgcaagcgcgccttttgctacaggtgcatgacgagctcattttggaggcgccgaaagaagagatggagcggctgtgccggctcgttccggaagtgatggagcaagcggtcacacttcgcgtgccgctcaaagtcgattaccattatggctcgacgtggtatgacgcgaaataaaaaggatcc

SEQ ID NO: 2383 - DNA, 2712 bp, Artificial Sequence
  Description of Artificial Sequence: Synthetic DNA sequence of Bacillus caldolyticus EA1 DNA polymerase I800N
atgaaatacctgctgccgaccgctgctgctggtctgctgctcctcgctgcccagccggcgatggccatgggattgaaaaaaaagcttgttttaatcgacggcagcagcgtggcgtaccgcgcctttttcgccttgccgcttttgcataacgacaaaggcatccatacgaacgccgtctacgggtttacgatgatgttgaataaaattttggcggaagaagagccaactcatatgcttgtcgcgtttgacgccgggaaaacgacgttccggcatgaagcgtttcaagagtataaaggtgggcgccagcagacgccaccggagctgtcggagcagtttccgctgttgcgcgagctgctgagggcgtatcgcatccccgcctatgaactcgagaactacgaagcggacgatattatcggaacgcttgccgcccgcgctgagcaggaagggtttgaggtgaaagtcatttccggcgaccgcgatctgacccagctcgcctccccccatgtgacggtggacattacgaaaaaagggattaccgatatcgaaccgtacacgccggaggcggtccgcgaaaaatacggcttaactccggaacaaatcgttgatttgaaaggattgatgggcgacaaatcggacaacattcccggagtgccgggcatcggggaaaagacggcggtcaagctgctcaagcaattcggcacggtcgaaaacgtgcttgcctccattgacgagatcaaaggcgaaaagttgaaagaaacgctgcgccaacaccgggagatggcgctgttaagcaaaaagctcgccgccattcgccgcgacgccccggtcgagctctcgcttgatgacatcgtctatcaaggggaagaccgggagaaagtggtcgctttatttaaagagcttgggtttcaatcgtttttagagaaaatggaatcgccgtcatcagaagaggaaaaaccgcttgccaagatggcatttacgcttgctgaccgcgtgacggaggagatgcttgccgacaaggcggcgcttgtcgttgaagtggtcgaggaaaattatcatgatgcgccgatcgtcggcatcgctgtggtcaacgaacatggacggtttttcctgcgcccggagacggcgcttgccgatccgcagtttgtcgcctggcttggtgatgaaacgaagaaaaaaagcatgtttgactcaaagcgcgcggcagtcgccttgaaatggaaaggaattgagctatgcggcgtttcctttgatttattgctggccgcctatttgcttgatccggcgcaaggtgttgatgatgtggctgccgcagcaaaaatgaagcaatacgaagcggtgcgctcggatgaagcggtgtatggcaaaggggcgaagcgggccgtgccggatgagccagtgctcgccgagcatctcgtccgcaaggcggcggcgatttgggcgctcgaacgtccgtttttggatgagctgcgccgcaacgaacaagatcggttgctcgtcgagctcgagcagccgttgtcttcgattttggcggaaatggaatttgccggagtgaaagtggatacgaagcggctcgaacagatgggcgaagagctcgccgagcagctgcgcacggtcgagcagcgcatttatgagctcgccggccaagaattcaacatcaattcaccgaaacagctcggcgtcattttatttgaaaaactgcagctgcccgtcttgaaaaaaacgaaaaccggctactccacttcggcggatgtgcttgaaaaacttgcgccttatcacgagatcgtggaaaacattttgcattaccgccagcttggcaagttgcagtcgacgtatattgaaggattgctgaaagtcgtgcgacccgatacaaagaaggtgcatacgattttcaatcaggcgttgacgcaaaccggacggctcagctcgacggagccgaacttgcaaaacattccgattcggcttgaggaaggacggaaaatccgccaagcgttcgtgccgtcggagtctgattggctcattttcgctgccgactactcgcaaattgagttgcgcgtcctcgcccatattgcggaagatgacaatttaatggaagcgttccgccgcgatttggatatccatacgaaaacagcgatggacattttccaagtgagcgaggacgaagtgacgcccaacatgcgccgtcaggcgaaggcggtcaactttgggatcgtttacgggatcagtgattacggcttggcgcaaaacttaaatatttcacgcaaagaggccgctgaattcatcgagcgctacttcgaaagcttccctggcgtgaagcggtatatggaaaacattgtgcaagaagcaaaacagaaagggtatgtgacgacgctgctgcatcggcgccgctatttgccggataatacgagccgcaacttcaacgtccgcagctttgctgaacggatggcgatgaacacgccgattcaagggagcgccgctgacattattaaaaaggcgatgatcgatctgaacgctagactgaaggaagagcggctgcaagcgcgccttttgctacaggtgcatgacgagctcattttggaggcgccgaaagaagagatggagcggctgtgccggctcgttccggaagtgatggagcaagcggtcacacttcgcgtgccgctcaaagtcgattaccattatggctcgacgtggtatgacgcgaaataaaaaggatcc

SEQ ID NO: 2384 - DNA, 2712 bp, Artificial Sequence
  Description of Artificial Sequence: Synthetic DNA sequence of Bacillus caldolyticus EA1 DNA polymerase I800V
atgaaatacctgctgccgaccgctgctgctggtctgctgctcctcgctgcccagccggcgatggccatgggattgaaaaaaaagcttgttttaatcgacggcagcagcgtggcgtaccgcgcctttttcgccttgccgcttttgcataacgacaaaggcatccatacgaacgccgtctacgggtttacgatgatgttgaataaaattttggcggaagaagagccaactcatatgcttgtcgcgtttgacgccgggaaaacgacgttccggcatgaagcgtttcaagagtataaaggtgggcgccagcagacgccaccggagctgtcggagcagtttccgctgttgcgcgagctgctgagggcgtatcgcatccccgcctatgaactcgagaactacgaagcggacgatattatcggaacgcttgccgcccgcgctgagcaggaagggtttgaggtgaaagtcatttccggcgaccgcgatctgacccagctcgcctccccccatgtgacggtggacattacgaaaaaagggattaccgatatcgaaccgtacacgccggaggcggtccgcgaaaaatacggcttaactccggaacaaatcgttgatttgaaaggattgatgggcgacaaatcggacaacattcccggagtgccgggcatcggggaaaagacggcggtcaagctgctcaagcaattcggcacggtcgaaaacgtgcttgcctccattgacgagatcaaaggcgaaaagttgaaagaaacgctgcgccaacaccgggagatggcgctgttaagcaaaaagctcgccgccattcgccgcgacgccccggtcgagctctcgcttgatgacatcgtctatcaaggggaagaccgggagaaagtggtcgctttatttaaagagcttgggtttcaatcgtttttagagaaaatggaatcgccgtcatcagaagaggaaaaaccgcttgccaagatggcatttacgcttgctgaccgcgtgacggaggagatgcttgccgacaaggcggcgcttgtcgttgaagtggtcgaggaaaattatcatgatgcgccgatcgtcggcatcgctgtggtcaacgaacatggacggtttttcctgcgcccggagacggcgcttgccgatccgcagtttgtcgcctggcttggtgatgaaacgaagaaaaaaagcatgtttgactcaaagcgcgcggcagtcgccttgaaatggaaaggaattgagctatgcggcgtttcctttgatttattgctggccgcctatttgcttgatccggcgcaaggtgttgatgatgtggctgccgcagcaaaaatgaagcaatacgaagcggtgcgctcggatgaagcggtgtatggcaaaggggcgaagcgggccgtgccggatgagccagtgctcgccgagcatctcgtccgcaaggcggcggcgatttgggcgctcgaacgtccgtttttggatgagctgcgccgcaacgaacaagatcggttgctcgtcgagctcgagcagccgttgtcttcgattttggcggaaatggaatttgccggagtgaaagtggatacgaagcggctcgaacagatgggcgaagagctcgccgagcagctgcgcacggtcgagcagcgcatttatgagctcgccggccaagaattcaacatcaattcaccgaaacagctcggcgtcattttatttgaaaaactgcagctgcccgtcttgaaaaaaacgaaaaccggctactccacttcggcggatgtgcttgaaaaacttgcgccttatcacgagatcgtggaaaacattttgcattaccgccagcttggcaagttgcagtcgacgtatattgaaggattgctgaaagtcgtgcgacccgatacaaagaaggtgcatacgattttcaatcaggcgttgacgcaaaccggacggctcagctcgacggagccgaacttgcaaaacattccgattcggcttgaggaaggacggaaaatccgccaagcgttcgtgccgtcggagtctgattggctcattttcgctgccgactactcgcaaattgagttgcgcgtcctcgcccatattgcggaagatgacaatttaatggaagcgttccgccgcgatttggatatccatacgaaaacagcgatggacattttccaagtgagcgaggacgaagtgacgcccaacatgcgccgtcaggcgaaggcggtcaactttgggatcgtttacgggatcagtgattacggcttggcgcaaaacttaaatatttcacgcaaagaggccgctgaattcatcgagcgctacttcgaaagcttccctggcgtgaagcggtatatggaaaacattgtgcaagaagcaaaacagaaagggtatgtgacgacgctgctgcatcggcgccgctatttgccggatgtcacgagccgcaacttcaacgtccgcagctttgctgaacggatggcgatgaacacgccgattcaagggagcgccgctgacattattaaaaaggcgatgatcgatctgaacgctagactgaaggaagagcggctgcaagcgcgccttttgctacaggtgcatgacgagctcattttggaggcgccgaaagaagagatggagcggctgtgccggctcgttccggaagtgatggagcaagcggtcacacttcgcgtgccgctcaaagtcgattaccattatggctcgacgtggtatgacgcgaaataaaaaggatcc

SEQ ID NO: 2385 - DNA, 2712 bp, Artificial Sequence
  Description of Artificial Sequence: Synthetic DNA sequence of Bacillus caldolyticus EA1 DNA polymerase T801A
atgaaatacctgctgccgaccgctgctgctggtctgctgctcctcgctgcccagccggcgatggccatgggattgaaaaaaaagcttgttttaatcgacggcagcagcgtggcgtaccgcgcctttttcgccttgccgcttttgcataacgacaaaggcatccatacgaacgccgtctacgggtttacgatgatgttgaataaaattttggcggaagaagagccaactcatatgcttgtcgcgtttgacgccgggaaaacgacgttccggcatgaagcgtttcaagagtataaaggtgggcgccagcagacgccaccggagctgtcggagcagtttccgctgttgcgcgagctgctgagggcgtatcgcatccccgcctatgaactcgagaactacgaagcggacgatattatcggaacgcttgccgcccgcgctgagcaggaagggtttgaggtgaaagtcatttccggcgaccgcgatctgacccagctcgcctccccccatgtgacggtggacattacgaaaaaagggattaccgatatcgaaccgtacacgccggaggcggtccgcgaaaaatacggcttaactccggaacaaatcgttgatttgaaaggattgatgggcgacaaatcggacaacattcccggagtgccgggcatcggggaaaagacggcggtcaagctgctcaagcaattcggcacggtcgaaaacgtgcttgcctccattgacgagatcaaaggcgaaaagttgaaagaaacgctgcgccaacaccgggagatggcgctgttaagcaaaaagctcgccgccattcgccgcgacgccccggtcgagctctcgcttgatgacatcgtctatcaaggggaagaccgggagaaagtggtcgctttatttaaagagcttgggtttcaatcgtttttagagaaaatggaatcgccgtcatcagaagaggaaaaaccgcttgccaagatggcatttacgcttgctgaccgcgtgacggaggagatgcttgccgacaaggcggcgcttgtcgttgaagtggtcgaggaaaattatcatgatgcgccgatcgtcggcatcgctgtggtcaacgaacatggacggtttttcctgcgcccggagacggcgcttgccgatccgcagtttgtcgcctggcttggtgatgaaacgaagaaaaaaagcatgtttgactcaaagcgcgcggcagtcgccttgaaatggaaaggaattgagctatgcggcgtttcctttgatttattgctggccgcctatttgcttgatccggcgcaaggtgttgatgatgtggctgccgcagcaaaaatgaagcaatacgaagcggtgcgctcggatgaagcggtgtatggcaaaggggcgaagcgggccgtgccggatgagccagtgctcgccgagcatctcgtccgcaaggcggcggcgatttgggcgctcgaacgtccgtttttggatgagctgcgccgcaacgaacaagatcggttgctcgtcgagctcgagcagccgttgtcttcgattttggcggaaatggaatttgccggagtgaaagtggatacgaagcggctcgaacagatgggcgaagagctcgccgagcagctgcgcacggtcgagcagcgcatttatgagctcgccggccaagaattcaacatcaattcaccgaaacagctcggcgtcattttatttgaaaaactgcagctgcccgtcttgaaaaaaacgaaaaccggctactccacttcggcggatgtgcttgaaaaacttgcgccttatcacgagatcgtggaaaacattttgcattaccgccagcttggcaagttgcagtcgacgtatattgaaggattgctgaaagtcgtgcgacccgatacaaagaaggtgcatacgattttcaatcaggcgttgacgcaaaccggacggctcagctcgacggagccgaacttgcaaaacattccgattcggcttgaggaaggacggaaaatccgccaagcgttcgtgccgtcggagtctgattggctcattttcgctgccgactactcgcaaattgagttgcgcgtcctcgcccatattgcggaagatgacaatttaatggaagcgttccgccgcgatttggatatccatacgaaaacagcgatggacattttccaagtgagcgaggacgaagtgacgcccaacatgcgccgtcaggcgaaggcggtcaactttgggatcgtttacgggatcagtgattacggcttggcgcaaaacttaaatatttcacgcaaagaggccgctgaattcatcgagcgctacttcgaaagcttccctggcgtgaagcggtatatggaaaacattgtgcaagaagcaaaacagaaagggtatgtgacgacgctgctgcatcggcgccgctatttgccggatatcgctagccgcaacttcaacgtccgcagctttgctgaacggatggcgatgaacacgccgattcaagggagcgccgctgacattattaaaaaggcgatgatcgatctgaacgctagactgaaggaagagcggctgcaagcgcgccttttgctacaggtgcatgacgagctcattttggaggcgccgaaagaagagatggagcggctgtgccggctcgttccggaagtgatggagcaagcggtcacacttcgcgtgccgctcaaagtcgattaccattatggctcgacgtggtatgacgcgaaataaaaaggatcc

SEQ ID NO: 2386 - DNA, 2712 bp, Artificial Sequence
  Description of Artificial Sequence: Synthetic DNA sequence of Bacillus caldolyticus EA1 DNA polymerase T801R
atgaaatacctgctgccgaccgctgctgctggtctgctgctcctcgctgcccagccggcgatggccatgggattgaaaaaaaagcttgttttaatcgacggcagcagcgtggcgtaccgcgcctttttcgccttgccgcttttgcataacgacaaaggcatccatacgaacgccgtctacgggtttacgatgatgttgaataaaattttggcggaagaagagccaactcatatgcttgtcgcgtttgacgccgggaaaacgacgttccggcatgaagcgtttcaagagtataaaggtgggcgccagcagacgccaccggagctgtcggagcagtttccgctgttgcgcgagctgctgagggcgtatcgcatccccgcctatgaactcgagaactacgaagcggacgatattatcggaacgcttgccgcccgcgctgagcaggaagggtttgaggtgaaagtcatttccggcgaccgcgatctgacccagctcgcctccccccatgtgacggtggacattacgaaaaaagggattaccgatatcgaaccgtacacgccggaggcggtccgcgaaaaatacggcttaactccggaacaaatcgttgatttgaaaggattgatgggcgacaaatcggacaacattcccggagtgccgggcatcggggaaaagacggcggtcaagctgctcaagcaattcggcacggtcgaaaacgtgcttgcctccattgacgagatcaaaggcgaaaagttgaaagaaacgctgcgccaacaccgggagatggcgctgttaagcaaaaagctcgccgccattcgccgcgacgccccggtcgagctctcgcttgatgacatcgtctatcaaggggaagaccgggagaaagtggtcgctttatttaaagagcttgggtttcaatcgtttttagagaaaatggaatcgccgtcatcagaagaggaaaaaccgcttgccaagatggcatttacgcttgctgaccgcgtgacggaggagatgcttgccgacaaggcggcgcttgtcgttgaagtggtcgaggaaaattatcatgatgcgccgatcgtcggcatcgctgtggtcaacgaacatggacggtttttcctgcgcccggagacggcgcttgccgatccgcagtttgtcgcctggcttggtgatgaaacgaagaaaaaaagcatgtttgactcaaagcgcgcggcagtcgccttgaaatggaaaggaattgagctatgcggcgtttcctttgatttattgctggccgcctatttgcttgatccggcgcaaggtgttgatgatgtggctgccgcagcaaaaatgaagcaatacgaagcggtgcgctcggatgaagcggtgtatggcaaaggggcgaagcgggccgtgccggatgagccagtgctcgccgagcatctcgtccgcaaggcggcggcgatttgggcgctcgaacgtccgtttttggatgagctgcgccgcaacgaacaagatcggttgctcgtcgagctcgagcagccgttgtcttcgattttggcggaaatggaatttgccggagtgaaagtggatacgaagcggctcgaacagatgggcgaagagctcgccgagcagctgcgcacggtcgagcagcgcatttatgagctcgccggccaagaattcaacatcaattcaccgaaacagctcggcgtcattttatttgaaaaactgcagctgcccgtcttgaaaaaaacgaaaaccggctactccacttcggcggatgtgcttgaaaaacttgcgccttatcacgagatcgtggaaaacattttgcattaccgccagcttggcaagttgcagtcgacgtatattgaaggattgctgaaagtcgtgcgacccgatacaaagaaggtgcatacgattttcaatcaggcgttgacgcaaaccggacggctcagctcgacggagccgaacttgcaaaacattccgattcggcttgaggaaggacggaaaatccgccaagcgttcgtgccgtcggagtctgattggctcattttcgctgccgactactcgcaaattgagttgcgcgtcctcgcccatattgcggaagatgacaatttaatggaagcgttccgccgcgatttggatatccatacgaaaacagcgatggacattttccaagtgagcgaggacgaagtgacgcccaacatgcgccgtcaggcgaaggcggtcaactttgggatcgtttacgggatcagtgattacggcttggcgcaaaacttaaatatttcacgcaaagaggccgctgaattcatcgagcgctacttcgaaagcttccctggcgtgaagcggtatatggaaaacattgtgcaagaagcaaaacagaaagggtatgtgacgacgctgctgcatcggcgccgctatttgccggatatccgaagccgcaacttcaacgtccgcagctttgctgaacggatggcgatgaacacgccgattcaagggagcgccgctgacattattaaaaaggcgatgatcgatctgaacgctagactgaaggaagagcggctgcaagcgcgccttttgctacaggtgcatgacgagctcattttggaggcgccgaaagaagagatggagcggctgtgccggctcgttccggaagtgatggagcaagcggtcacacttcgcgtgccgctcaaagtcgattaccattatggctcgacgtggtatgacgcgaaataaaaaggatcc

SEQ ID NO: 2387 - DNA, 2712 bp, Artificial Sequence
  Description of Artificial Sequence: Synthetic DNA sequence of Bacillus caldolyticus EA1 DNA polymerase T801C
atgaaatacctgctgccgaccgctgctgctggtctgctgctcctcgctgcccagccggcgatggccatgggattgaaaaaaaagcttgttttaatcgacggcagcagcgtggcgtaccgcgcctttttcgccttgccgcttttgcataacgacaaaggcatccatacgaacgccgtctacgggtttacgatgatgttgaataaaattttggcggaagaagagccaactcatatgcttgtcgcgtttgacgccgggaaaacgacgttccggcatgaagcgtttcaagagtataaaggtgggcgccagcagacgccaccggagctgtcggagcagtttccgctgttgcgcgagctgctgagggcgtatcgcatccccgcctatgaactcgagaactacgaagcggacgatattatcggaacgcttgccgcccgcgctgagcaggaagggtttgaggtgaaagtcatttccggcgaccgcgatctgacccagctcgcctccccccatgtgacggtggacattacgaaaaaagggattaccgatatcgaaccgtacacgccggaggcggtccgcgaaaaatacggcttaactccggaacaaatcgttgatttgaaaggattgatgggcgacaaatcggacaacattcccggagtgccgggcatcggggaaaagacggcggtcaagctgctcaagcaattcggcacggtcgaaaacgtgcttgcctccattgacgagatcaaaggcgaaaagttgaaagaaacgctgcgccaacaccgggagatggcgctgttaagcaaaaagctcgccgccattcgccgcgacgccccggtcgagctctcgcttgatgacatcgtctatcaaggggaagaccgggagaaagtggtcgctttatttaaagagcttgggtttcaatcgtttttagagaaaatggaatcgccgtcatcagaagaggaaaaaccgcttgccaagatggcatttacgcttgctgaccgcgtgacggaggagatgcttgccgacaaggcggcgcttgtcgttgaagtggtcgaggaaaattatcatgatgcgccgatcgtcggcatcgctgtggtcaacgaacatggacggtttttcctgcgcccggagacggcgcttgccgatccgcagtttgtcgcctggcttggtgatgaaacgaagaaaaaaagcatgtttgactcaaagcgcgcggcagtcgccttgaaatggaaaggaattgagctatgcggcgtttcctttgatttattgctggccgcctatttgcttgatccggcgcaaggtgttgatgatgtggctgccgcagcaaaaatgaagcaatacgaagcggtgcgctcggatgaagcggtgtatggcaaaggggcgaagcgggccgtgccggatgagccagtgctcgccgagcatctcgtccgcaaggcggcggcgatttgggcgctcgaacgtccgtttttggatgagctgcgccgcaacgaacaagatcggttgctcgtcgagctcgagcagccgttgtcttcgattttggcggaaatggaatttgccggagtgaaagtggatacgaagcggctcgaacagatgggcgaagagctcgccgagcagctgcgcacggtcgagcagcgcatttatgagctcgccggccaagaattcaacatcaattcaccgaaacagctcggcgtcattttatttgaaaaactgcagctgcccgtcttgaaaaaaacgaaaaccggctactccacttcggcggatgtgcttgaaaaacttgcgccttatcacgagatcgtggaaaacattttgcattaccgccagcttggcaagttgcagtcgacgtatattgaaggattgctgaaagtcgtgcgacccgatacaaagaaggtgcatacgattttcaatcaggcgttgacgcaaaccggacggctcagctcgacggagccgaacttgcaaaacattccgattcggcttgaggaaggacggaaaatccgccaagcgttcgtgccgtcggagtctgattggctcattttcgctgccgactactcgcaaattgagttgcgcgtcctcgcccatattgcggaagatgacaatttaatggaagcgttccgccgcgatttggatatccatacgaaaacagcgatggacattttccaagtgagcgaggacgaagtgacgcccaacatgcgccgtcaggcgaaggcggtcaactttgggatcgtttacgggatcagtgattacggcttggcgcaaaacttaaatatttcacgcaaagaggccgctgaattcatcgagcgctacttcgaaagcttccctggcgtgaagcggtatatggaaaacattgtgcaagaagcaaaacagaaagggtatgtgacgacgctgctgcatcggcgccgctatttgccggatatctgtagccgcaacttcaacgtccgcagctttgctgaacggatggcgatgaacacgccgattcaagggagcgccgctgacattattaaaaaggcgatgatcgatctgaacgctagactgaaggaagagcggctgcaagcgcgccttttgctacaggtgcatgacgagctcattttggaggcgccgaaagaagagatggagcggctgtgccggctcgttccggaagtgatggagcaagcggtcacacttcgcgtgccgctcaaagtcgattaccattatggctcgacgtggtatgacgcgaaataaaaaggatcc

SEQ ID NO: 2388 - DNA, 2712 bp, Artificial Sequence
  Description of Artificial Sequence: Synthetic DNA sequence of Bacillus caldolyticus EA1 DNA polymerase T801G
atgaaatacctgctgccgaccgctgctgctggtctgctgctcctcgctgcccagccggcgatggccatgggattgaaaaaaaagcttgttttaatcgacggcagcagcgtggcgtaccgcgcctttttcgccttgccgcttttgcataacgacaaaggcatccatacgaacgccgtctacgggtttacgatgatgttgaataaaattttggcggaagaagagccaactcatatgcttgtcgcgtttgacgccgggaaaacgacgttccggcatgaagcgtttcaagagtataaaggtgggcgccagcagacgccaccggagctgtcggagcagtttccgctgttgcgcgagctgctgagggcgtatcgcatccccgcctatgaactcgagaactacgaagcggacgatattatcggaacgcttgccgcccgcgctgagcaggaagggtttgaggtgaaagtcatttccggcgaccgcgatctgacccagctcgcctccccccatgtgacggtggacattacgaaaaaagggattaccgatatcgaaccgtacacgccggaggcggtccgcgaaaaatacggcttaactccggaacaaatcgttgatttgaaaggattgatgggcgacaaatcggacaacattcccggagtgccgggcatcggggaaaagacggcggtcaagctgctcaagcaattcggcacggtcgaaaacgtgcttgcctccattgacgagatcaaaggcgaaaagttgaaagaaacgctgcgccaacaccgggagatggcgctgttaagcaaaaagctcgccgccattcgccgcgacgccccggtcgagctctcgcttgatgacatcgtctatcaaggggaagaccgggagaaagtggtcgctttatttaaagagcttgggtttcaatcgtttttagagaaaatggaatcgccgtcatcagaagaggaaaaaccgcttgccaagatggcatttacgcttgctgaccgcgtgacggaggagatgcttgccgacaaggcggcgcttgtcgttgaagtggtcgaggaaaattatcatgatgcgccgatcgtcggcatcgctgtggtcaacgaacatggacggtttttcctgcgcccggagacggcgcttgccgatccgcagtttgtcgcctggcttggtgatgaaacgaagaaaaaaagcatgtttgactcaaagcgcgcggcagtcgccttgaaatggaaaggaattgagctatgcggcgtttcctttgatttattgctggccgcctatttgcttgatccggcgcaaggtgttgatgatgtggctgccgcagcaaaaatgaagcaatacgaagcggtgcgctcggatgaagcggtgtatggcaaaggggcgaagcgggccgtgccggatgagccagtgctcgccgagcatctcgtccgcaaggcggcggcgatttgggcgctcgaacgtccgtttttggatgagctgcgccgcaacgaacaagatcggttgctcgtcgagctcgagcagccgttgtcttcgattttggcggaaatggaatttgccggagtgaaagtggatacgaagcggctcgaacagatgggcgaagagctcgccgagcagctgcgcacggtcgagcagcgcatttatgagctcgccggccaagaattcaacatcaattcaccgaaacagctcggcgtcattttatttgaaaaactgcagctgcccgtcttgaaaaaaacgaaaaccggctactccacttcggcggatgtgcttgaaaaacttgcgccttatcacgagatcgtggaaaacattttgcattaccgccagcttggcaagttgcagtcgacgtatattgaaggattgctgaaagtcgtgcgacccgatacaaagaaggtgcatacgattttcaatcaggcgttgacgcaaaccggacggctcagctcgacggagccgaacttgcaaaacattccgattcggcttgaggaaggacggaaaatccgccaagcgttcgtgccgtcggagtctgattggctcattttcgctgccgactactcgcaaattgagttgcgcgtcctcgcccatattgcggaagatgacaatttaatggaagcgttccgccgcgatttggatatccatacgaaaacagcgatggacattttccaagtgagcgaggacgaagtgacgcccaacatgcgccgtcaggcgaaggcggtcaactttgggatcgtttacgggatcagtgattacggcttggcgcaaaacttaaatatttcacgcaaagaggccgctgaattcatcgagcgctacttcgaaagcttccctggcgtgaagcggtatatggaaaacattgtgcaagaagcaaaacagaaagggtatgtgacgacgctgctgcatcggcgccgctatttgccggatatcggtagccgcaacttcaacgtccgcagctttgctgaacggatggcgatgaacacgccgattcaagggagcgccgctgacattattaaaaaggcgatgatcgatctgaacgctagactgaaggaagagcggctgcaagcgcgccttttgctacaggtgcatgacgagctcattttggaggcgccgaaagaagagatggagcggctgtgccggctcgttccggaagtgatggagcaagcggtcacacttcgcgtgccgctcaaagtcgattaccattatggctcgacgtggtatgacgcgaaataaaaaggatcc

SEQ ID NO: 2389 - DNA, 2712 bp, Artificial Sequence
  Description of Artificial Sequence: Synthetic DNA sequence of Bacillus caldolyticus EA1 DNA polymerase T801Q
atgaaatacctgctgccgaccgctgctgctggtctgctgctcctcgctgcccagccggcgatggccatgggattgaaaaaaaagcttgttttaatcgacggcagcagcgtggcgtaccgcgcctttttcgccttgccgcttttgcataacgacaaaggcatccatacgaacgccgtctacgggtttacgatgatgttgaataaaattttggcggaagaagagccaactcatatgcttgtcgcgtttgacgccgggaaaacgacgttccggcatgaagcgtttcaagagtataaaggtgggcgccagcagacgccaccggagctgtcggagcagtttccgctgttgcgcgagctgctgagggcgtatcgcatccccgcctatgaactcgagaactacgaagcggacgatattatcggaacgcttgccgcccgcgctgagcaggaagggtttgaggtgaaagtcatttccggcgaccgcgatctgacccagctcgcctccccccatgtgacggtggacattacgaaaaaagggattaccgatatcgaaccgtacacgccggaggcggtccgcgaaaaatacggcttaactccggaacaaatcgttgatttgaaaggattgatgggcgacaaatcggacaacattcccggagtgccgggcatcggggaaaagacggcggtcaagctgctcaagcaattcggcacggtcgaaaacgtgcttgcctccattgacgagatcaaaggcgaaaagttgaaagaaacgctgcgccaacaccgggagatggcgctgttaagcaaaaagctcgccgccattcgccgcgacgccccggtcgagctctcgcttgatgacatcgtctatcaaggggaagaccgggagaaagtggtcgctttatttaaagagcttgggtttcaatcgtttttagagaaaatggaatcgccgtcatcagaagaggaaaaaccgcttgccaagatggcatttacgcttgctgaccgcgtgacggaggagatgcttgccgacaaggcggcgcttgtcgttgaagtggtcgaggaaaattatcatgatgcgccgatcgtcggcatcgctgtggtcaacgaacatggacggtttttcctgcgcccggagacggcgcttgccgatccgcagtttgtcgcctggcttggtgatgaaacgaagaaaaaaagcatgtttgactcaaagcgcgcggcagtcgccttgaaatggaaaggaattgagctatgcggcgtttcctttgatttattgctggccgcctatttgcttgatccggcgcaaggtgttgatgatgtggctgccgcagcaaaaatgaagcaatacgaagcggtgcgctcggatgaagcggtgtatggcaaaggggcgaagcgggccgtgccggatgagccagtgctcgccgagcatctcgtccgcaaggcggcggcgatttgggcgctcgaacgtccgtttttggatgagctgcgccgcaacgaacaagatcggttgctcgtcgagctcgagcagccgttgtcttcgattttggcggaaatggaatttgccggagtgaaagtggatacgaagcggctcgaacagatgggcgaagagctcgccgagcagctgcgcacggtcgagcagcgcatttatgagctcgccggccaagaattcaacatcaattcaccgaaacagctcggcgtcattttatttgaaaaactgcagctgcccgtcttgaaaaaaacgaaaaccggctactccacttcggcggatgtgcttgaaaaacttgcgccttatcacgagatcgtggaaaacattttgcattaccgccagcttggcaagttgcagtcgacgtatattgaaggattgctgaaagtcgtgcgacccgatacaaagaaggtgcatacgattttcaatcaggcgttgacgcaaaccggacggctcagctcgacggagccgaacttgcaaaacattccgattcggcttgaggaaggacggaaaatccgccaagcgttcgtgccgtcggagtctgattggctcattttcgctgccgactactcgcaaattgagttgcgcgtcctcgcccatattgcggaagatgacaatttaatggaagcgttccgccgcgatttggatatccatacgaaaacagcgatggacattttccaagtgagcgaggacgaagtgacgcccaacatgcgccgtcaggcgaaggcggtcaactttgggatcgtttacgggatcagtgattacggcttggcgcaaaacttaaatatttcacgcaaagaggccgctgaattcatcgagcgctacttcgaaagcttccctggcgtgaagcggtatatggaaaacattgtgcaagaagcaaaacagaaagggtatgtgacgacgctgctgcatcggcgccgctatttgccggatatccaaagccgcaacttcaacgtccgcagctttgctgaacggatggcgatgaacacgccgattcaagggagcgccgctgacattattaaaaaggcgatgatcgatctgaacgctagactgaaggaagagcggctgcaagcgcgccttttgctacaggtgcatgacgagctcattttggaggcgccgaaagaagagatggagcggctgtgccggctcgttccggaagtgatggagcaagcggtcacacttcgcgtgccgctcaaagtcgattaccattatggctcgacgtggtatgacgcgaaataaaaaggatcc

SEQ ID NO: 2390 - DNA, 2712 bp, Artificial Sequence
  Description of Artificial Sequence: Synthetic DNA sequence of Bacillus caldolyticus EA1 DNA polymerase T801H
atgaaatacctgctgccgaccgctgctgctggtctgctgctcctcgctgcccagccggcgatggccatgggattgaaaaaaaagcttgttttaatcgacggcagcagcgtggcgtaccgcgcctttttcgccttgccgcttttgcataacgacaaaggcatccatacgaacgccgtctacgggtttacgatgatgttgaataaaattttggcggaagaagagccaactcatatgcttgtcgcgtttgacgccgggaaaacgacgttccggcatgaagcgtttcaagagtataaaggtgggcgccagcagacgccaccggagctgtcggagcagtttccgctgttgcgcgagctgctgagggcgtatcgcatccccgcctatgaactcgagaactacgaagcggacgatattatcggaacgcttgccgcccgcgctgagcaggaagggtttgaggtgaaagtcatttccggcgaccgcgatctgacccagctcgcctccccccatgtgacggtggacattacgaaaaaagggattaccgatatcgaaccgtacacgccggaggcggtccgcgaaaaatacggcttaactccggaacaaatcgttgatttgaaaggattgatgggcgacaaatcggacaacattcccggagtgccgggcatcggggaaaagacggcggtcaagctgctcaagcaattcggcacggtcgaaaacgtgcttgcctccattgacgagatcaaaggcgaaaagttgaaagaaacgctgcgccaacaccgggagatggcgctgttaagcaaaaagctcgccgccattcgccgcgacgccccggtcgagctctcgcttgatgacatcgtctatcaaggggaagaccgggagaaagtggtcgctttatttaaagagcttgggtttcaatcgtttttagagaaaatggaatcgccgtcatcagaagaggaaaaaccgcttgccaagatggcatttacgcttgctgaccgcgtgacggaggagatgcttgccgacaaggcggcgcttgtcgttgaagtggtcgaggaaaattatcatgatgcgccgatcgtcggcatcgctgtggtcaacgaacatggacggtttttcctgcgcccggagacggcgcttgccgatccgcagtttgtcgcctggcttggtgatgaaacgaagaaaaaaagcatgtttgactcaaagcgcgcggcagtcgccttgaaatggaaaggaattgagctatgcggcgtttcctttgatttattgctggccgcctatttgcttgatccggcgcaaggtgttgatgatgtggctgccgcagcaaaaatgaagcaatacgaagcggtgcgctcggatgaagcggtgtatggcaaaggggcgaagcgggccgtgccggatgagccagtgctcgccgagcatctcgtccgcaaggcggcggcgatttgggcgctcgaacgtccgtttttggatgagctgcgccgcaacgaacaagatcggttgctcgtcgagctcgagcagccgttgtcttcgattttggcggaaatggaatttgccggagtgaaagtggatacgaagcggctcgaacagatgggcgaagagctcgccgagcagctgcgcacggtcgagcagcgcatttatgagctcgccggccaagaattcaacatcaattcaccgaaacagctcggcgtcattttatttgaaaaactgcagctgcccgtcttgaaaaaaacgaaaaccggctactccacttcggcggatgtgcttgaaaaacttgcgccttatcacgagatcgtggaaaacattttgcattaccgccagcttggcaagttgcagtcgacgtatattgaaggattgctgaaagtcgtgcgacccgatacaaagaaggtgcatacgattttcaatcaggcgttgacgcaaaccggacggctcagctcgacggagccgaacttgcaaaacattccgattcggcttgaggaaggacggaaaatccgccaagcgttcgtgccgtcggagtctgattggctcattttcgctgccgactactcgcaaattgagttgcgcgtcctcgcccatattgcggaagatgacaatttaatggaagcgttccgccgcgatttggatatccatacgaaaacagcgatggacattttccaagtgagcgaggacgaagtgacgcccaacatgcgccgtcaggcgaaggcggtcaactttgggatcgtttacgggatcagtgattacggcttggcgcaaaacttaaatatttcacgcaaagaggccgctgaattcatcgagcgctacttcgaaagcttccctggcgtgaagcggtatatggaaaacattgtgcaagaagcaaaacagaaagggtatgtgacgacgctgctgcatcggcgccgctatttgccggatatccatagccgcaacttcaacgtccgcagctttgctgaacggatggcgatgaacacgccgattcaagggagcgccgctgacattattaaaaaggcgatgatcgatctgaacgctagactgaaggaagagcggctgcaagcgcgccttttgctacaggtgcatgacgagctcattttggaggcgccgaaagaagagatggagcggctgtgccggctcgttccggaagtgatggagcaagcggtcacacttcgcgtgccgctcaaagtcgattaccattatggctcgacgtggtatgacgcgaaataaaaaggatcc

SEQ ID NO: 2391 - DNA, 2712 bp, Artificial Sequence
  Description of Artificial Sequence: Synthetic DNA sequence of Bacillus caldolyticus EA1 DNA polymerase T801I
atgaaatacctgctgccgaccgctgctgctggtctgctgctcctcgctgcccagccggcgatggccatgggattgaaaaaaaagcttgttttaatcgacggcagcagcgtggcgtaccgcgcctttttcgccttgccgcttttgcataacgacaaaggcatccatacgaacgccgtctacgggtttacgatgatgttgaataaaattttggcggaagaagagccaactcatatgcttgtcgcgtttgacgccgggaaaacgacgttccggcatgaagcgtttcaagagtataaaggtgggcgccagcagacgccaccggagctgtcggagcagtttccgctgttgcgcgagctgctgagggcgtatcgcatccccgcctatgaactcgagaactacgaagcggacgatattatcggaacgcttgccgcccgcgctgagcaggaagggtttgaggtgaaagtcatttccggcgaccgcgatctgacccagctcgcctccccccatgtgacggtggacattacgaaaaaagggattaccgatatcgaaccgtacacgccggaggcggtccgcgaaaaatacggcttaactccggaacaaatcgttgatttgaaaggattgatgggcgacaaatcggacaacattcccggagtgccgggcatcggggaaaagacggcggtcaagctgctcaagcaattcggcacggtcgaaaacgtgcttgcctccattgacgagatcaaaggcgaaaagttgaaagaaacgctgcgccaacaccgggagatggcgctgttaagcaaaaagctcgccgccattcgccgcgacgccccggtcgagctctcgcttgatgacatcgtctatcaaggggaagaccgggagaaagtggtcgctttatttaaagagcttgggtttcaatcgtttttagagaaaatggaatcgccgtcatcagaagaggaaaaaccgcttgccaagatggcatttacgcttgctgaccgcgtgacggaggagatgcttgccgacaaggcggcgcttgtcgttgaagtggtcgaggaaaattatcatgatgcgccgatcgtcggcatcgctgtggtcaacgaacatggacggtttttcctgcgcccggagacggcgcttgccgatccgcagtttgtcgcctggcttggtgatgaaacgaagaaaaaaagcatgtttgactcaaagcgcgcggcagtcgccttgaaatggaaaggaattgagctatgcggcgtttcctttgatttattgctggccgcctatttgcttgatccggcgcaaggtgttgatgatgtggctgccgcagcaaaaatgaagcaatacgaagcggtgcgctcggatgaagcggtgtatggcaaaggggcgaagcgggccgtgccggatgagccagtgctcgccgagcatctcgtccgcaaggcggcggcgatttgggcgctcgaacgtccgtttttggatgagctgcgccgcaacgaacaagatcggttgctcgtcgagctcgagcagccgttgtcttcgattttggcggaaatggaatttgccggagtgaaagtggatacgaagcggctcgaacagatgggcgaagagctcgccgagcagctgcgcacggtcgagcagcgcatttatgagctcgccggccaagaattcaacatcaattcaccgaaacagctcggcgtcattttatttgaaaaactgcagctgcccgtcttgaaaaaaacgaaaaccggctactccacttcggcggatgtgcttgaaaaacttgcgccttatcacgagatcgtggaaaacattttgcattaccgccagcttggcaagttgcagtcgacgtatattgaaggattgctgaaagtcgtgcgacccgatacaaagaaggtgcatacgattttcaatcaggcgttgacgcaaaccggacggctcagctcgacggagccgaacttgcaaaacattccgattcggcttgaggaaggacggaaaatccgccaagcgttcgtgccgtcggagtctgattggctcattttcgctgccgactactcgcaaattgagttgcgcgtcctcgcccatattgcggaagatgacaatttaatggaagcgttccgccgcgatttggatatccatacgaaaacagcgatggacattttccaagtgagcgaggacgaagtgacgcccaacatgcgccgtcaggcgaaggcggtcaactttgggatcgtttacgggatcagtgattacggcttggcgcaaaacttaaatatttcacgcaaagaggccgctgaattcatcgagcgctacttcgaaagcttccctggcgtgaagcggtatatggaaaacattgtgcaagaagcaaaacagaaagggtatgtgacgacgctgctgcatcggcgccgctatttgccggatatcattagccgcaacttcaacgtccgcagctttgctgaacggatggcgatgaacacgccgattcaagggagcgccgctgacattattaaaaaggcgatgatcgatctgaacgctagactgaaggaagagcggctgcaagcgcgccttttgctacaggtgcatgacgagctcattttggaggcgccgaaagaagagatggagcggctgtgccggctcgttccggaagtgatggagcaagcggtcacacttcgcgtgccgctcaaagtcgattaccattatggctcgacgtggtatgacgcgaaataaaaaggatcc

SEQ ID NO: 2392 - DNA, 2712 bp, Artificial Sequence
  Description of Artificial Sequence: Synthetic DNA sequence of Bacillus caldolyticus EA1 DNA polymerase T801L
atgaaatacctgctgccgaccgctgctgctggtctgctgctcctcgctgcccagccggcgatggccatgggattgaaaaaaaagcttgttttaatcgacggcagcagcgtggcgtaccgcgcctttttcgccttgccgcttttgcataacgacaaaggcatccatacgaacgccgtctacgggtttacgatgatgttgaataaaattttggcggaagaagagccaactcatatgcttgtcgcgtttgacgccgggaaaacgacgttccggcatgaagcgtttcaagagtataaaggtgggcgccagcagacgccaccggagctgtcggagcagtttccgctgttgcgcgagctgctgagggcgtatcgcatccccgcctatgaactcgagaactacgaagcggacgatattatcggaacgcttgccgcccgcgctgagcaggaagggtttgaggtgaaagtcatttccggcgaccgcgatctgacccagctcgcctccccccatgtgacggtggacattacgaaaaaagggattaccgatatcgaaccgtacacgccggaggcggtccgcgaaaaatacggcttaactccggaacaaatcgttgatttgaaaggattgatgggcgacaaatcggacaacattcccggagtgccgggcatcggggaaaagacggcggtcaagctgctcaagcaattcggcacggtcgaaaacgtgcttgcctccattgacgagatcaaaggcgaaaagttgaaagaaacgctgcgccaacaccgggagatggcgctgttaagcaaaaagctcgccgccattcgccgcgacgccccggtcgagctctcgcttgatgacatcgtctatcaaggggaagaccgggagaaagtggtcgctttatttaaagagcttgggtttcaatcgtttttagagaaaatggaatcgccgtcatcagaagaggaaaaaccgcttgccaagatggcatttacgcttgctgaccgcgtgacggaggagatgcttgccgacaaggcggcgcttgtcgttgaagtggtcgaggaaaattatcatgatgcgccgatcgtcggcatcgctgtggtcaacgaacatggacggtttttcctgcgcccggagacggcgcttgccgatccgcagtttgtcgcctggcttggtgatgaaacgaagaaaaaaagcatgtttgactcaaagcgcgcggcagtcgccttgaaatggaaaggaattgagctatgcggcgtttcctttgatttattgctggccgcctatttgcttgatccggcgcaaggtgttgatgatgtggctgccgcagcaaaaatgaagcaatacgaagcggtgcgctcggatgaagcggtgtatggcaaaggggcgaagcgggccgtgccggatgagccagtgctcgccgagcatctcgtccgcaaggcggcggcgatttgggcgctcgaacgtccgtttttggatgagctgcgccgcaacgaacaagatcggttgctcgtcgagctcgagcagccgttgtcttcgattttggcggaaatggaatttgccggagtgaaagtggatacgaagcggctcgaacagatgggcgaagagctcgccgagcagctgcgcacggtcgagcagcgcatttatgagctcgccggccaagaattcaacatcaattcaccgaaacagctcggcgtcattttatttgaaaaactgcagctgcccgtcttgaaaaaaacgaaaaccggctactccacttcggcggatgtgcttgaaaaacttgcgccttatcacgagatcgtggaaaacattttgcattaccgccagcttggcaagttgcagtcgacgtatattgaaggattgctgaaagtcgtgcgacccgatacaaagaaggtgcatacgattttcaatcaggcgttgacgcaaaccggacggctcagctcgacggagccgaacttgcaaaacattccgattcggcttgaggaaggacggaaaatccgccaagcgttcgtgccgtcggagtctgattggctcattttcgctgccgactactcgcaaattgagttgcgcgtcctcgcccatattgcggaagatgacaatttaatggaagcgttccgccgcgatttggatatccatacgaaaacagcgatggacattttccaagtgagcgaggacgaagtgacgcccaacatgcgccgtcaggcgaaggcggtcaactttgggatcgtttacgggatcagtgattacggcttggcgcaaaacttaaatatttcacgcaaagaggccgctgaattcatcgagcgctacttcgaaagcttccctggcgtgaagcggtatatggaaaacattgtgcaagaagcaaaacagaaagggtatgtgacgacgctgctgcatcggcgccgctatttgccggatatcttaagccgcaacttcaacgtccgcagctttgctgaacggatggcgatgaacacgccgattcaagggagcgccgctgacattattaaaaaggcgatgatcgatctgaacgctagactgaaggaagagcggctgcaagcgcgccttttgctacaggtgcatgacgagctcattttggaggcgccgaaagaagagatggagcggctgtgccggctcgttccggaagtgatggagcaagcggtcacacttcgcgtgccgctcaaagtcgattaccattatggctcgacgtggtatgacgcgaaataaaaaggatcc

SEQ ID NO: 2393 - DNA, 2712 bp, Artificial Sequence
  Description of Artificial Sequence: Synthetic DNA sequence of Bacillus caldolyticus EA1 DNA polymerase T801K
atgaaatacctgctgccgaccgctgctgctggtctgctgctcctcgctgcccagccggcgatggccatgggattgaaaaaaaagcttgttttaatcgacggcagcagcgtggcgtaccgcgcctttttcgccttgccgcttttgcataacgacaaaggcatccatacgaacgccgtctacgggtttacgatgatgttgaataaaattttggcggaagaagagccaactcatatgcttgtcgcgtttgacgccgggaaaacgacgttccggcatgaagcgtttcaagagtataaaggtgggcgccagcagacgccaccggagctgtcggagcagtttccgctgttgcgcgagctgctgagggcgtatcgcatccccgcctatgaactcgagaactacgaagcggacgatattatcggaacgcttgccgcccgcgctgagcaggaagggtttgaggtgaaagtcatttccggcgaccgcgatctgacccagctcgcctccccccatgtgacggtggacattacgaaaaaagggattaccgatatcgaaccgtacacgccggaggcggtccgcgaaaaatacggcttaactccggaacaaatcgttgatttgaaaggattgatgggcgacaaatcggacaacattcccggagtgccgggcatcggggaaaagacggcggtcaagctgctcaagcaattcggcacggtcgaaaacgtgcttgcctccattgacgagatcaaaggcgaaaagttgaaagaaacgctgcgccaacaccgggagatggcgctgttaagcaaaaagctcgccgccattcgccgcgacgccccggtcgagctctcgcttgatgacatcgtctatcaaggggaagaccgggagaaagtggtcgctttatttaaagagcttgggtttcaatcgtttttagagaaaatggaatcgccgtcatcagaagaggaaaaaccgcttgccaagatggcatttacgcttgctgaccgcgtgacggaggagatgcttgccgacaaggcggcgcttgtcgttgaagtggtcgaggaaaattatcatgatgcgccgatcgtcggcatcgctgtggtcaacgaacatggacggtttttcctgcgcccggagacggcgcttgccgatccgcagtttgtcgcctggcttggtgatgaaacgaagaaaaaaagcatgtttgactcaaagcgcgcggcagtcgccttgaaatggaaaggaattgagctatgcggcgtttcctttgatttattgctggccgcctatttgcttgatccggcgcaaggtgttgatgatgtggctgccgcagcaaaaatgaagcaatacgaagcggtgcgctcggatgaagcggtgtatggcaaaggggcgaagcgggccgtgccggatgagccagtgctcgccgagcatctcgtccgcaaggcggcggcgatttgggcgctcgaacgtccgtttttggatgagctgcgccgcaacgaacaagatcggttgctcgtcgagctcgagcagccgttgtcttcgattttggcggaaatggaatttgccggagtgaaagtggatacgaagcggctcgaacagatgggcgaagagctcgccgagcagctgcgcacggtcgagcagcgcatttatgagctcgccggccaagaattcaacatcaattcaccgaaacagctcggcgtcattttatttgaaaaactgcagctgcccgtcttgaaaaaaacgaaaaccggctactccacttcggcggatgtgcttgaaaaacttgcgccttatcacgagatcgtggaaaacattttgcattaccgccagcttggcaagttgcagtcgacgtatattgaaggattgctgaaagtcgtgcgacccgatacaaagaaggtgcatacgattttcaatcaggcgttgacgcaaaccggacggctcagctcgacggagccgaacttgcaaaacattccgattcggcttgaggaaggacggaaaatccgccaagcgttcgtgccgtcggagtctgattggctcattttcgctgccgactactcgcaaattgagttgcgcgtcctcgcccatattgcggaagatgacaatttaatggaagcgttccgccgcgatttggatatccatacgaaaacagcgatggacattttccaagtgagcgaggacgaagtgacgcccaacatgcgccgtcaggcgaaggcggtcaactttgggatcgtttacgggatcagtgattacggcttggcgcaaaacttaaatatttcacgcaaagaggccgctgaattcatcgagcgctacttcgaaagcttccctggcgtgaagcggtatatggaaaacattgtgcaagaagcaaaacagaaagggtatgtgacgacgctgctgcatcggcgccgctatttgccggatatcaaaagccgcaacttcaacgtccgcagctttgctgaacggatggcgatgaacacgccgattcaagggagcgccgctgacattattaaaaaggcgatgatcgatctgaacgctagactgaaggaagagcggctgcaagcgcgccttttgctacaggtgcatgacgagctcattttggaggcgccgaaagaagagatggagcggctgtgccggctcgttccggaagtgatggagcaagcggtcacacttcgcgtgccgctcaaagtcgattaccattatggctcgacgtggtatgacgcgaaataaaaaggatcc

SEQ ID NO: 2394 - DNA, 2712 bp, Artificial Sequence
  Description of Artificial Sequence: Synthetic DNA sequence of Bacillus caldolyticus EA1 DNA polymerase T801E
atgaaatacctgctgccgaccgctgctgctggtctgctgctcctcgctgcccagccggcgatggccatgggattgaaaaaaaagcttgttttaatcgacggcagcagcgtggcgtaccgcgcctttttcgccttgccgcttttgcataacgacaaaggcatccatacgaacgccgtctacgggtttacgatgatgttgaataaaattttggcggaagaagagccaactcatatgcttgtcgcgtttgacgccgggaaaacgacgttccggcatgaagcgtttcaagagtataaaggtgggcgccagcagacgccaccggagctgtcggagcagtttccgctgttgcgcgagctgctgagggcgtatcgcatccccgcctatgaactcgagaactacgaagcggacgatattatcggaacgcttgccgcccgcgctgagcaggaagggtttgaggtgaaagtcatttccggcgaccgcgatctgacccagctcgcctccccccatgtgacggtggacattacgaaaaaagggattaccgatatcgaaccgtacacgccggaggcggtccgcgaaaaatacggcttaactccggaacaaatcgttgatttgaaaggattgatgggcgacaaatcggacaacattcccggagtgccgggcatcggggaaaagacggcggtcaagctgctcaagcaattcggcacggtcgaaaacgtgcttgcctccattgacgagatcaaaggcgaaaagttgaaagaaacgctgcgccaacaccgggagatggcgctgttaagcaaaaagctcgccgccattcgccgcgacgccccggtcgagctctcgcttgatgacatcgtctatcaaggggaagaccgggagaaagtggtcgctttatttaaagagcttgggtttcaatcgtttttagagaaaatggaatcgccgtcatcagaagaggaaaaaccgcttgccaagatggcatttacgcttgctgaccgcgtgacggaggagatgcttgccgacaaggcggcgcttgtcgttgaagtggtcgaggaaaattatcatgatgcgccgatcgtcggcatcgctgtggtcaacgaacatggacggtttttcctgcgcccggagacggcgcttgccgatccgcagtttgtcgcctggcttggtgatgaaacgaagaaaaaaagcatgtttgactcaaagcgcgcggcagtcgccttgaaatggaaaggaattgagctatgcggcgtttcctttgatttattgctggccgcctatttgcttgatccggcgcaaggtgttgatgatgtggctgccgcagcaaaaatgaagcaatacgaagcggtgcgctcggatgaagcggtgtatggcaaaggggcgaagcgggccgtgccggatgagccagtgctcgccgagcatctcgtccgcaaggcggcggcgatttgggcgctcgaacgtccgtttttggatgagctgcgccgcaacgaacaagatcggttgctcgtcgagctcgagcagccgttgtcttcgattttggcggaaatggaatttgccggagtgaaagtggatacgaagcggctcgaacagatgggcgaagagctcgccgagcagctgcgcacggtcgagcagcgcatttatgagctcgccggccaagaattcaacatcaattcaccgaaacagctcggcgtcattttatttgaaaaactgcagctgcccgtcttgaaaaaaacgaaaaccggctactccacttcggcggatgtgcttgaaaaacttgcgccttatcacgagatcgtggaaaacattttgcattaccgccagcttggcaagttgcagtcgacgtatattgaaggattgctgaaagtcgtgcgacccgatacaaagaaggtgcatacgattttcaatcaggcgttgacgcaaaccggacggctcagctcgacggagccgaacttgcaaaacattccgattcggcttgaggaaggacggaaaatccgccaagcgttcgtgccgtcggagtctgattggctcattttcgctgccgactactcgcaaattgagttgcgcgtcctcgcccatattgcggaagatgacaatttaatggaagcgttccgccgcgatttggatatccatacgaaaacagcgatggacattttccaagtgagcgaggacgaagtgacgcccaacatgcgccgtcaggcgaaggcggtcaactttgggatcgtttacgggatcagtgattacggcttggcgcaaaacttaaatatttcacgcaaagaggccgctgaattcatcgagcgctacttcgaaagcttccctggcgtgaagcggtatatggaaaacattgtgcaagaagcaaaacagaaagggtatgtgacgacgctgctgcatcggcgccgctatttgccggatatcgaaagccgcaacttcaacgtccgcagctttgctgaacggatggcgatgaacacgccgattcaagggagcgccgctgacattattaaaaaggcgatgatcgatctgaacgctagactgaaggaagagcggctgcaagcgcgccttttgctacaggtgcatgacgagctcattttggaggcgccgaaagaagagatggagcggctgtgccggctcgttccggaagtgatggagcaagcggtcacacttcgcgtgccgctcaaagtcgattaccattatggctcgacgtggtatgacgcgaaataaaaaggatcc

SEQ ID NO: 2395 - DNA, 2712 bp, Artificial Sequence
  Description of Artificial Sequence: Synthetic DNA sequence of Bacillus caldolyticus EA1 DNA polymerase T801D
atgaaatacctgctgccgaccgctgctgctggtctgctgctcctcgctgcccagccggcgatggccatgggattgaaaaaaaagcttgttttaatcgacggcagcagcgtggcgtaccgcgcctttttcgccttgccgcttttgcataacgacaaaggcatccatacgaacgccgtctacgggtttacgatgatgttgaataaaattttggcggaagaagagccaactcatatgcttgtcgcgtttgacgccgggaaaacgacgttccggcatgaagcgtttcaagagtataaaggtgggcgccagcagacgccaccggagctgtcggagcagtttccgctgttgcgcgagctgctgagggcgtatcgcatccccgcctatgaactcgagaactacgaagcggacgatattatcggaacgcttgccgcccgcgctgagcaggaagggtttgaggtgaaagtcatttccggcgaccgcgatctgacccagctcgcctccccccatgtgacggtggacattacgaaaaaagggattaccgatatcgaaccgtacacgccggaggcggtccgcgaaaaatacggcttaactccggaacaaatcgttgatttgaaaggattgatgggcgacaaatcggacaacattcccggagtgccgggcatcggggaaaagacggcggtcaagctgctcaagcaattcggcacggtcgaaaacgtgcttgcctccattgacgagatcaaaggcgaaaagttgaaagaaacgctgcgccaacaccgggagatggcgctgttaagcaaaaagctcgccgccattcgccgcgacgccccggtcgagctctcgcttgatgacatcgtctatcaaggggaagaccgggagaaagtggtcgctttatttaaagagcttgggtttcaatcgtttttagagaaaatggaatcgccgtcatcagaagaggaaaaaccgcttgccaagatggcatttacgcttgctgaccgcgtgacggaggagatgcttgccgacaaggcggcgcttgtcgttgaagtggtcgaggaaaattatcatgatgcgccgatcgtcggcatcgctgtggtcaacgaacatggacggtttttcctgcgcccggagacggcgcttgccgatccgcagtttgtcgcctggcttggtgatgaaacgaagaaaaaaagcatgtttgactcaaagcgcgcggcagtcgccttgaaatggaaaggaattgagctatgcggcgtttcctttgatttattgctggccgcctatttgcttgatccggcgcaaggtgttgatgatgtggctgccgcagcaaaaatgaagcaatacgaagcggtgcgctcggatgaagcggtgtatggcaaaggggcgaagcgggccgtgccggatgagccagtgctcgccgagcatctcgtccgcaaggcggcggcgatttgggcgctcgaacgtccgtttttggatgagctgcgccgcaacgaacaagatcggttgctcgtcgagctcgagcagccgttgtcttcgattttggcggaaatggaatttgccggagtgaaagtggatacgaagcggctcgaacagatgggcgaagagctcgccgagcagctgcgcacggtcgagcagcgcatttatgagctcgccggccaagaattcaacatcaattcaccgaaacagctcggcgtcattttatttgaaaaactgcagctgcccgtcttgaaaaaaacgaaaaccggctactccacttcggcggatgtgcttgaaaaacttgcgccttatcacgagatcgtggaaaacattttgcattaccgccagcttggcaagttgcagtcgacgtatattgaaggattgctgaaagtcgtgcgacccgatacaaagaaggtgcatacgattttcaatcaggcgttgacgcaaaccggacggctcagctcgacggagccgaacttgcaaaacattccgattcggcttgaggaaggacggaaaatccgccaagcgttcgtgccgtcggagtctgattggctcattttcgctgccgactactcgcaaattgagttgcgcgtcctcgcccatattgcggaagatgacaatttaatggaagcgttccgccgcgatttggatatccatacgaaaacagcgatggacattttccaagtgagcgaggacgaagtgacgcccaacatgcgccgtcaggcgaaggcggtcaactttgggatcgtttacgggatcagtgattacggcttggcgcaaaacttaaatatttcacgcaaagaggccgctgaattcatcgagcgctacttcgaaagcttccctggcgtgaagcggtatatggaaaacattgtgcaagaagcaaaacagaaagggtatgtgacgacgctgctgcatcggcgccgctatttgccggatatcgatagccgcaacttcaacgtccgcagctttgctgaacggatggcgatgaacacgccgattcaagggagcgccgctgacattattaaaaaggcgatgatcgatctgaacgctagactgaaggaagagcggctgcaagcgcgccttttgctacaggtgcatgacgagctcattttggaggcgccgaaagaagagatggagcggctgtgccggctcgttccggaagtgatggagcaagcggtcacacttcgcgtgccgctcaaagtcgattaccattatggctcgacgtggtatgacgcgaaataaaaaggatcc

SEQ ID NO: 2396 - DNA, 2712 bp, Artificial Sequence
  Description of Artificial Sequence: Synthetic DNA sequence of Bacillus caldolyticus EA1 DNA polymerase T801F
atgaaatacctgctgccgaccgctgctgctggtctgctgctcctcgctgcccagccggcgatggccatgggattgaaaaaaaagcttgttttaatcgacggcagcagcgtggcgtaccgcgcctttttcgccttgccgcttttgcataacgacaaaggcatccatacgaacgccgtctacgggtttacgatgatgttgaataaaattttggcggaagaagagccaactcatatgcttgtcgcgtttgacgccgggaaaacgacgttccggcatgaagcgtttcaagagtataaaggtgggcgccagcagacgccaccggagctgtcggagcagtttccgctgttgcgcgagctgctgagggcgtatcgcatccccgcctatgaactcgagaactacgaagcggacgatattatcggaacgcttgccgcccgcgctgagcaggaagggtttgaggtgaaagtcatttccggcgaccgcgatctgacccagctcgcctccccccatgtgacggtggacattacgaaaaaagggattaccgatatcgaaccgtacacgccggaggcggtccgcgaaaaatacggcttaactccggaacaaatcgttgatttgaaaggattgatgggcgacaaatcggacaacattcccggagtgccgggcatcggggaaaagacggcggtcaagctgctcaagcaattcggcacggtcgaaaacgtgcttgcctccattgacgagatcaaaggcgaaaagttgaaagaaacgctgcgccaacaccgggagatggcgctgttaagcaaaaagctcgccgccattcgccgcgacgccccggtcgagctctcgcttgatgacatcgtctatcaaggggaagaccgggagaaagtggtcgctttatttaaagagcttgggtttcaatcgtttttagagaaaatggaatcgccgtcatcagaagaggaaaaaccgcttgccaagatggcatttacgcttgctgaccgcgtgacggaggagatgcttgccgacaaggcggcgcttgtcgttgaagtggtcgaggaaaattatcatgatgcgccgatcgtcggcatcgctgtggtcaacgaacatggacggtttttcctgcgcccggagacggcgcttgccgatccgcagtttgtcgcctggcttggtgatgaaacgaagaaaaaaagcatgtttgactcaaagcgcgcggcagtcgccttgaaatggaaaggaattgagctatgcggcgtttcctttgatttattgctggccgcctatttgcttgatccggcgcaaggtgttgatgatgtggctgccgcagcaaaaatgaagcaatacgaagcggtgcgctcggatgaagcggtgtatggcaaaggggcgaagcgggccgtgccggatgagccagtgctcgccgagcatctcgtccgcaaggcggcggcgatttgggcgctcgaacgtccgtttttggatgagctgcgccgcaacgaacaagatcggttgctcgtcgagctcgagcagccgttgtcttcgattttggcggaaatggaatttgccggagtgaaagtggatacgaagcggctcgaacagatgggcgaagagctcgccgagcagctgcgcacggtcgagcagcgcatttatgagctcgccggccaagaattcaacatcaattcaccgaaacagctcggcgtcattttatttgaaaaactgcagctgcccgtcttgaaaaaaacgaaaaccggctactccacttcggcggatgtgcttgaaaaacttgcgccttatcacgagatcgtggaaaacattttgcattaccgccagcttggcaagttgcagtcgacgtatattgaaggattgctgaaagtcgtgcgacccgatacaaagaaggtgcatacgattttcaatcaggcgttgacgcaaaccggacggctcagctcgacggagccgaacttgcaaaacattccgattcggcttgaggaaggacggaaaatccgccaagcgttcgtgccgtcggagtctgattggctcattttcgctgccgactactcgcaaattgagttgcgcgtcctcgcccatattgcggaagatgacaatttaatggaagcgttccgccgcgatttggatatccatacgaaaacagcgatggacattttccaagtgagcgaggacgaagtgacgcccaacatgcgccgtcaggcgaaggcggtcaactttgggatcgtttacgggatcagtgattacggcttggcgcaaaacttaaatatttcacgcaaagaggccgctgaattcatcgagcgctacttcgaaagcttccctggcgtgaagcggtatatggaaaacattgtgcaagaagcaaaacagaaagggtatgtgacgacgctgctgcatcggcgccgctatttgccggatatctttagccgcaacttcaacgtccgcagctttgctgaacggatggcgatgaacacgccgattcaagggagcgccgctgacattattaaaaaggcgatgatcgatctgaacgctagactgaaggaagagcggctgcaagcgcgccttttgctacaggtgcatgacgagctcattttggaggcgccgaaagaagagatggagcggctgtgccggctcgttccggaagtgatggagcaagcggtcacacttcgcgtgccgctcaaagtcgattaccattatggctcgacgtggtatgacgcgaaataaaaaggatcc

SEQ ID NO: 2397 - DNA, 2712 bp, Artificial Sequence
  Description of Artificial Sequence: Synthetic DNA sequence of Bacillus caldolyticus EA1 DNA polymerase T801S
atgaaatacctgctgccgaccgctgctgctggtctgctgctcctcgctgcccagccggcgatggccatgggattgaaaaaaaagcttgttttaatcgacggcagcagcgtggcgtaccgcgcctttttcgccttgccgcttttgcataacgacaaaggcatccatacgaacgccgtctacgggtttacgatgatgttgaataaaattttggcggaagaagagccaactcatatgcttgtcgcgtttgacgccgggaaaacgacgttccggcatgaagcgtttcaagagtataaaggtgggcgccagcagacgccaccggagctgtcggagcagtttccgctgttgcgcgagctgctgagggcgtatcgcatccccgcctatgaactcgagaactacgaagcggacgatattatcggaacgcttgccgcccgcgctgagcaggaagggtttgaggtgaaagtcatttccggcgaccgcgatctgacccagctcgcctccccccatgtgacggtggacattacgaaaaaagggattaccgatatcgaaccgtacacgccggaggcggtccgcgaaaaatacggcttaactccggaacaaatcgttgatttgaaaggattgatgggcgacaaatcggacaacattcccggagtgccgggcatcggggaaaagacggcggtcaagctgctcaagcaattcggcacggtcgaaaacgtgcttgcctccattgacgagatcaaaggcgaaaagttgaaagaaacgctgcgccaacaccgggagatggcgctgttaagcaaaaagctcgccgccattcgccgcgacgccccggtcgagctctcgcttgatgacatcgtctatcaaggggaagaccgggagaaagtggtcgctttatttaaagagcttgggtttcaatcgtttttagagaaaatggaatcgccgtcatcagaagaggaaaaaccgcttgccaagatggcatttacgcttgctgaccgcgtgacggaggagatgcttgccgacaaggcggcgcttgtcgttgaagtggtcgaggaaaattatcatgatgcgccgatcgtcggcatcgctgtggtcaacgaacatggacggtttttcctgcgcccggagacggcgcttgccgatccgcagtttgtcgcctggcttggtgatgaaacgaagaaaaaaagcatgtttgactcaaagcgcgcggcagtcgccttgaaatggaaaggaattgagctatgcggcgtttcctttgatttattgctggccgcctatttgcttgatccggcgcaaggtgttgatgatgtggctgccgcagcaaaaatgaagcaatacgaagcggtgcgctcggatgaagcggtgtatggcaaaggggcgaagcgggccgtgccggatgagccagtgctcgccgagcatctcgtccgcaaggcggcggcgatttgggcgctcgaacgtccgtttttggatgagctgcgccgcaacgaacaagatcggttgctcgtcgagctcgagcagccgttgtcttcgattttggcggaaatggaatttgccggagtgaaagtggatacgaagcggctcgaacagatgggcgaagagctcgccgagcagctgcgcacggtcgagcagcgcatttatgagctcgccggccaagaattcaacatcaattcaccgaaacagctcggcgtcattttatttgaaaaactgcagctgcccgtcttgaaaaaaacgaaaaccggctactccacttcggcggatgtgcttgaaaaacttgcgccttatcacgagatcgtggaaaacattttgcattaccgccagcttggcaagttgcagtcgacgtatattgaaggattgctgaaagtcgtgcgacccgatacaaagaaggtgcatacgattttcaatcaggcgttgacgcaaaccggacggctcagctcgacggagccgaacttgcaaaacattccgattcggcttgaggaaggacggaaaatccgccaagcgttcgtgccgtcggagtctgattggctcattttcgctgccgactactcgcaaattgagttgcgcgtcctcgcccatattgcggaagatgacaatttaatggaagcgttccgccgcgatttggatatccatacgaaaacagcgatggacattttccaagtgagcgaggacgaagtgacgcccaacatgcgccgtcaggcgaaggcggtcaactttgggatcgtttacgggatcagtgattacggcttggcgcaaaacttaaatatttcacgcaaagaggccgctgaattcatcgagcgctacttcgaaagcttccctggcgtgaagcggtatatggaaaacattgtgcaagaagcaaaacagaaagggtatgtgacgacgctgctgcatcggcgccgctatttgccggatatctctagccgcaacttcaacgtccgcagctttgctgaacggatggcgatgaacacgccgattcaagggagcgccgctgacattattaaaaaggcgatgatcgatctgaacgctagactgaaggaagagcggctgcaagcgcgccttttgctacaggtgcatgacgagctcattttggaggcgccgaaagaagagatggagcggctgtgccggctcgttccggaagtgatggagcaagcggtcacacttcgcgtgccgctcaaagtcgattaccattatggctcgacgtggtatgacgcgaaataaaaaggatcc

SEQ ID NO: 2398 - DNA, 2712 bp, Artificial Sequence
  Description of Artificial Sequence: Synthetic DNA sequence of Bacillus caldolyticus EA1 DNA polymerase T801Y
atgaaatacctgctgccgaccgctgctgctggtctgctgctcctcgctgcccagccggcgatggccatgggattgaaaaaaaagcttgttttaatcgacggcagcagcgtggcgtaccgcgcctttttcgccttgccgcttttgcataacgacaaaggcatccatacgaacgccgtctacgggtttacgatgatgttgaataaaattttggcggaagaagagccaactcatatgcttgtcgcgtttgacgccgggaaaacgacgttccggcatgaagcgtttcaagagtataaaggtgggcgccagcagacgccaccggagctgtcggagcagtttccgctgttgcgcgagctgctgagggcgtatcgcatccccgcctatgaactcgagaactacgaagcggacgatattatcggaacgcttgccgcccgcgctgagcaggaagggtttgaggtgaaagtcatttccggcgaccgcgatctgacccagctcgcctccccccatgtgacggtggacattacgaaaaaagggattaccgatatcgaaccgtacacgccggaggcggtccgcgaaaaatacggcttaactccggaacaaatcgttgatttgaaaggattgatgggcgacaaatcggacaacattcccggagtgccgggcatcggggaaaagacggcggtcaagctgctcaagcaattcggcacggtcgaaaacgtgcttgcctccattgacgagatcaaaggcgaaaagttgaaagaaacgctgcgccaacaccgggagatggcgctgttaagcaaaaagctcgccgccattcgccgcgacgccccggtcgagctctcgcttgatgacatcgtctatcaaggggaagaccgggagaaagtggtcgctttatttaaagagcttgggtttcaatcgtttttagagaaaatggaatcgccgtcatcagaagaggaaaaaccgcttgccaagatggcatttacgcttgctgaccgcgtgacggaggagatgcttgccgacaaggcggcgcttgtcgttgaagtggtcgaggaaaattatcatgatgcgccgatcgtcggcatcgctgtggtcaacgaacatggacggtttttcctgcgcccggagacggcgcttgccgatccgcagtttgtcgcctggcttggtgatgaaacgaagaaaaaaagcatgtttgactcaaagcgcgcggcagtcgccttgaaatggaaaggaattgagctatgcggcgtttcctttgatttattgctggccgcctatttgcttgatccggcgcaaggtgttgatgatgtggctgccgcagcaaaaatgaagcaatacgaagcggtgcgctcggatgaagcggtgtatggcaaaggggcgaagcgggccgtgccggatgagccagtgctcgccgagcatctcgtccgcaaggcggcggcgatttgggcgctcgaacgtccgtttttggatgagctgcgccgcaacgaacaagatcggttgctcgtcgagctcgagcagccgttgtcttcgattttggcggaaatggaatttgccggagtgaaagtggatacgaagcggctcgaacagatgggcgaagagctcgccgagcagctgcgcacggtcgagcagcgcatttatgagctcgccggccaagaattcaacatcaattcaccgaaacagctcggcgtcattttatttgaaaaactgcagctgcccgtcttgaaaaaaacgaaaaccggctactccacttcggcggatgtgcttgaaaaacttgcgccttatcacgagatcgtggaaaacattttgcattaccgccagcttggcaagttgcagtcgacgtatattgaaggattgctgaaagtcgtgcgacccgatacaaagaaggtgcatacgattttcaatcaggcgttgacgcaaaccggacggctcagctcgacggagccgaacttgcaaaacattccgattcggcttgaggaaggacggaaaatccgccaagcgttcgtgccgtcggagtctgattggctcattttcgctgccgactactcgcaaattgagttgcgcgtcctcgcccatattgcggaagatgacaatttaatggaagcgttccgccgcgatttggatatccatacgaaaacagcgatggacattttccaagtgagcgaggacgaagtgacgcccaacatgcgccgtcaggcgaaggcggtcaactttgggatcgtttacgggatcagtgattacggcttggcgcaaaacttaaatatttcacgcaaagaggccgctgaattcatcgagcgctacttcgaaagcttccctggcgtgaagcggtatatggaaaacattgtgcaagaagcaaaacagaaagggtatgtgacgacgctgctgcatcggcgccgctatttgccggatatctatagccgcaacttcaacgtccgcagctttgctgaacggatggcgatgaacacgccgattcaagggagcgccgctgacattattaaaaaggcgatgatcgatctgaacgctagactgaaggaagagcggctgcaagcgcgccttttgctacaggtgcatgacgagctcattttggaggcgccgaaagaagagatggagcggctgtgccggctcgttccggaagtgatggagcaagcggtcacacttcgcgtgccgctcaaagtcgattaccattatggctcgacgtggtatgacgcgaaataaaaaggatcc

SEQ ID NO: 2399 - DNA, 2712 bp, Artificial Sequence
  Description of Artificial Sequence: Synthetic DNA sequence of Bacillus caldolyticus EA1 DNA polymerase T801W
atgaaatacctgctgccgaccgctgctgctggtctgctgctcctcgctgcccagccggcgatggccatgggattgaaaaaaaagcttgttttaatcgacggcagcagcgtggcgtaccgcgcctttttcgccttgccgcttttgcataacgacaaaggcatccatacgaacgccgtctacgggtttacgatgatgttgaataaaattttggcggaagaagagccaactcatatgcttgtcgcgtttgacgccgggaaaacgacgttccggcatgaagcgtttcaagagtataaaggtgggcgccagcagacgccaccggagctgtcggagcagtttccgctgttgcgcgagctgctgagggcgtatcgcatccccgcctatgaactcgagaactacgaagcggacgatattatcggaacgcttgccgcccgcgctgagcaggaagggtttgaggtgaaagtcatttccggcgaccgcgatctgacccagctcgcctccccccatgtgacggtggacattacgaaaaaagggattaccgatatcgaaccgtacacgccggaggcggtccgcgaaaaatacggcttaactccggaacaaatcgttgatttgaaaggattgatgggcgacaaatcggacaacattcccggagtgccgggcatcggggaaaagacggcggtcaagctgctcaagcaattcggcacggtcgaaaacgtgcttgcctccattgacgagatcaaaggcgaaaagttgaaagaaacgctgcgccaacaccgggagatggcgctgttaagcaaaaagctcgccgccattcgccgcgacgccccggtcgagctctcgcttgatgacatcgtctatcaaggggaagaccgggagaaagtggtcgctttatttaaagagcttgggtttcaatcgtttttagagaaaatggaatcgccgtcatcagaagaggaaaaaccgcttgccaagatggcatttacgcttgctgaccgcgtgacggaggagatgcttgccgacaaggcggcgcttgtcgttgaagtggtcgaggaaaattatcatgatgcgccgatcgtcggcatcgctgtggtcaacgaacatggacggtttttcctgcgcccggagacggcgcttgccgatccgcagtttgtcgcctggcttggtgatgaaacgaagaaaaaaagcatgtttgactcaaagcgcgcggcagtcgccttgaaatggaaaggaattgagctatgcggcgtttcctttgatttattgctggccgcctatttgcttgatccggcgcaaggtgttgatgatgtggctgccgcagcaaaaatgaagcaatacgaagcggtgcgctcggatgaagcggtgtatggcaaaggggcgaagcgggccgtgccggatgagccagtgctcgccgagcatctcgtccgcaaggcggcggcgatttgggcgctcgaacgtccgtttttggatgagctgcgccgcaacgaacaagatcggttgctcgtcgagctcgagcagccgttgtcttcgattttggcggaaatggaatttgccggagtgaaagtggatacgaagcggctcgaacagatgggcgaagagctcgccgagcagctgcgcacggtcgagcagcgcatttatgagctcgccggccaagaattcaacatcaattcaccgaaacagctcggcgtcattttatttgaaaaactgcagctgcccgtcttgaaaaaaacgaaaaccggctactccacttcggcggatgtgcttgaaaaacttgcgccttatcacgagatcgtggaaaacattttgcattaccgccagcttggcaagttgcagtcgacgtatattgaaggattgctgaaagtcgtgcgacccgatacaaagaaggtgcatacgattttcaatcaggcgttgacgcaaaccggacggctcagctcgacggagccgaacttgcaaaacattccgattcggcttgaggaaggacggaaaatccgccaagcgttcgtgccgtcggagtctgattggctcattttcgctgccgactactcgcaaattgagttgcgcgtcctcgcccatattgcggaagatgacaatttaatggaagcgttccgccgcgatttggatatccatacgaaaacagcgatggacattttccaagtgagcgaggacgaagtgacgcccaacatgcgccgtcaggcgaaggcggtcaactttgggatcgtttacgggatcagtgattacggcttggcgcaaaacttaaatatttcacgcaaagaggccgctgaattcatcgagcgctacttcgaaagcttccctggcgtgaagcggtatatggaaaacattgtgcaagaagcaaaacagaaagggtatgtgacgacgctgctgcatcggcgccgctatttgccggatatctggagccgcaacttcaacgtccgcagctttgctgaacggatggcgatgaacacgccgattcaagggagcgccgctgacattattaaaaaggcgatgatcgatctgaacgctagactgaaggaagagcggctgcaagcgcgccttttgctacaggtgcatgacgagctcattttggaggcgccgaaagaagagatggagcggctgtgccggctcgttccggaagtgatggagcaagcggtcacacttcgcgtgccgctcaaagtcgattaccattatggctcgacgtggtatgacgcgaaataaaaaggatcc

SEQ ID NO: 2400 - DNA, 2712 bp, Artificial Sequence
  Description of Artificial Sequence: Synthetic DNA sequence of Bacillus caldolyticus EA1 DNA polymerase T801P
atgaaatacctgctgccgaccgctgctgctggtctgctgctcctcgctgcccagccggcgatggccatgggattgaaaaaaaagcttgttttaatcgacggcagcagcgtggcgtaccgcgcctttttcgccttgccgcttttgcataacgacaaaggcatccatacgaacgccgtctacgggtttacgatgatgttgaataaaattttggcggaagaagagccaactcatatgcttgtcgcgtttgacgccgggaaaacgacgttccggcatgaagcgtttcaagagtataaaggtgggcgccagcagacgccaccggagctgtcggagcagtttccgctgttgcgcgagctgctgagggcgtatcgcatccccgcctatgaactcgagaactacgaagcggacgatattatcggaacgcttgccgcccgcgctgagcaggaagggtttgaggtgaaagtcatttccggcgaccgcgatctgacccagctcgcctccccccatgtgacggtggacattacgaaaaaagggattaccgatatcgaaccgtacacgccggaggcggtccgcgaaaaatacggcttaactccggaacaaatcgttgatttgaaaggattgatgggcgacaaatcggacaacattcccggagtgccgggcatcggggaaaagacggcggtcaagctgctcaagcaattcggcacggtcgaaaacgtgcttgcctccattgacgagatcaaaggcgaaaagttgaaagaaacgctgcgccaacaccgggagatggcgctgttaagcaaaaagctcgccgccattcgccgcgacgccccggtcgagctctcgcttgatgacatcgtctatcaaggggaagaccgggagaaagtggtcgctttatttaaagagcttgggtttcaatcgtttttagagaaaatggaatcgccgtcatcagaagaggaaaaaccgcttgccaagatggcatttacgcttgctgaccgcgtgacggaggagatgcttgccgacaaggcggcgcttgtcgttgaagtggtcgaggaaaattatcatgatgcgccgatcgtcggcatcgctgtggtcaacgaacatggacggtttttcctgcgcccggagacggcgcttgccgatccgcagtttgtcgcctggcttggtgatgaaacgaagaaaaaaagcatgtttgactcaaagcgcgcggcagtcgccttgaaatggaaaggaattgagctatgcggcgtttcctttgatttattgctggccgcctatttgcttgatccggcgcaaggtgttgatgatgtggctgccgcagcaaaaatgaagcaatacgaagcggtgcgctcggatgaagcggtgtatggcaaaggggcgaagcgggccgtgccggatgagccagtgctcgccgagcatctcgtccgcaaggcggcggcgatttgggcgctcgaacgtccgtttttggatgagctgcgccgcaacgaacaagatcggttgctcgtcgagctcgagcagccgttgtcttcgattttggcggaaatggaatttgccggagtgaaagtggatacgaagcggctcgaacagatgggcgaagagctcgccgagcagctgcgcacggtcgagcagcgcatttatgagctcgccggccaagaattcaacatcaattcaccgaaacagctcggcgtcattttatttgaaaaactgcagctgcccgtcttgaaaaaaacgaaaaccggctactccacttcggcggatgtgcttgaaaaacttgcgccttatcacgagatcgtggaaaacattttgcattaccgccagcttggcaagttgcagtcgacgtatattgaaggattgctgaaagtcgtgcgacccgatacaaagaaggtgcatacgattttcaatcaggcgttgacgcaaaccggacggctcagctcgacggagccgaacttgcaaaacattccgattcggcttgaggaaggacggaaaatccgccaagcgttcgtgccgtcggagtctgattggctcattttcgctgccgactactcgcaaattgagttgcgcgtcctcgcccatattgcggaagatgacaatttaatggaagcgttccgccgcgatttggatatccatacgaaaacagcgatggacattttccaagtgagcgaggacgaagtgacgcccaacatgcgccgtcaggcgaaggcggtcaactttgggatcgtttacgggatcagtgattacggcttggcgcaaaacttaaatatttcacgcaaagaggccgctgaattcatcgagcgctacttcgaaagcttccctggcgtgaagcggtatatggaaaacattgtgcaagaagcaaaacagaaagggtatgtgacgacgctgctgcatcggcgccgctatttgccggatatccctagccgcaacttcaacgtccgcagctttgctgaacggatggcgatgaacacgccgattcaagggagcgccgctgacattattaaaaaggcgatgatcgatctgaacgctagactgaaggaagagcggctgcaagcgcgccttttgctacaggtgcatgacgagctcattttggaggcgccgaaagaagagatggagcggctgtgccggctcgttccggaagtgatggagcaagcggtcacacttcgcgtgccgctcaaagtcgattaccattatggctcgacgtggtatgacgcgaaataaaaaggatcc

SEQ ID NO: 2401 - DNA, 2712 bp, Artificial Sequence
  Description of Artificial Sequence: Synthetic DNA sequence of Bacillus caldolyticus EA1 DNA polymerase T801M
atgaaatacctgctgccgaccgctgctgctggtctgctgctcctcgctgcccagccggcgatggccatgggattgaaaaaaaagcttgttttaatcgacggcagcagcgtggcgtaccgcgcctttttcgccttgccgcttttgcataacgacaaaggcatccatacgaacgccgtctacgggtttacgatgatgttgaataaaattttggcggaagaagagccaactcatatgcttgtcgcgtttgacgccgggaaaacgacgttccggcatgaagcgtttcaagagtataaaggtgggcgccagcagacgccaccggagctgtcggagcagtttccgctgttgcgcgagctgctgagggcgtatcgcatccccgcctatgaactcgagaactacgaagcggacgatattatcggaacgcttgccgcccgcgctgagcaggaagggtttgaggtgaaagtcatttccggcgaccgcgatctgacccagctcgcctccccccatgtgacggtggacattacgaaaaaagggattaccgatatcgaaccgtacacgccggaggcggtccgcgaaaaatacggcttaactccggaacaaatcgttgatttgaaaggattgatgggcgacaaatcggacaacattcccggagtgccgggcatcggggaaaagacggcggtcaagctgctcaagcaattcggcacggtcgaaaacgtgcttgcctccattgacgagatcaaaggcgaaaagttgaaagaaacgctgcgccaacaccgggagatggcgctgttaagcaaaaagctcgccgccattcgccgcgacgccccggtcgagctctcgcttgatgacatcgtctatcaaggggaagaccgggagaaagtggtcgctttatttaaagagcttgggtttcaatcgtttttagagaaaatggaatcgccgtcatcagaagaggaaaaaccgcttgccaagatggcatttacgcttgctgaccgcgtgacggaggagatgcttgccgacaaggcggcgcttgtcgttgaagtggtcgaggaaaattatcatgatgcgccgatcgtcggcatcgctgtggtcaacgaacatggacggtttttcctgcgcccggagacggcgcttgccgatccgcagtttgtcgcctggcttggtgatgaaacgaagaaaaaaagcatgtttgactcaaagcgcgcggcagtcgccttgaaatggaaaggaattgagctatgcggcgtttcctttgatttattgctggccgcctatttgcttgatccggcgcaaggtgttgatgatgtggctgccgcagcaaaaatgaagcaatacgaagcggtgcgctcggatgaagcggtgtatggcaaaggggcgaagcgggccgtgccggatgagccagtgctcgccgagcatctcgtccgcaaggcggcggcgatttgggcgctcgaacgtccgtttttggatgagctgcgccgcaacgaacaagatcggttgctcgtcgagctcgagcagccgttgtcttcgattttggcggaaatggaatttgccggagtgaaagtggatacgaagcggctcgaacagatgggcgaagagctcgccgagcagctgcgcacggtcgagcagcgcatttatgagctcgccggccaagaattcaacatcaattcaccgaaacagctcggcgtcattttatttgaaaaactgcagctgcccgtcttgaaaaaaacgaaaaccggctactccacttcggcggatgtgcttgaaaaacttgcgccttatcacgagatcgtggaaaacattttgcattaccgccagcttggcaagttgcagtcgacgtatattgaaggattgctgaaagtcgtgcgacccgatacaaagaaggtgcatacgattttcaatcaggcgttgacgcaaaccggacggctcagctcgacggagccgaacttgcaaaacattccgattcggcttgaggaaggacggaaaatccgccaagcgttcgtgccgtcggagtctgattggctcattttcgctgccgactactcgcaaattgagttgcgcgtcctcgcccatattgcggaagatgacaatttaatggaagcgttccgccgcgatttggatatccatacgaaaacagcgatggacattttccaagtgagcgaggacgaagtgacgcccaacatgcgccgtcaggcgaaggcggtcaactttgggatcgtttacgggatcagtgattacggcttggcgcaaaacttaaatatttcacgcaaagaggccgctgaattcatcgagcgctacttcgaaagcttccctggcgtgaagcggtatatggaaaacattgtgcaagaagcaaaacagaaagggtatgtgacgacgctgctgcatcggcgccgctatttgccggatatcatgagccgcaacttcaacgtccgcagctttgctgaacggatggcgatgaacacgccgattcaagggagcgccgctgacattattaaaaaggcgatgatcgatctgaacgctagactgaaggaagagcggctgcaagcgcgccttttgctacaggtgcatgacgagctcattttggaggcgccgaaagaagagatggagcggctgtgccggctcgttccggaagtgatggagcaagcggtcacacttcgcgtgccgctcaaagtcgattaccattatggctcgacgtggtatgacgcgaaataaaaaggatcc

SEQ ID NO: 2402 - DNA, 2712 bp, Artificial Sequence
  Description of Artificial Sequence: Synthetic DNA sequence of Bacillus caldolyticus EA1 DNA polymerase T801N
atgaaatacctgctgccgaccgctgctgctggtctgctgctcctcgctgcccagccggcgatggccatgggattgaaaaaaaagcttgttttaatcgacggcagcagcgtggcgtaccgcgcctttttcgccttgccgcttttgcataacgacaaaggcatccatacgaacgccgtctacgggtttacgatgatgttgaataaaattttggcggaagaagagccaactcatatgcttgtcgcgtttgacgccgggaaaacgacgttccggcatgaagcgtttcaagagtataaaggtgggcgccagcagacgccaccggagctgtcggagcagtttccgctgttgcgcgagctgctgagggcgtatcgcatccccgcctatgaactcgagaactacgaagcggacgatattatcggaacgcttgccgcccgcgctgagcaggaagggtttgaggtgaaagtcatttccggcgaccgcgatctgacccagctcgcctccccccatgtgacggtggacattacgaaaaaagggattaccgatatcgaaccgtacacgccggaggcggtccgcgaaaaatacggcttaactccggaacaaatcgttgatttgaaaggattgatgggcgacaaatcggacaacattcccggagtgccgggcatcggggaaaagacggcggtcaagctgctcaagcaattcggcacggtcgaaaacgtgcttgcctccattgacgagatcaaaggcgaaaagttgaaagaaacgctgcgccaacaccgggagatggcgctgttaagcaaaaagctcgccgccattcgccgcgacgccccggtcgagctctcgcttgatgacatcgtctatcaaggggaagaccgggagaaagtggtcgctttatttaaagagcttgggtttcaatcgtttttagagaaaatggaatcgccgtcatcagaagaggaaaaaccgcttgccaagatggcatttacgcttgctgaccgcgtgacggaggagatgcttgccgacaaggcggcgcttgtcgttgaagtggtcgaggaaaattatcatgatgcgccgatcgtcggcatcgctgtggtcaacgaacatggacggtttttcctgcgcccggagacggcgcttgccgatccgcagtttgtcgcctggcttggtgatgaaacgaagaaaaaaagcatgtttgactcaaagcgcgcggcagtcgccttgaaatggaaaggaattgagctatgcggcgtttcctttgatttattgctggccgcctatttgcttgatccggcgcaaggtgttgatgatgtggctgccgcagcaaaaatgaagcaatacgaagcggtgcgctcggatgaagcggtgtatggcaaaggggcgaagcgggccgtgccggatgagccagtgctcgccgagcatctcgtccgcaaggcggcggcgatttgggcgctcgaacgtccgtttttggatgagctgcgccgcaacgaacaagatcggttgctcgtcgagctcgagcagccgttgtcttcgattttggcggaaatggaatttgccggagtgaaagtggatacgaagcggctcgaacagatgggcgaagagctcgccgagcagctgcgcacggtcgagcagcgcatttatgagctcgccggccaagaattcaacatcaattcaccgaaacagctcggcgtcattttatttgaaaaactgcagctgcccgtcttgaaaaaaacgaaaaccggctactccacttcggcggatgtgcttgaaaaacttgcgccttatcacgagatcgtggaaaacattttgcattaccgccagcttggcaagttgcagtcgacgtatattgaaggattgctgaaagtcgtgcgacccgatacaaagaaggtgcatacgattttcaatcaggcgttgacgcaaaccggacggctcagctcgacggagccgaacttgcaaaacattccgattcggcttgaggaaggacggaaaatccgccaagcgttcgtgccgtcggagtctgattggctcattttcgctgccgactactcgcaaattgagttgcgcgtcctcgcccatattgcggaagatgacaatttaatggaagcgttccgccgcgatttggatatccatacgaaaacagcgatggacattttccaagtgagcgaggacgaagtgacgcccaacatgcgccgtcaggcgaaggcggtcaactttgggatcgtttacgggatcagtgattacggcttggcgcaaaacttaaatatttcacgcaaagaggccgctgaattcatcgagcgctacttcgaaagcttccctggcgtgaagcggtatatggaaaacattgtgcaagaagcaaaacagaaagggtatgtgacgacgctgctgcatcggcgccgctatttgccggatatcaatagccgcaacttcaacgtccgcagctttgctgaacggatggcgatgaacacgccgattcaagggagcgccgctgacattattaaaaaggcgatgatcgatctgaacgctagactgaaggaagagcggctgcaagcgcgccttttgctacaggtgcatgacgagctcattttggaggcgccgaaagaagagatggagcggctgtgccggctcgttccggaagtgatggagcaagcggtcacacttcgcgtgccgctcaaagtcgattaccattatggctcgacgtggtatgacgcgaaataaaaaggatcc

SEQ ID NO: 2403 - DNA, 2712 bp, Artificial Sequence
  Description of Artificial Sequence: Synthetic DNA sequence of Bacillus caldolyticus EA1 DNA polymerase T801V
atgaaatacctgctgccgaccgctgctgctggtctgctgctcctcgctgcccagccggcgatggccatgggattgaaaaaaaagcttgttttaatcgacggcagcagcgtggcgtaccgcgcctttttcgccttgccgcttttgcataacgacaaaggcatccatacgaacgccgtctacgggtttacgatgatgttgaataaaattttggcggaagaagagccaactcatatgcttgtcgcgtttgacgccgggaaaacgacgttccggcatgaagcgtttcaagagtataaaggtgggcgccagcagacgccaccggagctgtcggagcagtttccgctgttgcgcgagctgctgagggcgtatcgcatccccgcctatgaactcgagaactacgaagcggacgatattatcggaacgcttgccgcccgcgctgagcaggaagggtttgaggtgaaagtcatttccggcgaccgcgatctgacccagctcgcctccccccatgtgacggtggacattacgaaaaaagggattaccgatatcgaaccgtacacgccggaggcggtccgcgaaaaatacggcttaactccggaacaaatcgttgatttgaaaggattgatgggcgacaaatcggacaacattcccggagtgccgggcatcggggaaaagacggcggtcaagctgctcaagcaattcggcacggtcgaaaacgtgcttgcctccattgacgagatcaaaggcgaaaagttgaaagaaacgctgcgccaacaccgggagatggcgctgttaagcaaaaagctcgccgccattcgccgcgacgccccggtcgagctctcgcttgatgacatcgtctatcaaggggaagaccgggagaaagtggtcgctttatttaaagagcttgggtttcaatcgtttttagagaaaatggaatcgccgtcatcagaagaggaaaaaccgcttgccaagatggcatttacgcttgctgaccgcgtgacggaggagatgcttgccgacaaggcggcgcttgtcgttgaagtggtcgaggaaaattatcatgatgcgccgatcgtcggcatcgctgtggtcaacgaacatggacggtttttcctgcgcccggagacggcgcttgccgatccgcagtttgtcgcctggcttggtgatgaaacgaagaaaaaaagcatgtttgactcaaagcgcgcggcagtcgccttgaaatggaaaggaattgagctatgcggcgtttcctttgatttattgctggccgcctatttgcttgatccggcgcaaggtgttgatgatgtggctgccgcagcaaaaatgaagcaatacgaagcggtgcgctcggatgaagcggtgtatggcaaaggggcgaagcgggccgtgccggatgagccagtgctcgccgagcatctcgtccgcaaggcggcggcgatttgggcgctcgaacgtccgtttttggatgagctgcgccgcaacgaacaagatcggttgctcgtcgagctcgagcagccgttgtcttcgattttggcggaaatggaatttgccggagtgaaagtggatacgaagcggctcgaacagatgggcgaagagctcgccgagcagctgcgcacggtcgagcagcgcatttatgagctcgccggccaagaattcaacatcaattcaccgaaacagctcggcgtcattttatttgaaaaactgcagctgcccgtcttgaaaaaaacgaaaaccggctactccacttcggcggatgtgcttgaaaaacttgcgccttatcacgagatcgtggaaaacattttgcattaccgccagcttggcaagttgcagtcgacgtatattgaaggattgctgaaagtcgtgcgacccgatacaaagaaggtgcatacgattttcaatcaggcgttgacgcaaaccggacggctcagctcgacggagccgaacttgcaaaacattccgattcggcttgaggaaggacggaaaatccgccaagcgttcgtgccgtcggagtctgattggctcattttcgctgccgactactcgcaaattgagttgcgcgtcctcgcccatattgcggaagatgacaatttaatggaagcgttccgccgcgatttggatatccatacgaaaacagcgatggacattttccaagtgagcgaggacgaagtgacgcccaacatgcgccgtcaggcgaaggcggtcaactttgggatcgtttacgggatcagtgattacggcttggcgcaaaacttaaatatttcacgcaaagaggccgctgaattcatcgagcgctacttcgaaagcttccctggcgtgaagcggtatatggaaaacattgtgcaagaagcaaaacagaaagggtatgtgacgacgctgctgcatcggcgccgctatttgccggatatcgtcagccgcaacttcaacgtccgcagctttgctgaacggatggcgatgaacacgccgattcaagggagcgccgctgacattattaaaaaggcgatgatcgatctgaacgctagactgaaggaagagcggctgcaagcgcgccttttgctacaggtgcatgacgagctcattttggaggcgccgaaagaagagatggagcggctgtgccggctcgttccggaagtgatggagcaagcggtcacacttcgcgtgccgctcaaagtcgattaccattatggctcgacgtggtatgacgcgaaataaaaaggatcc

SEQ ID NO: 2404 - DNA, 2712 bp, Artificial Sequence
  Description of Artificial Sequence: Synthetic DNA sequence of Bacillus caldolyticus EA1 DNA polymerase S802A
atgaaatacctgctgccgaccgctgctgctggtctgctgctcctcgctgcccagccggcgatggccatgggattgaaaaaaaagcttgttttaatcgacggcagcagcgtggcgtaccgcgcctttttcgccttgccgcttttgcataacgacaaaggcatccatacgaacgccgtctacgggtttacgatgatgttgaataaaattttggcggaagaagagccaactcatatgcttgtcgcgtttgacgccgggaaaacgacgttccggcatgaagcgtttcaagagtataaaggtgggcgccagcagacgccaccggagctgtcggagcagtttccgctgttgcgcgagctgctgagggcgtatcgcatccccgcctatgaactcgagaactacgaagcggacgatattatcggaacgcttgccgcccgcgctgagcaggaagggtttgaggtgaaagtcatttccggcgaccgcgatctgacccagctcgcctccccccatgtgacggtggacattacgaaaaaagggattaccgatatcgaaccgtacacgccggaggcggtccgcgaaaaatacggcttaactccggaacaaatcgttgatttgaaaggattgatgggcgacaaatcggacaacattcccggagtgccgggcatcggggaaaagacggcggtcaagctgctcaagcaattcggcacggtcgaaaacgtgcttgcctccattgacgagatcaaaggcgaaaagttgaaagaaacgctgcgccaacaccgggagatggcgctgttaagcaaaaagctcgccgccattcgccgcgacgccccggtcgagctctcgcttgatgacatcgtctatcaaggggaagaccgggagaaagtggtcgctttatttaaagagcttgggtttcaatcgtttttagagaaaatggaatcgccgtcatcagaagaggaaaaaccgcttgccaagatggcatttacgcttgctgaccgcgtgacggaggagatgcttgccgacaaggcggcgcttgtcgttgaagtggtcgaggaaaattatcatgatgcgccgatcgtcggcatcgctgtggtcaacgaacatggacggtttttcctgcgcccggagacggcgcttgccgatccgcagtttgtcgcctggcttggtgatgaaacgaagaaaaaaagcatgtttgactcaaagcgcgcggcagtcgccttgaaatggaaaggaattgagctatgcggcgtttcctttgatttattgctggccgcctatttgcttgatccggcgcaaggtgttgatgatgtggctgccgcagcaaaaatgaagcaatacgaagcggtgcgctcggatgaagcggtgtatggcaaaggggcgaagcgggccgtgccggatgagccagtgctcgccgagcatctcgtccgcaaggcggcggcgatttgggcgctcgaacgtccgtttttggatgagctgcgccgcaacgaacaagatcggttgctcgtcgagctcgagcagccgttgtcttcgattttggcggaaatggaatttgccggagtgaaagtggatacgaagcggctcgaacagatgggcgaagagctcgccgagcagctgcgcacggtcgagcagcgcatttatgagctcgccggccaagaattcaacatcaattcaccgaaacagctcggcgtcattttatttgaaaaactgcagctgcccgtcttgaaaaaaacgaaaaccggctactccacttcggcggatgtgcttgaaaaacttgcgccttatcacgagatcgtggaaaacattttgcattaccgccagcttggcaagttgcagtcgacgtatattgaaggattgctgaaagtcgtgcgacccgatacaaagaaggtgcatacgattttcaatcaggcgttgacgcaaaccggacggctcagctcgacggagccgaacttgcaaaacattccgattcggcttgaggaaggacggaaaatccgccaagcgttcgtgccgtcggagtctgattggctcattttcgctgccgactactcgcaaattgagttgcgcgtcctcgcccatattgcggaagatgacaatttaatggaagcgttccgccgcgatttggatatccatacgaaaacagcgatggacattttccaagtgagcgaggacgaagtgacgcccaacatgcgccgtcaggcgaaggcggtcaactttgggatcgtttacgggatcagtgattacggcttggcgcaaaacttaaatatttcacgcaaagaggccgctgaattcatcgagcgctacttcgaaagcttccctggcgtgaagcggtatatggaaaacattgtgcaagaagcaaaacagaaagggtatgtgacgacgctgctgcatcggcgccgctatttgccggatatcacggctcgcaacttcaacgtccgcagctttgctgaacggatggcgatgaacacgccgattcaagggagcgccgctgacattattaaaaaggcgatgatcgatctgaacgctagactgaaggaagagcggctgcaagcgcgccttttgctacaggtgcatgacgagctcattttggaggcgccgaaagaagagatggagcggctgtgccggctcgttccggaagtgatggagcaagcggtcacacttcgcgtgccgctcaaagtcgattaccattatggctcgacgtggtatgacgcgaaataaaaaggatcc

SEQ ID NO: 2405 - DNA, 2712 bp, Artificial Sequence
  Description of Artificial Sequence: Synthetic DNA sequence of Bacillus caldolyticus EA1 DNA polymerase S802R
atgaaatacctgctgccgaccgctgctgctggtctgctgctcctcgctgcccagccggcgatggccatgggattgaaaaaaaagcttgttttaatcgacggcagcagcgtggcgtaccgcgcctttttcgccttgccgcttttgcataacgacaaaggcatccatacgaacgccgtctacgggtttacgatgatgttgaataaaattttggcggaagaagagccaactcatatgcttgtcgcgtttgacgccgggaaaacgacgttccggcatgaagcgtttcaagagtataaaggtgggcgccagcagacgccaccggagctgtcggagcagtttccgctgttgcgcgagctgctgagggcgtatcgcatccccgcctatgaactcgagaactacgaagcggacgatattatcggaacgcttgccgcccgcgctgagcaggaagggtttgaggtgaaagtcatttccggcgaccgcgatctgacccagctcgcctccccccatgtgacggtggacattacgaaaaaagggattaccgatatcgaaccgtacacgccggaggcggtccgcgaaaaatacggcttaactccggaacaaatcgttgatttgaaaggattgatgggcgacaaatcggacaacattcccggagtgccgggcatcggggaaaagacggcggtcaagctgctcaagcaattcggcacggtcgaaaacgtgcttgcctccattgacgagatcaaaggcgaaaagttgaaagaaacgctgcgccaacaccgggagatggcgctgttaagcaaaaagctcgccgccattcgccgcgacgccccggtcgagctctcgcttgatgacatcgtctatcaaggggaagaccgggagaaagtggtcgctttatttaaagagcttgggtttcaatcgtttttagagaaaatggaatcgccgtcatcagaagaggaaaaaccgcttgccaagatggcatttacgcttgctgaccgcgtgacggaggagatgcttgccgacaaggcggcgcttgtcgttgaagtggtcgaggaaaattatcatgatgcgccgatcgtcggcatcgctgtggtcaacgaacatggacggtttttcctgcgcccggagacggcgcttgccgatccgcagtttgtcgcctggcttggtgatgaaacgaagaaaaaaagcatgtttgactcaaagcgcgcggcagtcgccttgaaatggaaaggaattgagctatgcggcgtttcctttgatttattgctggccgcctatttgcttgatccggcgcaaggtgttgatgatgtggctgccgcagcaaaaatgaagcaatacgaagcggtgcgctcggatgaagcggtgtatggcaaaggggcgaagcgggccgtgccggatgagccagtgctcgccgagcatctcgtccgcaaggcggcggcgatttgggcgctcgaacgtccgtttttggatgagctgcgccgcaacgaacaagatcggttgctcgtcgagctcgagcagccgttgtcttcgattttggcggaaatggaatttgccggagtgaaagtggatacgaagcggctcgaacagatgggcgaagagctcgccgagcagctgcgcacggtcgagcagcgcatttatgagctcgccggccaagaattcaacatcaattcaccgaaacagctcggcgtcattttatttgaaaaactgcagctgcccgtcttgaaaaaaacgaaaaccggctactccacttcggcggatgtgcttgaaaaacttgcgccttatcacgagatcgtggaaaacattttgcattaccgccagcttggcaagttgcagtcgacgtatattgaaggattgctgaaagtcgtgcgacccgatacaaagaaggtgcatacgattttcaatcaggcgttgacgcaaaccggacggctcagctcgacggagccgaacttgcaaaacattccgattcggcttgaggaaggacggaaaatccgccaagcgttcgtgccgtcggagtctgattggctcattttcgctgccgactactcgcaaattgagttgcgcgtcctcgcccatattgcggaagatgacaatttaatggaagcgttccgccgcgatttggatatccatacgaaaacagcgatggacattttccaagtgagcgaggacgaagtgacgcccaacatgcgccgtcaggcgaaggcggtcaactttgggatcgtttacgggatcagtgattacggcttggcgcaaaacttaaatatttcacgcaaagaggccgctgaattcatcgagcgctacttcgaaagcttccctggcgtgaagcggtatatggaaaacattgtgcaagaagcaaaacagaaagggtatgtgacgacgctgctgcatcggcgccgctatttgccggatatcacgcgacgcaacttcaacgtccgcagctttgctgaacggatggcgatgaacacgccgattcaagggagcgccgctgacattattaaaaaggcgatgatcgatctgaacgctagactgaaggaagagcggctgcaagcgcgccttttgctacaggtgcatgacgagctcattttggaggcgccgaaagaagagatggagcggctgtgccggctcgttccggaagtgatggagcaagcggtcacacttcgcgtgccgctcaaagtcgattaccattatggctcgacgtggtatgacgcgaaataaaaaggatcc

SEQ ID NO: 2406 - DNA, 2712 bp, Artificial Sequence
  Description of Artificial Sequence: Synthetic DNA sequence of Bacillus caldolyticus EA1 DNA polymerase S802C
atgaaatacctgctgccgaccgctgctgctggtctgctgctcctcgctgcccagccggcgatggccatgggattgaaaaaaaagcttgttttaatcgacggcagcagcgtggcgtaccgcgcctttttcgccttgccgcttttgcataacgacaaaggcatccatacgaacgccgtctacgggtttacgatgatgttgaataaaattttggcggaagaagagccaactcatatgcttgtcgcgtttgacgccgggaaaacgacgttccggcatgaagcgtttcaagagtataaaggtgggcgccagcagacgccaccggagctgtcggagcagtttccgctgttgcgcgagctgctgagggcgtatcgcatccccgcctatgaactcgagaactacgaagcggacgatattatcggaacgcttgccgcccgcgctgagcaggaagggtttgaggtgaaagtcatttccggcgaccgcgatctgacccagctcgcctccccccatgtgacggtggacattacgaaaaaagggattaccgatatcgaaccgtacacgccggaggcggtccgcgaaaaatacggcttaactccggaacaaatcgttgatttgaaaggattgatgggcgacaaatcggacaacattcccggagtgccgggcatcggggaaaagacggcggtcaagctgctcaagcaattcggcacggtcgaaaacgtgcttgcctccattgacgagatcaaaggcgaaaagttgaaagaaacgctgcgccaacaccgggagatggcgctgttaagcaaaaagctcgccgccattcgccgcgacgccccggtcgagctctcgcttgatgacatcgtctatcaaggggaagaccgggagaaagtggtcgctttatttaaagagcttgggtttcaatcgtttttagagaaaatggaatcgccgtcatcagaagaggaaaaaccgcttgccaagatggcatttacgcttgctgaccgcgtgacggaggagatgcttgccgacaaggcggcgcttgtcgttgaagtggtcgaggaaaattatcatgatgcgccgatcgtcggcatcgctgtggtcaacgaacatggacggtttttcctgcgcccggagacggcgcttgccgatccgcagtttgtcgcctggcttggtgatgaaacgaagaaaaaaagcatgtttgactcaaagcgcgcggcagtcgccttgaaatggaaaggaattgagctatgcggcgtttcctttgatttattgctggccgcctatttgcttgatccggcgcaaggtgttgatgatgtggctgccgcagcaaaaatgaagcaatacgaagcggtgcgctcggatgaagcggtgtatggcaaaggggcgaagcgggccgtgccggatgagccagtgctcgccgagcatctcgtccgcaaggcggcggcgatttgggcgctcgaacgtccgtttttggatgagctgcgccgcaacgaacaagatcggttgctcgtcgagctcgagcagccgttgtcttcgattttggcggaaatggaatttgccggagtgaaagtggatacgaagcggctcgaacagatgggcgaagagctcgccgagcagctgcgcacggtcgagcagcgcatttatgagctcgccggccaagaattcaacatcaattcaccgaaacagctcggcgtcattttatttgaaaaactgcagctgcccgtcttgaaaaaaacgaaaaccggctactccacttcggcggatgtgcttgaaaaacttgcgccttatcacgagatcgtggaaaacattttgcattaccgccagcttggcaagttgcagtcgacgtatattgaaggattgctgaaagtcgtgcgacccgatacaaagaaggtgcatacgattttcaatcaggcgttgacgcaaaccggacggctcagctcgacggagccgaacttgcaaaacattccgattcggcttgaggaaggacggaaaatccgccaagcgttcgtgccgtcggagtctgattggctcattttcgctgccgactactcgcaaattgagttgcgcgtcctcgcccatattgcggaagatgacaatttaatggaagcgttccgccgcgatttggatatccatacgaaaacagcgatggacattttccaagtgagcgaggacgaagtgacgcccaacatgcgccgtcaggcgaaggcggtcaactttgggatcgtttacgggatcagtgattacggcttggcgcaaaacttaaatatttcacgcaaagaggccgctgaattcatcgagcgctacttcgaaagcttccctggcgtgaagcggtatatggaaaacattgtgcaagaagcaaaacagaaagggtatgtgacgacgctgctgcatcggcgccgctatttgccggatatcacgtgtcgcaacttcaacgtccgcagctttgctgaacggatggcgatgaacacgccgattcaagggagcgccgctgacattattaaaaaggcgatgatcgatctgaacgctagactgaaggaagagcggctgcaagcgcgccttttgctacaggtgcatgacgagctcattttggaggcgccgaaagaagagatggagcggctgtgccggctcgttccggaagtgatggagcaagcggtcacacttcgcgtgccgctcaaagtcgattaccattatggctcgacgtggtatgacgcgaaataaaaaggatcc

SEQ ID NO: 2407 - DNA, 2712 bp, Artificial Sequence
  Description of Artificial Sequence: Synthetic DNA sequence of Bacillus caldolyticus EA1 DNA polymerase S802G
atgaaatacctgctgccgaccgctgctgctggtctgctgctcctcgctgcccagccggcgatggccatgggattgaaaaaaaagcttgttttaatcgacggcagcagcgtggcgtaccgcgcctttttcgccttgccgcttttgcataacgacaaaggcatccatacgaacgccgtctacgggtttacgatgatgttgaataaaattttggcggaagaagagccaactcatatgcttgtcgcgtttgacgccgggaaaacgacgttccggcatgaagcgtttcaagagtataaaggtgggcgccagcagacgccaccggagctgtcggagcagtttccgctgttgcgcgagctgctgagggcgtatcgcatccccgcctatgaactcgagaactacgaagcggacgatattatcggaacgcttgccgcccgcgctgagcaggaagggtttgaggtgaaagtcatttccggcgaccgcgatctgacccagctcgcctccccccatgtgacggtggacattacgaaaaaagggattaccgatatcgaaccgtacacgccggaggcggtccgcgaaaaatacggcttaactccggaacaaatcgttgatttgaaaggattgatgggcgacaaatcggacaacattcccggagtgccgggcatcggggaaaagacggcggtcaagctgctcaagcaattcggcacggtcgaaaacgtgcttgcctccattgacgagatcaaaggcgaaaagttgaaagaaacgctgcgccaacaccgggagatggcgctgttaagcaaaaagctcgccgccattcgccgcgacgccccggtcgagctctcgcttgatgacatcgtctatcaaggggaagaccgggagaaagtggtcgctttatttaaagagcttgggtttcaatcgtttttagagaaaatggaatcgccgtcatcagaagaggaaaaaccgcttgccaagatggcatttacgcttgctgaccgcgtgacggaggagatgcttgccgacaaggcggcgcttgtcgttgaagtggtcgaggaaaattatcatgatgcgccgatcgtcggcatcgctgtggtcaacgaacatggacggtttttcctgcgcccggagacggcgcttgccgatccgcagtttgtcgcctggcttggtgatgaaacgaagaaaaaaagcatgtttgactcaaagcgcgcggcagtcgccttgaaatggaaaggaattgagctatgcggcgtttcctttgatttattgctggccgcctatttgcttgatccggcgcaaggtgttgatgatgtggctgccgcagcaaaaatgaagcaatacgaagcggtgcgctcggatgaagcggtgtatggcaaaggggcgaagcgggccgtgccggatgagccagtgctcgccgagcatctcgtccgcaaggcggcggcgatttgggcgctcgaacgtccgtttttggatgagctgcgccgcaacgaacaagatcggttgctcgtcgagctcgagcagccgttgtcttcgattttggcggaaatggaatttgccggagtgaaagtggatacgaagcggctcgaacagatgggcgaagagctcgccgagcagctgcgcacggtcgagcagcgcatttatgagctcgccggccaagaattcaacatcaattcaccgaaacagctcggcgtcattttatttgaaaaactgcagctgcccgtcttgaaaaaaacgaaaaccggctactccacttcggcggatgtgcttgaaaaacttgcgccttatcacgagatcgtggaaaacattttgcattaccgccagcttggcaagttgcagtcgacgtatattgaaggattgctgaaagtcgtgcgacccgatacaaagaaggtgcatacgattttcaatcaggcgttgacgcaaaccggacggctcagctcgacggagccgaacttgcaaaacattccgattcggcttgaggaaggacggaaaatccgccaagcgttcgtgccgtcggagtctgattggctcattttcgctgccgactactcgcaaattgagttgcgcgtcctcgcccatattgcggaagatgacaatttaatggaagcgttccgccgcgatttggatatccatacgaaaacagcgatggacattttccaagtgagcgaggacgaagtgacgcccaacatgcgccgtcaggcgaaggcggtcaactttgggatcgtttacgggatcagtgattacggcttggcgcaaaacttaaatatttcacgcaaagaggccgctgaattcatcgagcgctacttcgaaagcttccctggcgtgaagcggtatatggaaaacattgtgcaagaagcaaaacagaaagggtatgtgacgacgctgctgcatcggcgccgctatttgccggatatcacgggtcgcaacttcaacgtccgcagctttgctgaacggatggcgatgaacacgccgattcaagggagcgccgctgacattattaaaaaggcgatgatcgatctgaacgctagactgaaggaagagcggctgcaagcgcgccttttgctacaggtgcatgacgagctcattttggaggcgccgaaagaagagatggagcggctgtgccggctcgttccggaagtgatggagcaagcggtcacacttcgcgtgccgctcaaagtcgattaccattatggctcgacgtggtatgacgcgaaataaaaaggatcc

SEQ ID NO: 2408 - DNA, 2712 bp, Artificial Sequence
  Description of Artificial Sequence: Synthetic DNA sequence of Bacillus caldolyticus EA1 DNA polymerase S802Q
atgaaatacctgctgccgaccgctgctgctggtctgctgctcctcgctgcccagccggcgatggccatgggattgaaaaaaaagcttgttttaatcgacggcagcagcgtggcgtaccgcgcctttttcgccttgccgcttttgcataacgacaaaggcatccatacgaacgccgtctacgggtttacgatgatgttgaataaaattttggcggaagaagagccaactcatatgcttgtcgcgtttgacgccgggaaaacgacgttccggcatgaagcgtttcaagagtataaaggtgggcgccagcagacgccaccggagctgtcggagcagtttccgctgttgcgcgagctgctgagggcgtatcgcatccccgcctatgaactcgagaactacgaagcggacgatattatcggaacgcttgccgcccgcgctgagcaggaagggtttgaggtgaaagtcatttccggcgaccgcgatctgacccagctcgcctccccccatgtgacggtggacattacgaaaaaagggattaccgatatcgaaccgtacacgccggaggcggtccgcgaaaaatacggcttaactccggaacaaatcgttgatttgaaaggattgatgggcgacaaatcggacaacattcccggagtgccgggcatcggggaaaagacggcggtcaagctgctcaagcaattcggcacggtcgaaaacgtgcttgcctccattgacgagatcaaaggcgaaaagttgaaagaaacgctgcgccaacaccgggagatggcgctgttaagcaaaaagctcgccgccattcgccgcgacgccccggtcgagctctcgcttgatgacatcgtctatcaaggggaagaccgggagaaagtggtcgctttatttaaagagcttgggtttcaatcgtttttagagaaaatggaatcgccgtcatcagaagaggaaaaaccgcttgccaagatggcatttacgcttgctgaccgcgtgacggaggagatgcttgccgacaaggcggcgcttgtcgttgaagtggtcgaggaaaattatcatgatgcgccgatcgtcggcatcgctgtggtcaacgaacatggacggtttttcctgcgcccggagacggcgcttgccgatccgcagtttgtcgcctggcttggtgatgaaacgaagaaaaaaagcatgtttgactcaaagcgcgcggcagtcgccttgaaatggaaaggaattgagctatgcggcgtttcctttgatttattgctggccgcctatttgcttgatccggcgcaaggtgttgatgatgtggctgccgcagcaaaaatgaagcaatacgaagcggtgcgctcggatgaagcggtgtatggcaaaggggcgaagcgggccgtgccggatgagccagtgctcgccgagcatctcgtccgcaaggcggcggcgatttgggcgctcgaacgtccgtttttggatgagctgcgccgcaacgaacaagatcggttgctcgtcgagctcgagcagccgttgtcttcgattttggcggaaatggaatttgccggagtgaaagtggatacgaagcggctcgaacagatgggcgaagagctcgccgagcagctgcgcacggtcgagcagcgcatttatgagctcgccggccaagaattcaacatcaattcaccgaaacagctcggcgtcattttatttgaaaaactgcagctgcccgtcttgaaaaaaacgaaaaccggctactccacttcggcggatgtgcttgaaaaacttgcgccttatcacgagatcgtggaaaacattttgcattaccgccagcttggcaagttgcagtcgacgtatattgaaggattgctgaaagtcgtgcgacccgatacaaagaaggtgcatacgattttcaatcaggcgttgacgcaaaccggacggctcagctcgacggagccgaacttgcaaaacattccgattcggcttgaggaaggacggaaaatccgccaagcgttcgtgccgtcggagtctgattggctcattttcgctgccgactactcgcaaattgagttgcgcgtcctcgcccatattgcggaagatgacaatttaatggaagcgttccgccgcgatttggatatccatacgaaaacagcgatggacattttccaagtgagcgaggacgaagtgacgcccaacatgcgccgtcaggcgaaggcggtcaactttgggatcgtttacgggatcagtgattacggcttggcgcaaaacttaaatatttcacgcaaagaggccgctgaattcatcgagcgctacttcgaaagcttccctggcgtgaagcggtatatggaaaacattgtgcaagaagcaaaacagaaagggtatgtgacgacgctgctgcatcggcgccgctatttgccggatatcacgcaacgcaacttcaacgtccgcagctttgctgaacggatggcgatgaacacgccgattcaagggagcgccgctgacattattaaaaaggcgatgatcgatctgaacgctagactgaaggaagagcggctgcaagcgcgccttttgctacaggtgcatgacgagctcattttggaggcgccgaaagaagagatggagcggctgtgccggctcgttccggaagtgatggagcaagcggtcacacttcgcgtgccgctcaaagtcgattaccattatggctcgacgtggtatgacgcgaaataaaaaggatcc

SEQ ID NO: 2409 - DNA, 2712 bp, Artificial Sequence
  Description of Artificial Sequence: Synthetic DNA sequence of Bacillus caldolyticus EA1 DNA polymerase S802H
atgaaatacctgctgccgaccgctgctgctggtctgctgctcctcgctgcccagccggcgatggccatgggattgaaaaaaaagcttgttttaatcgacggcagcagcgtggcgtaccgcgcctttttcgccttgccgcttttgcataacgacaaaggcatccatacgaacgccgtctacgggtttacgatgatgttgaataaaattttggcggaagaagagccaactcatatgcttgtcgcgtttgacgccgggaaaacgacgttccggcatgaagcgtttcaagagtataaaggtgggcgccagcagacgccaccggagctgtcggagcagtttccgctgttgcgcgagctgctgagggcgtatcgcatccccgcctatgaactcgagaactacgaagcggacgatattatcggaacgcttgccgcccgcgctgagcaggaagggtttgaggtgaaagtcatttccggcgaccgcgatctgacccagctcgcctccccccatgtgacggtggacattacgaaaaaagggattaccgatatcgaaccgtacacgccggaggcggtccgcgaaaaatacggcttaactccggaacaaatcgttgatttgaaaggattgatgggcgacaaatcggacaacattcccggagtgccgggcatcggggaaaagacggcggtcaagctgctcaagcaattcggcacggtcgaaaacgtgcttgcctccattgacgagatcaaaggcgaaaagttgaaagaaacgctgcgccaacaccgggagatggcgctgttaagcaaaaagctcgccgccattcgccgcgacgccccggtcgagctctcgcttgatgacatcgtctatcaaggggaagaccgggagaaagtggtcgctttatttaaagagcttgggtttcaatcgtttttagagaaaatggaatcgccgtcatcagaagaggaaaaaccgcttgccaagatggcatttacgcttgctgaccgcgtgacggaggagatgcttgccgacaaggcggcgcttgtcgttgaagtggtcgaggaaaattatcatgatgcgccgatcgtcggcatcgctgtggtcaacgaacatggacggtttttcctgcgcccggagacggcgcttgccgatccgcagtttgtcgcctggcttggtgatgaaacgaagaaaaaaagcatgtttgactcaaagcgcgcggcagtcgccttgaaatggaaaggaattgagctatgcggcgtttcctttgatttattgctggccgcctatttgcttgatccggcgcaaggtgttgatgatgtggctgccgcagcaaaaatgaagcaatacgaagcggtgcgctcggatgaagcggtgtatggcaaaggggcgaagcgggccgtgccggatgagccagtgctcgccgagcatctcgtccgcaaggcggcggcgatttgggcgctcgaacgtccgtttttggatgagctgcgccgcaacgaacaagatcggttgctcgtcgagctcgagcagccgttgtcttcgattttggcggaaatggaatttgccggagtgaaagtggatacgaagcggctcgaacagatgggcgaagagctcgccgagcagctgcgcacggtcgagcagcgcatttatgagctcgccggccaagaattcaacatcaattcaccgaaacagctcggcgtcattttatttgaaaaactgcagctgcccgtcttgaaaaaaacgaaaaccggctactccacttcggcggatgtgcttgaaaaacttgcgccttatcacgagatcgtggaaaacattttgcattaccgccagcttggcaagttgcagtcgacgtatattgaaggattgctgaaagtcgtgcgacccgatacaaagaaggtgcatacgattttcaatcaggcgttgacgcaaaccggacggctcagctcgacggagccgaacttgcaaaacattccgattcggcttgaggaaggacggaaaatccgccaagcgttcgtgccgtcggagtctgattggctcattttcgctgccgactactcgcaaattgagttgcgcgtcctcgcccatattgcggaagatgacaatttaatggaagcgttccgccgcgatttggatatccatacgaaaacagcgatggacattttccaagtgagcgaggacgaagtgacgcccaacatgcgccgtcaggcgaaggcggtcaactttgggatcgtttacgggatcagtgattacggcttggcgcaaaacttaaatatttcacgcaaagaggccgctgaattcatcgagcgctacttcgaaagcttccctggcgtgaagcggtatatggaaaacattgtgcaagaagcaaaacagaaagggtatgtgacgacgctgctgcatcggcgccgctatttgccggatatcacgcatcgcaacttcaacgtccgcagctttgctgaacggatggcgatgaacacgccgattcaagggagcgccgctgacattattaaaaaggcgatgatcgatctgaacgctagactgaaggaagagcggctgcaagcgcgccttttgctacaggtgcatgacgagctcattttggaggcgccgaaagaagagatggagcggctgtgccggctcgttccggaagtgatggagcaagcggtcacacttcgcgtgccgctcaaagtcgattaccattatggctcgacgtggtatgacgcgaaataaaaaggatcc

SEQ ID NO: 2410 - DNA, 2712 bp, Artificial Sequence
  Description of Artificial Sequence: Synthetic DNA sequence of Bacillus caldolyticus EA1 DNA polymerase S802I
atgaaatacctgctgccgaccgctgctgctggtctgctgctcctcgctgcccagccggcgatggccatgggattgaaaaaaaagcttgttttaatcgacggcagcagcgtggcgtaccgcgcctttttcgccttgccgcttttgcataacgacaaaggcatccatacgaacgccgtctacgggtttacgatgatgttgaataaaattttggcggaagaagagccaactcatatgcttgtcgcgtttgacgccgggaaaacgacgttccggcatgaagcgtttcaagagtataaaggtgggcgccagcagacgccaccggagctgtcggagcagtttccgctgttgcgcgagctgctgagggcgtatcgcatccccgcctatgaactcgagaactacgaagcggacgatattatcggaacgcttgccgcccgcgctgagcaggaagggtttgaggtgaaagtcatttccggcgaccgcgatctgacccagctcgcctccccccatgtgacggtggacattacgaaaaaagggattaccgatatcgaaccgtacacgccggaggcggtccgcgaaaaatacggcttaactccggaacaaatcgttgatttgaaaggattgatgggcgacaaatcggacaacattcccggagtgccgggcatcggggaaaagacggcggtcaagctgctcaagcaattcggcacggtcgaaaacgtgcttgcctccattgacgagatcaaaggcgaaaagttgaaagaaacgctgcgccaacaccgggagatggcgctgttaagcaaaaagctcgccgccattcgccgcgacgccccggtcgagctctcgcttgatgacatcgtctatcaaggggaagaccgggagaaagtggtcgctttatttaaagagcttgggtttcaatcgtttttagagaaaatggaatcgccgtcatcagaagaggaaaaaccgcttgccaagatggcatttacgcttgctgaccgcgtgacggaggagatgcttgccgacaaggcggcgcttgtcgttgaagtggtcgaggaaaattatcatgatgcgccgatcgtcggcatcgctgtggtcaacgaacatggacggtttttcctgcgcccggagacggcgcttgccgatccgcagtttgtcgcctggcttggtgatgaaacgaagaaaaaaagcatgtttgactcaaagcgcgcggcagtcgccttgaaatggaaaggaattgagctatgcggcgtttcctttgatttattgctggccgcctatttgcttgatccggcgcaaggtgttgatgatgtggctgccgcagcaaaaatgaagcaatacgaagcggtgcgctcggatgaagcggtgtatggcaaaggggcgaagcgggccgtgccggatgagccagtgctcgccgagcatctcgtccgcaaggcggcggcgatttgggcgctcgaacgtccgtttttggatgagctgcgccgcaacgaacaagatcggttgctcgtcgagctcgagcagccgttgtcttcgattttggcggaaatggaatttgccggagtgaaagtggatacgaagcggctcgaacagatgggcgaagagctcgccgagcagctgcgcacggtcgagcagcgcatttatgagctcgccggccaagaattcaacatcaattcaccgaaacagctcggcgtcattttatttgaaaaactgcagctgcccgtcttgaaaaaaacgaaaaccggctactccacttcggcggatgtgcttgaaaaacttgcgccttatcacgagatcgtggaaaacattttgcattaccgccagcttggcaagttgcagtcgacgtatattgaaggattgctgaaagtcgtgcgacccgatacaaagaaggtgcatacgattttcaatcaggcgttgacgcaaaccggacggctcagctcgacggagccgaacttgcaaaacattccgattcggcttgaggaaggacggaaaatccgccaagcgttcgtgccgtcggagtctgattggctcattttcgctgccgactactcgcaaattgagttgcgcgtcctcgcccatattgcggaagatgacaatttaatggaagcgttccgccgcgatttggatatccatacgaaaacagcgatggacattttccaagtgagcgaggacgaagtgacgcccaacatgcgccgtcaggcgaaggcggtcaactttgggatcgtttacgggatcagtgattacggcttggcgcaaaacttaaatatttcacgcaaagaggccgctgaattcatcgagcgctacttcgaaagcttccctggcgtgaagcggtatatggaaaacattgtgcaagaagcaaaacagaaagggtatgtgacgacgctgctgcatcggcgccgctatttgccggatatcacgattcgcaacttcaacgtccgcagctttgctgaacggatggcgatgaacacgccgattcaagggagcgccgctgacattattaaaaaggcgatgatcgatctgaacgctagactgaaggaagagcggctgcaagcgcgccttttgctacaggtgcatgacgagctcattttggaggcgccgaaagaagagatggagcggctgtgccggctcgttccggaagtgatggagcaagcggtcacacttcgcgtgccgctcaaagtcgattaccattatggctcgacgtggtatgacgcgaaataaaaaggatcc

SEQ ID NO: 2411 - DNA, 2712 bp, Artificial Sequence
  Description of Artificial Sequence: Synthetic DNA sequence of Bacillus caldolyticus EA1 DNA polymerase S802L
atgaaatacctgctgccgaccgctgctgctggtctgctgctcctcgctgcccagccggcgatggccatgggattgaaaaaaaagcttgttttaatcgacggcagcagcgtggcgtaccgcgcctttttcgccttgccgcttttgcataacgacaaaggcatccatacgaacgccgtctacgggtttacgatgatgttgaataaaattttggcggaagaagagccaactcatatgcttgtcgcgtttgacgccgggaaaacgacgttccggcatgaagcgtttcaagagtataaaggtgggcgccagcagacgccaccggagctgtcggagcagtttccgctgttgcgcgagctgctgagggcgtatcgcatccccgcctatgaactcgagaactacgaagcggacgatattatcggaacgcttgccgcccgcgctgagcaggaagggtttgaggtgaaagtcatttccggcgaccgcgatctgacccagctcgcctccccccatgtgacggtggacattacgaaaaaagggattaccgatatcgaaccgtacacgccggaggcggtccgcgaaaaatacggcttaactccggaacaaatcgttgatttgaaaggattgatgggcgacaaatcggacaacattcccggagtgccgggcatcggggaaaagacggcggtcaagctgctcaagcaattcggcacggtcgaaaacgtgcttgcctccattgacgagatcaaaggcgaaaagttgaaagaaacgctgcgccaacaccgggagatggcgctgttaagcaaaaagctcgccgccattcgccgcgacgccccggtcgagctctcgcttgatgacatcgtctatcaaggggaagaccgggagaaagtggtcgctttatttaaagagcttgggtttcaatcgtttttagagaaaatggaatcgccgtcatcagaagaggaaaaaccgcttgccaagatggcatttacgcttgctgaccgcgtgacggaggagatgcttgccgacaaggcggcgcttgtcgttgaagtggtcgaggaaaattatcatgatgcgccgatcgtcggcatcgctgtggtcaacgaacatggacggtttttcctgcgcccggagacggcgcttgccgatccgcagtttgtcgcctggcttggtgatgaaacgaagaaaaaaagcatgtttgactcaaagcgcgcggcagtcgccttgaaatggaaaggaattgagctatgcggcgtttcctttgatttattgctggccgcctatttgcttgatccggcgcaaggtgttgatgatgtggctgccgcagcaaaaatgaagcaatacgaagcggtgcgctcggatgaagcggtgtatggcaaaggggcgaagcgggccgtgccggatgagccagtgctcgccgagcatctcgtccgcaaggcggcggcgatttgggcgctcgaacgtccgtttttggatgagctgcgccgcaacgaacaagatcggttgctcgtcgagctcgagcagccgttgtcttcgattttggcggaaatggaatttgccggagtgaaagtggatacgaagcggctcgaacagatgggcgaagagctcgccgagcagctgcgcacggtcgagcagcgcatttatgagctcgccggccaagaattcaacatcaattcaccgaaacagctcggcgtcattttatttgaaaaactgcagctgcccgtcttgaaaaaaacgaaaaccggctactccacttcggcggatgtgcttgaaaaacttgcgccttatcacgagatcgtggaaaacattttgcattaccgccagcttggcaagttgcagtcgacgtatattgaaggattgctgaaagtcgtgcgacccgatacaaagaaggtgcatacgattttcaatcaggcgttgacgcaaaccggacggctcagctcgacggagccgaacttgcaaaacattccgattcggcttgaggaaggacggaaaatccgccaagcgttcgtgccgtcggagtctgattggctcattttcgctgccgactactcgcaaattgagttgcgcgtcctcgcccatattgcggaagatgacaatttaatggaagcgttccgccgcgatttggatatccatacgaaaacagcgatggacattttccaagtgagcgaggacgaagtgacgcccaacatgcgccgtcaggcgaaggcggtcaactttgggatcgtttacgggatcagtgattacggcttggcgcaaaacttaaatatttcacgcaaagaggccgctgaattcatcgagcgctacttcgaaagcttccctggcgtgaagcggtatatggaaaacattgtgcaagaagcaaaacagaaagggtatgtgacgacgctgctgcatcggcgccgctatttgccggatatcacgttacgcaacttcaacgtccgcagctttgctgaacggatggcgatgaacacgccgattcaagggagcgccgctgacattattaaaaaggcgatgatcgatctgaacgctagactgaaggaagagcggctgcaagcgcgccttttgctacaggtgcatgacgagctcattttggaggcgccgaaagaagagatggagcggctgtgccggctcgttccggaagtgatggagcaagcggtcacacttcgcgtgccgctcaaagtcgattaccattatggctcgacgtggtatgacgcgaaataaaaaggatcc

SEQ ID NO: 2412 - DNA, 2712 bp, Artificial Sequence
  Description of Artificial Sequence: Synthetic DNA sequence of Bacillus caldolyticus EA1 DNA polymerase S802K
atgaaatacctgctgccgaccgctgctgctggtctgctgctcctcgctgcccagccggcgatggccatgggattgaaaaaaaagcttgttttaatcgacggcagcagcgtggcgtaccgcgcctttttcgccttgccgcttttgcataacgacaaaggcatccatacgaacgccgtctacgggtttacgatgatgttgaataaaattttggcggaagaagagccaactcatatgcttgtcgcgtttgacgccgggaaaacgacgttccggcatgaagcgtttcaagagtataaaggtgggcgccagcagacgccaccggagctgtcggagcagtttccgctgttgcgcgagctgctgagggcgtatcgcatccccgcctatgaactcgagaactacgaagcggacgatattatcggaacgcttgccgcccgcgctgagcaggaagggtttgaggtgaaagtcatttccggcgaccgcgatctgacccagctcgcctccccccatgtgacggtggacattacgaaaaaagggattaccgatatcgaaccgtacacgccggaggcggtccgcgaaaaatacggcttaactccggaacaaatcgttgatttgaaaggattgatgggcgacaaatcggacaacattcccggagtgccgggcatcggggaaaagacggcggtcaagctgctcaagcaattcggcacggtcgaaaacgtgcttgcctccattgacgagatcaaaggcgaaaagttgaaagaaacgctgcgccaacaccgggagatggcgctgttaagcaaaaagctcgccgccattcgccgcgacgccccggtcgagctctcgcttgatgacatcgtctatcaaggggaagaccgggagaaagtggtcgctttatttaaagagcttgggtttcaatcgtttttagagaaaatggaatcgccgtcatcagaagaggaaaaaccgcttgccaagatggcatttacgcttgctgaccgcgtgacggaggagatgcttgccgacaaggcggcgcttgtcgttgaagtggtcgaggaaaattatcatgatgcgccgatcgtcggcatcgctgtggtcaacgaacatggacggtttttcctgcgcccggagacggcgcttgccgatccgcagtttgtcgcctggcttggtgatgaaacgaagaaaaaaagcatgtttgactcaaagcgcgcggcagtcgccttgaaatggaaaggaattgagctatgcggcgtttcctttgatttattgctggccgcctatttgcttgatccggcgcaaggtgttgatgatgtggctgccgcagcaaaaatgaagcaatacgaagcggtgcgctcggatgaagcggtgtatggcaaaggggcgaagcgggccgtgccggatgagccagtgctcgccgagcatctcgtccgcaaggcggcggcgatttgggcgctcgaacgtccgtttttggatgagctgcgccgcaacgaacaagatcggttgctcgtcgagctcgagcagccgttgtcttcgattttggcggaaatggaatttgccggagtgaaagtggatacgaagcggctcgaacagatgggcgaagagctcgccgagcagctgcgcacggtcgagcagcgcatttatgagctcgccggccaagaattcaacatcaattcaccgaaacagctcggcgtcattttatttgaaaaactgcagctgcccgtcttgaaaaaaacgaaaaccggctactccacttcggcggatgtgcttgaaaaacttgcgccttatcacgagatcgtggaaaacattttgcattaccgccagcttggcaagttgcagtcgacgtatattgaaggattgctgaaagtcgtgcgacccgatacaaagaaggtgcatacgattttcaatcaggcgttgacgcaaaccggacggctcagctcgacggagccgaacttgcaaaacattccgattcggcttgaggaaggacggaaaatccgccaagcgttcgtgccgtcggagtctgattggctcattttcgctgccgactactcgcaaattgagttgcgcgtcctcgcccatattgcggaagatgacaatttaatggaagcgttccgccgcgatttggatatccatacgaaaacagcgatggacattttccaagtgagcgaggacgaagtgacgcccaacatgcgccgtcaggcgaaggcggtcaactttgggatcgtttacgggatcagtgattacggcttggcgcaaaacttaaatatttcacgcaaagaggccgctgaattcatcgagcgctacttcgaaagcttccctggcgtgaagcggtatatggaaaacattgtgcaagaagcaaaacagaaagggtatgtgacgacgctgctgcatcggcgccgctatttgccggatatcacgaaacgcaacttcaacgtccgcagctttgctgaacggatggcgatgaacacgccgattcaagggagcgccgctgacattattaaaaaggcgatgatcgatctgaacgctagactgaaggaagagcggctgcaagcgcgccttttgctacaggtgcatgacgagctcattttggaggcgccgaaagaagagatggagcggctgtgccggctcgttccggaagtgatggagcaagcggtcacacttcgcgtgccgctcaaagtcgattaccattatggctcgacgtggtatgacgcgaaataaaaaggatcc

SEQ ID NO: 2413 - DNA, 2712 bp, Artificial Sequence
  Description of Artificial Sequence: Synthetic DNA sequence of Bacillus caldolyticus EA1 DNA polymerase S802E
atgaaatacctgctgccgaccgctgctgctggtctgctgctcctcgctgcccagccggcgatggccatgggattgaaaaaaaagcttgttttaatcgacggcagcagcgtggcgtaccgcgcctttttcgccttgccgcttttgcataacgacaaaggcatccatacgaacgccgtctacgggtttacgatgatgttgaataaaattttggcggaagaagagccaactcatatgcttgtcgcgtttgacgccgggaaaacgacgttccggcatgaagcgtttcaagagtataaaggtgggcgccagcagacgccaccggagctgtcggagcagtttccgctgttgcgcgagctgctgagggcgtatcgcatccccgcctatgaactcgagaactacgaagcggacgatattatcggaacgcttgccgcccgcgctgagcaggaagggtttgaggtgaaagtcatttccggcgaccgcgatctgacccagctcgcctccccccatgtgacggtggacattacgaaaaaagggattaccgatatcgaaccgtacacgccggaggcggtccgcgaaaaatacggcttaactccggaacaaatcgttgatttgaaaggattgatgggcgacaaatcggacaacattcccggagtgccgggcatcggggaaaagacggcggtcaagctgctcaagcaattcggcacggtcgaaaacgtgcttgcctccattgacgagatcaaaggcgaaaagttgaaagaaacgctgcgccaacaccgggagatggcgctgttaagcaaaaagctcgccgccattcgccgcgacgccccggtcgagctctcgcttgatgacatcgtctatcaaggggaagaccgggagaaagtggtcgctttatttaaagagcttgggtttcaatcgtttttagagaaaatggaatcgccgtcatcagaagaggaaaaaccgcttgccaagatggcatttacgcttgctgaccgcgtgacggaggagatgcttgccgacaaggcggcgcttgtcgttgaagtggtcgaggaaaattatcatgatgcgccgatcgtcggcatcgctgtggtcaacgaacatggacggtttttcctgcgcccggagacggcgcttgccgatccgcagtttgtcgcctggcttggtgatgaaacgaagaaaaaaagcatgtttgactcaaagcgcgcggcagtcgccttgaaatggaaaggaattgagctatgcggcgtttcctttgatttattgctggccgcctatttgcttgatccggcgcaaggtgttgatgatgtggctgccgcagcaaaaatgaagcaatacgaagcggtgcgctcggatgaagcggtgtatggcaaaggggcgaagcgggccgtgccggatgagccagtgctcgccgagcatctcgtccgcaaggcggcggcgatttgggcgctcgaacgtccgtttttggatgagctgcgccgcaacgaacaagatcggttgctcgtcgagctcgagcagccgttgtcttcgattttggcggaaatggaatttgccggagtgaaagtggatacgaagcggctcgaacagatgggcgaagagctcgccgagcagctgcgcacggtcgagcagcgcatttatgagctcgccggccaagaattcaacatcaattcaccgaaacagctcggcgtcattttatttgaaaaactgcagctgcccgtcttgaaaaaaacgaaaaccggctactccacttcggcggatgtgcttgaaaaacttgcgccttatcacgagatcgtggaaaacattttgcattaccgccagcttggcaagttgcagtcgacgtatattgaaggattgctgaaagtcgtgcgacccgatacaaagaaggtgcatacgattttcaatcaggcgttgacgcaaaccggacggctcagctcgacggagccgaacttgcaaaacattccgattcggcttgaggaaggacggaaaatccgccaagcgttcgtgccgtcggagtctgattggctcattttcgctgccgactactcgcaaattgagttgcgcgtcctcgcccatattgcggaagatgacaatttaatggaagcgttccgccgcgatttggatatccatacgaaaacagcgatggacattttccaagtgagcgaggacgaagtgacgcccaacatgcgccgtcaggcgaaggcggtcaactttgggatcgtttacgggatcagtgattacggcttggcgcaaaacttaaatatttcacgcaaagaggccgctgaattcatcgagcgctacttcgaaagcttccctggcgtgaagcggtatatggaaaacattgtgcaagaagcaaaacagaaagggtatgtgacgacgctgctgcatcggcgccgctatttgccggatatcacggaacgcaacttcaacgtccgcagctttgctgaacggatggcgatgaacacgccgattcaagggagcgccgctgacattattaaaaaggcgatgatcgatctgaacgctagactgaaggaagagcggctgcaagcgcgccttttgctacaggtgcatgacgagctcattttggaggcgccgaaagaagagatggagcggctgtgccggctcgttccggaagtgatggagcaagcggtcacacttcgcgtgccgctcaaagtcgattaccattatggctcgacgtggtatgacgcgaaataaaaaggatcc

SEQ ID NO: 2414 - DNA, 2712 bp, Artificial Sequence
  Description of Artificial Sequence: Synthetic DNA sequence of Bacillus caldolyticus EA1 DNA polymerase S802D
atgaaatacctgctgccgaccgctgctgctggtctgctgctcctcgctgcccagccggcgatggccatgggattgaaaaaaaagcttgttttaatcgacggcagcagcgtggcgtaccgcgcctttttcgccttgccgcttttgcataacgacaaaggcatccatacgaacgccgtctacgggtttacgatgatgttgaataaaattttggcggaagaagagccaactcatatgcttgtcgcgtttgacgccgggaaaacgacgttccggcatgaagcgtttcaagagtataaaggtgggcgccagcagacgccaccggagctgtcggagcagtttccgctgttgcgcgagctgctgagggcgtatcgcatccccgcctatgaactcgagaactacgaagcggacgatattatcggaacgcttgccgcccgcgctgagcaggaagggtttgaggtgaaagtcatttccggcgaccgcgatctgacccagctcgcctccccccatgtgacggtggacattacgaaaaaagggattaccgatatcgaaccgtacacgccggaggcggtccgcgaaaaatacggcttaactccggaacaaatcgttgatttgaaaggattgatgggcgacaaatcggacaacattcccggagtgccgggcatcggggaaaagacggcggtcaagctgctcaagcaattcggcacggtcgaaaacgtgcttgcctccattgacgagatcaaaggcgaaaagttgaaagaaacgctgcgccaacaccgggagatggcgctgttaagcaaaaagctcgccgccattcgccgcgacgccccggtcgagctctcgcttgatgacatcgtctatcaaggggaagaccgggagaaagtggtcgctttatttaaagagcttgggtttcaatcgtttttagagaaaatggaatcgccgtcatcagaagaggaaaaaccgcttgccaagatggcatttacgcttgctgaccgcgtgacggaggagatgcttgccgacaaggcggcgcttgtcgttgaagtggtcgaggaaaattatcatgatgcgccgatcgtcggcatcgctgtggtcaacgaacatggacggtttttcctgcgcccggagacggcgcttgccgatccgcagtttgtcgcctggcttggtgatgaaacgaagaaaaaaagcatgtttgactcaaagcgcgcggcagtcgccttgaaatggaaaggaattgagctatgcggcgtttcctttgatttattgctggccgcctatttgcttgatccggcgcaaggtgttgatgatgtggctgccgcagcaaaaatgaagcaatacgaagcggtgcgctcggatgaagcggtgtatggcaaaggggcgaagcgggccgtgccggatgagccagtgctcgccgagcatctcgtccgcaaggcggcggcgatttgggcgctcgaacgtccgtttttggatgagctgcgccgcaacgaacaagatcggttgctcgtcgagctcgagcagccgttgtcttcgattttggcggaaatggaatttgccggagtgaaagtggatacgaagcggctcgaacagatgggcgaagagctcgccgagcagctgcgcacggtcgagcagcgcatttatgagctcgccggccaagaattcaacatcaattcaccgaaacagctcggcgtcattttatttgaaaaactgcagctgcccgtcttgaaaaaaacgaaaaccggctactccacttcggcggatgtgcttgaaaaacttgcgccttatcacgagatcgtggaaaacattttgcattaccgccagcttggcaagttgcagtcgacgtatattgaaggattgctgaaagtcgtgcgacccgatacaaagaaggtgcatacgattttcaatcaggcgttgacgcaaaccggacggctcagctcgacggagccgaacttgcaaaacattccgattcggcttgaggaaggacggaaaatccgccaagcgttcgtgccgtcggagtctgattggctcattttcgctgccgactactcgcaaattgagttgcgcgtcctcgcccatattgcggaagatgacaatttaatggaagcgttccgccgcgatttggatatccatacgaaaacagcgatggacattttccaagtgagcgaggacgaagtgacgcccaacatgcgccgtcaggcgaaggcggtcaactttgggatcgtttacgggatcagtgattacggcttggcgcaaaacttaaatatttcacgcaaagaggccgctgaattcatcgagcgctacttcgaaagcttccctggcgtgaagcggtatatggaaaacattgtgcaagaagcaaaacagaaagggtatgtgacgacgctgctgcatcggcgccgctatttgccggatatcacggatcgcaacttcaacgtccgcagctttgctgaacggatggcgatgaacacgccgattcaagggagcgccgctgacattattaaaaaggcgatgatcgatctgaacgctagactgaaggaagagcggctgcaagcgcgccttttgctacaggtgcatgacgagctcattttggaggcgccgaaagaagagatggagcggctgtgccggctcgttccggaagtgatggagcaagcggtcacacttcgcgtgccgctcaaagtcgattaccattatggctcgacgtggtatgacgcgaaataaaaaggatcc

SEQ ID NO: 2415 - DNA, 2712 bp, Artificial Sequence
  Description of Artificial Sequence: Synthetic DNA sequence of Bacillus caldolyticus EA1 DNA polymerase S802F
atgaaatacctgctgccgaccgctgctgctggtctgctgctcctcgctgcccagccggcgatggccatgggattgaaaaaaaagcttgttttaatcgacggcagcagcgtggcgtaccgcgcctttttcgccttgccgcttttgcataacgacaaaggcatccatacgaacgccgtctacgggtttacgatgatgttgaataaaattttggcggaagaagagccaactcatatgcttgtcgcgtttgacgccgggaaaacgacgttccggcatgaagcgtttcaagagtataaaggtgggcgccagcagacgccaccggagctgtcggagcagtttccgctgttgcgcgagctgctgagggcgtatcgcatccccgcctatgaactcgagaactacgaagcggacgatattatcggaacgcttgccgcccgcgctgagcaggaagggtttgaggtgaaagtcatttccggcgaccgcgatctgacccagctcgcctccccccatgtgacggtggacattacgaaaaaagggattaccgatatcgaaccgtacacgccggaggcggtccgcgaaaaatacggcttaactccggaacaaatcgttgatttgaaaggattgatgggcgacaaatcggacaacattcccggagtgccgggcatcggggaaaagacggcggtcaagctgctcaagcaattcggcacggtcgaaaacgtgcttgcctccattgacgagatcaaaggcgaaaagttgaaagaaacgctgcgccaacaccgggagatggcgctgttaagcaaaaagctcgccgccattcgccgcgacgccccggtcgagctctcgcttgatgacatcgtctatcaaggggaagaccgggagaaagtggtcgctttatttaaagagcttgggtttcaatcgtttttagagaaaatggaatcgccgtcatcagaagaggaaaaaccgcttgccaagatggcatttacgcttgctgaccgcgtgacggaggagatgcttgccgacaaggcggcgcttgtcgttgaagtggtcgaggaaaattatcatgatgcgccgatcgtcggcatcgctgtggtcaacgaacatggacggtttttcctgcgcccggagacggcgcttgccgatccgcagtttgtcgcctggcttggtgatgaaacgaagaaaaaaagcatgtttgactcaaagcgcgcggcagtcgccttgaaatggaaaggaattgagctatgcggcgtttcctttgatttattgctggccgcctatttgcttgatccggcgcaaggtgttgatgatgtggctgccgcagcaaaaatgaagcaatacgaagcggtgcgctcggatgaagcggtgtatggcaaaggggcgaagcgggccgtgccggatgagccagtgctcgccgagcatctcgtccgcaaggcggcggcgatttgggcgctcgaacgtccgtttttggatgagctgcgccgcaacgaacaagatcggttgctcgtcgagctcgagcagccgttgtcttcgattttggcggaaatggaatttgccggagtgaaagtggatacgaagcggctcgaacagatgggcgaagagctcgccgagcagctgcgcacggtcgagcagcgcatttatgagctcgccggccaagaattcaacatcaattcaccgaaacagctcggcgtcattttatttgaaaaactgcagctgcccgtcttgaaaaaaacgaaaaccggctactccacttcggcggatgtgcttgaaaaacttgcgccttatcacgagatcgtggaaaacattttgcattaccgccagcttggcaagttgcagtcgacgtatattgaaggattgctgaaagtcgtgcgacccgatacaaagaaggtgcatacgattttcaatcaggcgttgacgcaaaccggacggctcagctcgacggagccgaacttgcaaaacattccgattcggcttgaggaaggacggaaaatccgccaagcgttcgtgccgtcggagtctgattggctcattttcgctgccgactactcgcaaattgagttgcgcgtcctcgcccatattgcggaagatgacaatttaatggaagcgttccgccgcgatttggatatccatacgaaaacagcgatggacattttccaagtgagcgaggacgaagtgacgcccaacatgcgccgtcaggcgaaggcggtcaactttgggatcgtttacgggatcagtgattacggcttggcgcaaaacttaaatatttcacgcaaagaggccgctgaattcatcgagcgctacttcgaaagcttccctggcgtgaagcggtatatggaaaacattgtgcaagaagcaaaacagaaagggtatgtgacgacgctgctgcatcggcgccgctatttgccggatatcacgtttcgcaacttcaacgtccgcagctttgctgaacggatggcgatgaacacgccgattcaagggagcgccgctgacattattaaaaaggcgatgatcgatctgaacgctagactgaaggaagagcggctgcaagcgcgccttttgctacaggtgcatgacgagctcattttggaggcgccgaaagaagagatggagcggctgtgccggctcgttccggaagtgatggagcaagcggtcacacttcgcgtgccgctcaaagtcgattaccattatggctcgacgtggtatgacgcgaaataaaaaggatcc

SEQ ID NO: 2416 - DNA, 2712 bp, Artificial Sequence
  Description of Artificial Sequence: Synthetic DNA sequence of Bacillus caldolyticus EA1 DNA polymerase S802Y
atgaaatacctgctgccgaccgctgctgctggtctgctgctcctcgctgcccagccggcgatggccatgggattgaaaaaaaagcttgttttaatcgacggcagcagcgtggcgtaccgcgcctttttcgccttgccgcttttgcataacgacaaaggcatccatacgaacgccgtctacgggtttacgatgatgttgaataaaattttggcggaagaagagccaactcatatgcttgtcgcgtttgacgccgggaaaacgacgttccggcatgaagcgtttcaagagtataaaggtgggcgccagcagacgccaccggagctgtcggagcagtttccgctgttgcgcgagctgctgagggcgtatcgcatccccgcctatgaactcgagaactacgaagcggacgatattatcggaacgcttgccgcccgcgctgagcaggaagggtttgaggtgaaagtcatttccggcgaccgcgatctgacccagctcgcctccccccatgtgacggtggacattacgaaaaaagggattaccgatatcgaaccgtacacgccggaggcggtccgcgaaaaatacggcttaactccggaacaaatcgttgatttgaaaggattgatgggcgacaaatcggacaacattcccggagtgccgggcatcggggaaaagacggcggtcaagctgctcaagcaattcggcacggtcgaaaacgtgcttgcctccattgacgagatcaaaggcgaaaagttgaaagaaacgctgcgccaacaccgggagatggcgctgttaagcaaaaagctcgccgccattcgccgcgacgccccggtcgagctctcgcttgatgacatcgtctatcaaggggaagaccgggagaaagtggtcgctttatttaaagagcttgggtttcaatcgtttttagagaaaatggaatcgccgtcatcagaagaggaaaaaccgcttgccaagatggcatttacgcttgctgaccgcgtgacggaggagatgcttgccgacaaggcggcgcttgtcgttgaagtggtcgaggaaaattatcatgatgcgccgatcgtcggcatcgctgtggtcaacgaacatggacggtttttcctgcgcccggagacggcgcttgccgatccgcagtttgtcgcctggcttggtgatgaaacgaagaaaaaaagcatgtttgactcaaagcgcgcggcagtcgccttgaaatggaaaggaattgagctatgcggcgtttcctttgatttattgctggccgcctatttgcttgatccggcgcaaggtgttgatgatgtggctgccgcagcaaaaatgaagcaatacgaagcggtgcgctcggatgaagcggtgtatggcaaaggggcgaagcgggccgtgccggatgagccagtgctcgccgagcatctcgtccgcaaggcggcggcgatttgggcgctcgaacgtccgtttttggatgagctgcgccgcaacgaacaagatcggttgctcgtcgagctcgagcagccgttgtcttcgattttggcggaaatggaatttgccggagtgaaagtggatacgaagcggctcgaacagatgggcgaagagctcgccgagcagctgcgcacggtcgagcagcgcatttatgagctcgccggccaagaattcaacatcaattcaccgaaacagctcggcgtcattttatttgaaaaactgcagctgcccgtcttgaaaaaaacgaaaaccggctactccacttcggcggatgtgcttgaaaaacttgcgccttatcacgagatcgtggaaaacattttgcattaccgccagcttggcaagttgcagtcgacgtatattgaaggattgctgaaagtcgtgcgacccgatacaaagaaggtgcatacgattttcaatcaggcgttgacgcaaaccggacggctcagctcgacggagccgaacttgcaaaacattccgattcggcttgaggaaggacggaaaatccgccaagcgttcgtgccgtcggagtctgattggctcattttcgctgccgactactcgcaaattgagttgcgcgtcctcgcccatattgcggaagatgacaatttaatggaagcgttccgccgcgatttggatatccatacgaaaacagcgatggacattttccaagtgagcgaggacgaagtgacgcccaacatgcgccgtcaggcgaaggcggtcaactttgggatcgtttacgggatcagtgattacggcttggcgcaaaacttaaatatttcacgcaaagaggccgctgaattcatcgagcgctacttcgaaagcttccctggcgtgaagcggtatatggaaaacattgtgcaagaagcaaaacagaaagggtatgtgacgacgctgctgcatcggcgccgctatttgccggatatcacgtatcgcaacttcaacgtccgcagctttgctgaacggatggcgatgaacacgccgattcaagggagcgccgctgacattattaaaaaggcgatgatcgatctgaacgctagactgaaggaagagcggctgcaagcgcgccttttgctacaggtgcatgacgagctcattttggaggcgccgaaagaagagatggagcggctgtgccggctcgttccggaagtgatggagcaagcggtcacacttcgcgtgccgctcaaagtcgattaccattatggctcgacgtggtatgacgcgaaataaaaaggatcc

SEQ ID NO: 2417 - DNA, 2712 bp, Artificial Sequence
  Description of Artificial Sequence: Synthetic DNA sequence of Bacillus caldolyticus EA1 DNA polymerase S802W
atgaaatacctgctgccgaccgctgctgctggtctgctgctcctcgctgcccagccggcgatggccatgggattgaaaaaaaagcttgttttaatcgacggcagcagcgtggcgtaccgcgcctttttcgccttgccgcttttgcataacgacaaaggcatccatacgaacgccgtctacgggtttacgatgatgttgaataaaattttggcggaagaagagccaactcatatgcttgtcgcgtttgacgccgggaaaacgacgttccggcatgaagcgtttcaagagtataaaggtgggcgccagcagacgccaccggagctgtcggagcagtttccgctgttgcgcgagctgctgagggcgtatcgcatccccgcctatgaactcgagaactacgaagcggacgatattatcggaacgcttgccgcccgcgctgagcaggaagggtttgaggtgaaagtcatttccggcgaccgcgatctgacccagctcgcctccccccatgtgacggtggacattacgaaaaaagggattaccgatatcgaaccgtacacgccggaggcggtccgcgaaaaatacggcttaactccggaacaaatcgttgatttgaaaggattgatgggcgacaaatcggacaacattcccggagtgccgggcatcggggaaaagacggcggtcaagctgctcaagcaattcggcacggtcgaaaacgtgcttgcctccattgacgagatcaaaggcgaaaagttgaaagaaacgctgcgccaacaccgggagatggcgctgttaagcaaaaagctcgccgccattcgccgcgacgccccggtcgagctctcgcttgatgacatcgtctatcaaggggaagaccgggagaaagtggtcgctttatttaaagagcttgggtttcaatcgtttttagagaaaatggaatcgccgtcatcagaagaggaaaaaccgcttgccaagatggcatttacgcttgctgaccgcgtgacggaggagatgcttgccgacaaggcggcgcttgtcgttgaagtggtcgaggaaaattatcatgatgcgccgatcgtcggcatcgctgtggtcaacgaacatggacggtttttcctgcgcccggagacggcgcttgccgatccgcagtttgtcgcctggcttggtgatgaaacgaagaaaaaaagcatgtttgactcaaagcgcgcggcagtcgccttgaaatggaaaggaattgagctatgcggcgtttcctttgatttattgctggccgcctatttgcttgatccggcgcaaggtgttgatgatgtggctgccgcagcaaaaatgaagcaatacgaagcggtgcgctcggatgaagcggtgtatggcaaaggggcgaagcgggccgtgccggatgagccagtgctcgccgagcatctcgtccgcaaggcggcggcgatttgggcgctcgaacgtccgtttttggatgagctgcgccgcaacgaacaagatcggttgctcgtcgagctcgagcagccgttgtcttcgattttggcggaaatggaatttgccggagtgaaagtggatacgaagcggctcgaacagatgggcgaagagctcgccgagcagctgcgcacggtcgagcagcgcatttatgagctcgccggccaagaattcaacatcaattcaccgaaacagctcggcgtcattttatttgaaaaactgcagctgcccgtcttgaaaaaaacgaaaaccggctactccacttcggcggatgtgcttgaaaaacttgcgccttatcacgagatcgtggaaaacattttgcattaccgccagcttggcaagttgcagtcgacgtatattgaaggattgctgaaagtcgtgcgacccgatacaaagaaggtgcatacgattttcaatcaggcgttgacgcaaaccggacggctcagctcgacggagccgaacttgcaaaacattccgattcggcttgaggaaggacggaaaatccgccaagcgttcgtgccgtcggagtctgattggctcattttcgctgccgactactcgcaaattgagttgcgcgtcctcgcccatattgcggaagatgacaatttaatggaagcgttccgccgcgatttggatatccatacgaaaacagcgatggacattttccaagtgagcgaggacgaagtgacgcccaacatgcgccgtcaggcgaaggcggtcaactttgggatcgtttacgggatcagtgattacggcttggcgcaaaacttaaatatttcacgcaaagaggccgctgaattcatcgagcgctacttcgaaagcttccctggcgtgaagcggtatatggaaaacattgtgcaagaagcaaaacagaaagggtatgtgacgacgctgctgcatcggcgccgctatttgccggatatcacgtggcgcaacttcaacgtccgcagctttgctgaacggatggcgatgaacacgccgattcaagggagcgccgctgacattattaaaaaggcgatgatcgatctgaacgctagactgaaggaagagcggctgcaagcgcgccttttgctacaggtgcatgacgagctcattttggaggcgccgaaagaagagatggagcggctgtgccggctcgttccggaagtgatggagcaagcggtcacacttcgcgtgccgctcaaagtcgattaccattatggctcgacgtggtatgacgcgaaataaaaaggatcc

SEQ ID NO: 2418 - DNA, 2712 bp, Artificial Sequence
  Description of Artificial Sequence: Synthetic DNA sequence of Bacillus caldolyticus EA1 DNA polymerase S802P
atgaaatacctgctgccgaccgctgctgctggtctgctgctcctcgctgcccagccggcgatggccatgggattgaaaaaaaagcttgttttaatcgacggcagcagcgtggcgtaccgcgcctttttcgccttgccgcttttgcataacgacaaaggcatccatacgaacgccgtctacgggtttacgatgatgttgaataaaattttggcggaagaagagccaactcatatgcttgtcgcgtttgacgccgggaaaacgacgttccggcatgaagcgtttcaagagtataaaggtgggcgccagcagacgccaccggagctgtcggagcagtttccgctgttgcgcgagctgctgagggcgtatcgcatccccgcctatgaactcgagaactacgaagcggacgatattatcggaacgcttgccgcccgcgctgagcaggaagggtttgaggtgaaagtcatttccggcgaccgcgatctgacccagctcgcctccccccatgtgacggtggacattacgaaaaaagggattaccgatatcgaaccgtacacgccggaggcggtccgcgaaaaatacggcttaactccggaacaaatcgttgatttgaaaggattgatgggcgacaaatcggacaacattcccggagtgccgggcatcggggaaaagacggcggtcaagctgctcaagcaattcggcacggtcgaaaacgtgcttgcctccattgacgagatcaaaggcgaaaagttgaaagaaacgctgcgccaacaccgggagatggcgctgttaagcaaaaagctcgccgccattcgccgcgacgccccggtcgagctctcgcttgatgacatcgtctatcaaggggaagaccgggagaaagtggtcgctttatttaaagagcttgggtttcaatcgtttttagagaaaatggaatcgccgtcatcagaagaggaaaaaccgcttgccaagatggcatttacgcttgctgaccgcgtgacggaggagatgcttgccgacaaggcggcgcttgtcgttgaagtggtcgaggaaaattatcatgatgcgccgatcgtcggcatcgctgtggtcaacgaacatggacggtttttcctgcgcccggagacggcgcttgccgatccgcagtttgtcgcctggcttggtgatgaaacgaagaaaaaaagcatgtttgactcaaagcgcgcggcagtcgccttgaaatggaaaggaattgagctatgcggcgtttcctttgatttattgctggccgcctatttgcttgatccggcgcaaggtgttgatgatgtggctgccgcagcaaaaatgaagcaatacgaagcggtgcgctcggatgaagcggtgtatggcaaaggggcgaagcgggccgtgccggatgagccagtgctcgccgagcatctcgtccgcaaggcggcggcgatttgggcgctcgaacgtccgtttttggatgagctgcgccgcaacgaacaagatcggttgctcgtcgagctcgagcagccgttgtcttcgattttggcggaaatggaatttgccggagtgaaagtggatacgaagcggctcgaacagatgggcgaagagctcgccgagcagctgcgcacggtcgagcagcgcatttatgagctcgccggccaagaattcaacatcaattcaccgaaacagctcggcgtcattttatttgaaaaactgcagctgcccgtcttgaaaaaaacgaaaaccggctactccacttcggcggatgtgcttgaaaaacttgcgccttatcacgagatcgtggaaaacattttgcattaccgccagcttggcaagttgcagtcgacgtatattgaaggattgctgaaagtcgtgcgacccgatacaaagaaggtgcatacgattttcaatcaggcgttgacgcaaaccggacggctcagctcgacggagccgaacttgcaaaacattccgattcggcttgaggaaggacggaaaatccgccaagcgttcgtgccgtcggagtctgattggctcattttcgctgccgactactcgcaaattgagttgcgcgtcctcgcccatattgcggaagatgacaatttaatggaagcgttccgccgcgatttggatatccatacgaaaacagcgatggacattttccaagtgagcgaggacgaagtgacgcccaacatgcgccgtcaggcgaaggcggtcaactttgggatcgtttacgggatcagtgattacggcttggcgcaaaacttaaatatttcacgcaaagaggccgctgaattcatcgagcgctacttcgaaagcttccctggcgtgaagcggtatatggaaaacattgtgcaagaagcaaaacagaaagggtatgtgacgacgctgctgcatcggcgccgctatttgccggatatcacgcctcgcaacttcaacgtccgcagctttgctgaacggatggcgatgaacacgccgattcaagggagcgccgctgacattattaaaaaggcgatgatcgatctgaacgctagactgaaggaagagcggctgcaagcgcgccttttgctacaggtgcatgacgagctcattttggaggcgccgaaagaagagatggagcggctgtgccggctcgttccggaagtgatggagcaagcggtcacacttcgcgtgccgctcaaagtcgattaccattatggctcgacgtggtatgacgcgaaataaaaaggatcc

SEQ ID NO: 2419 - DNA, 2712 bp, Artificial Sequence
  Description of Artificial Sequence: Synthetic DNA sequence of Bacillus caldolyticus EA1 DNA polymerase S802M
atgaaatacctgctgccgaccgctgctgctggtctgctgctcctcgctgcccagccggcgatggccatgggattgaaaaaaaagcttgttttaatcgacggcagcagcgtggcgtaccgcgcctttttcgccttgccgcttttgcataacgacaaaggcatccatacgaacgccgtctacgggtttacgatgatgttgaataaaattttggcggaagaagagccaactcatatgcttgtcgcgtttgacgccgggaaaacgacgttccggcatgaagcgtttcaagagtataaaggtgggcgccagcagacgccaccggagctgtcggagcagtttccgctgttgcgcgagctgctgagggcgtatcgcatccccgcctatgaactcgagaactacgaagcggacgatattatcggaacgcttgccgcccgcgctgagcaggaagggtttgaggtgaaagtcatttccggcgaccgcgatctgacccagctcgcctccccccatgtgacggtggacattacgaaaaaagggattaccgatatcgaaccgtacacgccggaggcggtccgcgaaaaatacggcttaactccggaacaaatcgttgatttgaaaggattgatgggcgacaaatcggacaacattcccggagtgccgggcatcggggaaaagacggcggtcaagctgctcaagcaattcggcacggtcgaaaacgtgcttgcctccattgacgagatcaaaggcgaaaagttgaaagaaacgctgcgccaacaccgggagatggcgctgttaagcaaaaagctcgccgccattcgccgcgacgccccggtcgagctctcgcttgatgacatcgtctatcaaggggaagaccgggagaaagtggtcgctttatttaaagagcttgggtttcaatcgtttttagagaaaatggaatcgccgtcatcagaagaggaaaaaccgcttgccaagatggcatttacgcttgctgaccgcgtgacggaggagatgcttgccgacaaggcggcgcttgtcgttgaagtggtcgaggaaaattatcatgatgcgccgatcgtcggcatcgctgtggtcaacgaacatggacggtttttcctgcgcccggagacggcgcttgccgatccgcagtttgtcgcctggcttggtgatgaaacgaagaaaaaaagcatgtttgactcaaagcgcgcggcagtcgccttgaaatggaaaggaattgagctatgcggcgtttcctttgatttattgctggccgcctatttgcttgatccggcgcaaggtgttgatgatgtggctgccgcagcaaaaatgaagcaatacgaagcggtgcgctcggatgaagcggtgtatggcaaaggggcgaagcgggccgtgccggatgagccagtgctcgccgagcatctcgtccgcaaggcggcggcgatttgggcgctcgaacgtccgtttttggatgagctgcgccgcaacgaacaagatcggttgctcgtcgagctcgagcagccgttgtcttcgattttggcggaaatggaatttgccggagtgaaagtggatacgaagcggctcgaacagatgggcgaagagctcgccgagcagctgcgcacggtcgagcagcgcatttatgagctcgccggccaagaattcaacatcaattcaccgaaacagctcggcgtcattttatttgaaaaactgcagctgcccgtcttgaaaaaaacgaaaaccggctactccacttcggcggatgtgcttgaaaaacttgcgccttatcacgagatcgtggaaaacattttgcattaccgccagcttggcaagttgcagtcgacgtatattgaaggattgctgaaagtcgtgcgacccgatacaaagaaggtgcatacgattttcaatcaggcgttgacgcaaaccggacggctcagctcgacggagccgaacttgcaaaacattccgattcggcttgaggaaggacggaaaatccgccaagcgttcgtgccgtcggagtctgattggctcattttcgctgccgactactcgcaaattgagttgcgcgtcctcgcccatattgcggaagatgacaatttaatggaagcgttccgccgcgatttggatatccatacgaaaacagcgatggacattttccaagtgagcgaggacgaagtgacgcccaacatgcgccgtcaggcgaaggcggtcaactttgggatcgtttacgggatcagtgattacggcttggcgcaaaacttaaatatttcacgcaaagaggccgctgaattcatcgagcgctacttcgaaagcttccctggcgtgaagcggtatatggaaaacattgtgcaagaagcaaaacagaaagggtatgtgacgacgctgctgcatcggcgccgctatttgccggatatcacgatgcgcaacttcaacgtccgcagctttgctgaacggatggcgatgaacacgccgattcaagggagcgccgctgacattattaaaaaggcgatgatcgatctgaacgctagactgaaggaagagcggctgcaagcgcgccttttgctacaggtgcatgacgagctcattttggaggcgccgaaagaagagatggagcggctgtgccggctcgttccggaagtgatggagcaagcggtcacacttcgcgtgccgctcaaagtcgattaccattatggctcgacgtggtatgacgcgaaataaaaaggatcc

SEQ ID NO: 2420 - DNA, 2712 bp, Artificial Sequence
  Description of Artificial Sequence: Synthetic DNA sequence of Bacillus caldolyticus EA1 DNA polymerase S802T
atgaaatacctgctgccgaccgctgctgctggtctgctgctcctcgctgcccagccggcgatggccatgggattgaaaaaaaagcttgttttaatcgacggcagcagcgtggcgtaccgcgcctttttcgccttgccgcttttgcataacgacaaaggcatccatacgaacgccgtctacgggtttacgatgatgttgaataaaattttggcggaagaagagccaactcatatgcttgtcgcgtttgacgccgggaaaacgacgttccggcatgaagcgtttcaagagtataaaggtgggcgccagcagacgccaccggagctgtcggagcagtttccgctgttgcgcgagctgctgagggcgtatcgcatccccgcctatgaactcgagaactacgaagcggacgatattatcggaacgcttgccgcccgcgctgagcaggaagggtttgaggtgaaagtcatttccggcgaccgcgatctgacccagctcgcctccccccatgtgacggtggacattacgaaaaaagggattaccgatatcgaaccgtacacgccggaggcggtccgcgaaaaatacggcttaactccggaacaaatcgttgatttgaaaggattgatgggcgacaaatcggacaacattcccggagtgccgggcatcggggaaaagacggcggtcaagctgctcaagcaattcggcacggtcgaaaacgtgcttgcctccattgacgagatcaaaggcgaaaagttgaaagaaacgctgcgccaacaccgggagatggcgctgttaagcaaaaagctcgccgccattcgccgcgacgccccggtcgagctctcgcttgatgacatcgtctatcaaggggaagaccgggagaaagtggtcgctttatttaaagagcttgggtttcaatcgtttttagagaaaatggaatcgccgtcatcagaagaggaaaaaccgcttgccaagatggcatttacgcttgctgaccgcgtgacggaggagatgcttgccgacaaggcggcgcttgtcgttgaagtggtcgaggaaaattatcatgatgcgccgatcgtcggcatcgctgtggtcaacgaacatggacggtttttcctgcgcccggagacggcgcttgccgatccgcagtttgtcgcctggcttggtgatgaaacgaagaaaaaaagcatgtttgactcaaagcgcgcggcagtcgccttgaaatggaaaggaattgagctatgcggcgtttcctttgatttattgctggccgcctatttgcttgatccggcgcaaggtgttgatgatgtggctgccgcagcaaaaatgaagcaatacgaagcggtgcgctcggatgaagcggtgtatggcaaaggggcgaagcgggccgtgccggatgagccagtgctcgccgagcatctcgtccgcaaggcggcggcgatttgggcgctcgaacgtccgtttttggatgagctgcgccgcaacgaacaagatcggttgctcgtcgagctcgagcagccgttgtcttcgattttggcggaaatggaatttgccggagtgaaagtggatacgaagcggctcgaacagatgggcgaagagctcgccgagcagctgcgcacggtcgagcagcgcatttatgagctcgccggccaagaattcaacatcaattcaccgaaacagctcggcgtcattttatttgaaaaactgcagctgcccgtcttgaaaaaaacgaaaaccggctactccacttcggcggatgtgcttgaaaaacttgcgccttatcacgagatcgtggaaaacattttgcattaccgccagcttggcaagttgcagtcgacgtatattgaaggattgctgaaagtcgtgcgacccgatacaaagaaggtgcatacgattttcaatcaggcgttgacgcaaaccggacggctcagctcgacggagccgaacttgcaaaacattccgattcggcttgaggaaggacggaaaatccgccaagcgttcgtgccgtcggagtctgattggctcattttcgctgccgactactcgcaaattgagttgcgcgtcctcgcccatattgcggaagatgacaatttaatggaagcgttccgccgcgatttggatatccatacgaaaacagcgatggacattttccaagtgagcgaggacgaagtgacgcccaacatgcgccgtcaggcgaaggcggtcaactttgggatcgtttacgggatcagtgattacggcttggcgcaaaacttaaatatttcacgcaaagaggccgctgaattcatcgagcgctacttcgaaagcttccctggcgtgaagcggtatatggaaaacattgtgcaagaagcaaaacagaaagggtatgtgacgacgctgctgcatcggcgccgctatttgccggatatcacgactcgcaacttcaacgtccgcagctttgctgaacggatggcgatgaacacgccgattcaagggagcgccgctgacattattaaaaaggcgatgatcgatctgaacgctagactgaaggaagagcggctgcaagcgcgccttttgctacaggtgcatgacgagctcattttggaggcgccgaaagaagagatggagcggctgtgccggctcgttccggaagtgatggagcaagcggtcacacttcgcgtgccgctcaaagtcgattaccattatggctcgacgtggtatgacgcgaaataaaaaggatcc

SEQ ID NO: 2421 - DNA, 2712 bp, Artificial Sequence
  Description of Artificial Sequence: Synthetic DNA sequence of Bacillus caldolyticus EA1 DNA polymerase S802N
atgaaatacctgctgccgaccgctgctgctggtctgctgctcctcgctgcccagccggcgatggccatgggattgaaaaaaaagcttgttttaatcgacggcagcagcgtggcgtaccgcgcctttttcgccttgccgcttttgcataacgacaaaggcatccatacgaacgccgtctacgggtttacgatgatgttgaataaaattttggcggaagaagagccaactcatatgcttgtcgcgtttgacgccgggaaaacgacgttccggcatgaagcgtttcaagagtataaaggtgggcgccagcagacgccaccggagctgtcggagcagtttccgctgttgcgcgagctgctgagggcgtatcgcatccccgcctatgaactcgagaactacgaagcggacgatattatcggaacgcttgccgcccgcgctgagcaggaagggtttgaggtgaaagtcatttccggcgaccgcgatctgacccagctcgcctccccccatgtgacggtggacattacgaaaaaagggattaccgatatcgaaccgtacacgccggaggcggtccgcgaaaaatacggcttaactccggaacaaatcgttgatttgaaaggattgatgggcgacaaatcggacaacattcccggagtgccgggcatcggggaaaagacggcggtcaagctgctcaagcaattcggcacggtcgaaaacgtgcttgcctccattgacgagatcaaaggcgaaaagttgaaagaaacgctgcgccaacaccgggagatggcgctgttaagcaaaaagctcgccgccattcgccgcgacgccccggtcgagctctcgcttgatgacatcgtctatcaaggggaagaccgggagaaagtggtcgctttatttaaagagcttgggtttcaatcgtttttagagaaaatggaatcgccgtcatcagaagaggaaaaaccgcttgccaagatggcatttacgcttgctgaccgcgtgacggaggagatgcttgccgacaaggcggcgcttgtcgttgaagtggtcgaggaaaattatcatgatgcgccgatcgtcggcatcgctgtggtcaacgaacatggacggtttttcctgcgcccggagacggcgcttgccgatccgcagtttgtcgcctggcttggtgatgaaacgaagaaaaaaagcatgtttgactcaaagcgcgcggcagtcgccttgaaatggaaaggaattgagctatgcggcgtttcctttgatttattgctggccgcctatttgcttgatccggcgcaaggtgttgatgatgtggctgccgcagcaaaaatgaagcaatacgaagcggtgcgctcggatgaagcggtgtatggcaaaggggcgaagcgggccgtgccggatgagccagtgctcgccgagcatctcgtccgcaaggcggcggcgatttgggcgctcgaacgtccgtttttggatgagctgcgccgcaacgaacaagatcggttgctcgtcgagctcgagcagccgttgtcttcgattttggcggaaatggaatttgccggagtgaaagtggatacgaagcggctcgaacagatgggcgaagagctcgccgagcagctgcgcacggtcgagcagcgcatttatgagctcgccggccaagaattcaacatcaattcaccgaaacagctcggcgtcattttatttgaaaaactgcagctgcccgtcttgaaaaaaacgaaaaccggctactccacttcggcggatgtgcttgaaaaacttgcgccttatcacgagatcgtggaaaacattttgcattaccgccagcttggcaagttgcagtcgacgtatattgaaggattgctgaaagtcgtgcgacccgatacaaagaaggtgcatacgattttcaatcaggcgttgacgcaaaccggacggctcagctcgacggagccgaacttgcaaaacattccgattcggcttgaggaaggacggaaaatccgccaagcgttcgtgccgtcggagtctgattggctcattttcgctgccgactactcgcaaattgagttgcgcgtcctcgcccatattgcggaagatgacaatttaatggaagcgttccgccgcgatttggatatccatacgaaaacagcgatggacattttccaagtgagcgaggacgaagtgacgcccaacatgcgccgtcaggcgaaggcggtcaactttgggatcgtttacgggatcagtgattacggcttggcgcaaaacttaaatatttcacgcaaagaggccgctgaattcatcgagcgctacttcgaaagcttccctggcgtgaagcggtatatggaaaacattgtgcaagaagcaaaacagaaagggtatgtgacgacgctgctgcatcggcgccgctatttgccggatatcacgaatcgcaacttcaacgtccgcagctttgctgaacggatggcgatgaacacgccgattcaagggagcgccgctgacattattaaaaaggcgatgatcgatctgaacgctagactgaaggaagagcggctgcaagcgcgccttttgctacaggtgcatgacgagctcattttggaggcgccgaaagaagagatggagcggctgtgccggctcgttccggaagtgatggagcaagcggtcacacttcgcgtgccgctcaaagtcgattaccattatggctcgacgtggtatgacgcgaaataaaaaggatcc

SEQ ID NO: 2422 - DNA, 2712 bp, Artificial Sequence
  Description of Artificial Sequence: Synthetic DNA sequence of Bacillus caldolyticus EA1 DNA polymerase S802V
atgaaatacctgctgccgaccgctgctgctggtctgctgctcctcgctgcccagccggcgatggccatgggattgaaaaaaaagcttgttttaatcgacggcagcagcgtggcgtaccgcgcctttttcgccttgccgcttttgcataacgacaaaggcatccatacgaacgccgtctacgggtttacgatgatgttgaataaaattttggcggaagaagagccaactcatatgcttgtcgcgtttgacgccgggaaaacgacgttccggcatgaagcgtttcaagagtataaaggtgggcgccagcagacgccaccggagctgtcggagcagtttccgctgttgcgcgagctgctgagggcgtatcgcatccccgcctatgaactcgagaactacgaagcggacgatattatcggaacgcttgccgcccgcgctgagcaggaagggtttgaggtgaaagtcatttccggcgaccgcgatctgacccagctcgcctccccccatgtgacggtggacattacgaaaaaagggattaccgatatcgaaccgtacacgccggaggcggtccgcgaaaaatacggcttaactccggaacaaatcgttgatttgaaaggattgatgggcgacaaatcggacaacattcccggagtgccgggcatcggggaaaagacggcggtcaagctgctcaagcaattcggcacggtcgaaaacgtgcttgcctccattgacgagatcaaaggcgaaaagttgaaagaaacgctgcgccaacaccgggagatggcgctgttaagcaaaaagctcgccgccattcgccgcgacgccccggtcgagctctcgcttgatgacatcgtctatcaaggggaagaccgggagaaagtggtcgctttatttaaagagcttgggtttcaatcgtttttagagaaaatggaatcgccgtcatcagaagaggaaaaaccgcttgccaagatggcatttacgcttgctgaccgcgtgacggaggagatgcttgccgacaaggcggcgcttgtcgttgaagtggtcgaggaaaattatcatgatgcgccgatcgtcggcatcgctgtggtcaacgaacatggacggtttttcctgcgcccggagacggcgcttgccgatccgcagtttgtcgcctggcttggtgatgaaacgaagaaaaaaagcatgtttgactcaaagcgcgcggcagtcgccttgaaatggaaaggaattgagctatgcggcgtttcctttgatttattgctggccgcctatttgcttgatccggcgcaaggtgttgatgatgtggctgccgcagcaaaaatgaagcaatacgaagcggtgcgctcggatgaagcggtgtatggcaaaggggcgaagcgggccgtgccggatgagccagtgctcgccgagcatctcgtccgcaaggcggcggcgatttgggcgctcgaacgtccgtttttggatgagctgcgccgcaacgaacaagatcggttgctcgtcgagctcgagcagccgttgtcttcgattttggcggaaatggaatttgccggagtgaaagtggatacgaagcggctcgaacagatgggcgaagagctcgccgagcagctgcgcacggtcgagcagcgcatttatgagctcgccggccaagaattcaacatcaattcaccgaaacagctcggcgtcattttatttgaaaaactgcagctgcccgtcttgaaaaaaacgaaaaccggctactccacttcggcggatgtgcttgaaaaacttgcgccttatcacgagatcgtggaaaacattttgcattaccgccagcttggcaagttgcagtcgacgtatattgaaggattgctgaaagtcgtgcgacccgatacaaagaaggtgcatacgattttcaatcaggcgttgacgcaaaccggacggctcagctcgacggagccgaacttgcaaaacattccgattcggcttgaggaaggacggaaaatccgccaagcgttcgtgccgtcggagtctgattggctcattttcgctgccgactactcgcaaattgagttgcgcgtcctcgcccatattgcggaagatgacaatttaatggaagcgttccgccgcgatttggatatccatacgaaaacagcgatggacattttccaagtgagcgaggacgaagtgacgcccaacatgcgccgtcaggcgaaggcggtcaactttgggatcgtttacgggatcagtgattacggcttggcgcaaaacttaaatatttcacgcaaagaggccgctgaattcatcgagcgctacttcgaaagcttccctggcgtgaagcggtatatggaaaacattgtgcaagaagcaaaacagaaagggtatgtgacgacgctgctgcatcggcgccgctatttgccggatatcacggtccgcaacttcaacgtccgcagctttgctgaacggatggcgatgaacacgccgattcaagggagcgccgctgacattattaaaaaggcgatgatcgatctgaacgctagactgaaggaagagcggctgcaagcgcgccttttgctacaggtgcatgacgagctcattttggaggcgccgaaagaagagatggagcggctgtgccggctcgttccggaagtgatggagcaagcggtcacacttcgcgtgccgctcaaagtcgattaccattatggctcgacgtggtatgacgcgaaataaaaaggatcc

SEQ ID NO: 2423 - DNA, 2712 bp, Artificial Sequence
  Description of Artificial Sequence: Synthetic DNA sequence of Bacillus caldolyticus EA1 DNA polymerase R803A
atgaaatacctgctgccgaccgctgctgctggtctgctgctcctcgctgcccagccggcgatggccatgggattgaaaaaaaagcttgttttaatcgacggcagcagcgtggcgtaccgcgcctttttcgccttgccgcttttgcataacgacaaaggcatccatacgaacgccgtctacgggtttacgatgatgttgaataaaattttggcggaagaagagccaactcatatgcttgtcgcgtttgacgccgggaaaacgacgttccggcatgaagcgtttcaagagtataaaggtgggcgccagcagacgccaccggagctgtcggagcagtttccgctgttgcgcgagctgctgagggcgtatcgcatccccgcctatgaactcgagaactacgaagcggacgatattatcggaacgcttgccgcccgcgctgagcaggaagggtttgaggtgaaagtcatttccggcgaccgcgatctgacccagctcgcctccccccatgtgacggtggacattacgaaaaaagggattaccgatatcgaaccgtacacgccggaggcggtccgcgaaaaatacggcttaactccggaacaaatcgttgatttgaaaggattgatgggcgacaaatcggacaacattcccggagtgccgggcatcggggaaaagacggcggtcaagctgctcaagcaattcggcacggtcgaaaacgtgcttgcctccattgacgagatcaaaggcgaaaagttgaaagaaacgctgcgccaacaccgggagatggcgctgttaagcaaaaagctcgccgccattcgccgcgacgccccggtcgagctctcgcttgatgacatcgtctatcaaggggaagaccgggagaaagtggtcgctttatttaaagagcttgggtttcaatcgtttttagagaaaatggaatcgccgtcatcagaagaggaaaaaccgcttgccaagatggcatttacgcttgctgaccgcgtgacggaggagatgcttgccgacaaggcggcgcttgtcgttgaagtggtcgaggaaaattatcatgatgcgccgatcgtcggcatcgctgtggtcaacgaacatggacggtttttcctgcgcccggagacggcgcttgccgatccgcagtttgtcgcctggcttggtgatgaaacgaagaaaaaaagcatgtttgactcaaagcgcgcggcagtcgccttgaaatggaaaggaattgagctatgcggcgtttcctttgatttattgctggccgcctatttgcttgatccggcgcaaggtgttgatgatgtggctgccgcagcaaaaatgaagcaatacgaagcggtgcgctcggatgaagcggtgtatggcaaaggggcgaagcgggccgtgccggatgagccagtgctcgccgagcatctcgtccgcaaggcggcggcgatttgggcgctcgaacgtccgtttttggatgagctgcgccgcaacgaacaagatcggttgctcgtcgagctcgagcagccgttgtcttcgattttggcggaaatggaatttgccggagtgaaagtggatacgaagcggctcgaacagatgggcgaagagctcgccgagcagctgcgcacggtcgagcagcgcatttatgagctcgccggccaagaattcaacatcaattcaccgaaacagctcggcgtcattttatttgaaaaactgcagctgcccgtcttgaaaaaaacgaaaaccggctactccacttcggcggatgtgcttgaaaaacttgcgccttatcacgagatcgtggaaaacattttgcattaccgccagcttggcaagttgcagtcgacgtatattgaaggattgctgaaagtcgtgcgacccgatacaaagaaggtgcatacgattttcaatcaggcgttgacgcaaaccggacggctcagctcgacggagccgaacttgcaaaacattccgattcggcttgaggaaggacggaaaatccgccaagcgttcgtgccgtcggagtctgattggctcattttcgctgccgactactcgcaaattgagttgcgcgtcctcgcccatattgcggaagatgacaatttaatggaagcgttccgccgcgatttggatatccatacgaaaacagcgatggacattttccaagtgagcgaggacgaagtgacgcccaacatgcgccgtcaggcgaaggcggtcaactttgggatcgtttacgggatcagtgattacggcttggcgcaaaacttaaatatttcacgcaaagaggccgctgaattcatcgagcgctacttcgaaagcttccctggcgtgaagcggtatatggaaaacattgtgcaagaagcaaaacagaaagggtatgtgacgacgctgctgcatcggcgccgctatttgccggatatcacgagcgctaacttcaacgtccgcagctttgctgaacggatggcgatgaacacgccgattcaagggagcgccgctgacattattaaaaaggcgatgatcgatctgaacgctagactgaaggaagagcggctgcaagcgcgccttttgctacaggtgcatgacgagctcattttggaggcgccgaaagaagagatggagcggctgtgccggctcgttccggaagtgatggagcaagcggtcacacttcgcgtgccgctcaaagtcgattaccattatggctcgacgtggtatgacgcgaaataaaaaggatcc

SEQ ID NO: 2424 - DNA, 2712 bp, Artificial Sequence
  Description of Artificial Sequence: Synthetic DNA sequence of Bacillus caldolyticus EA1 DNA polymerase R803C
atgaaatacctgctgccgaccgctgctgctggtctgctgctcctcgctgcccagccggcgatggccatgggattgaaaaaaaagcttgttttaatcgacggcagcagcgtggcgtaccgcgcctttttcgccttgccgcttttgcataacgacaaaggcatccatacgaacgccgtctacgggtttacgatgatgttgaataaaattttggcggaagaagagccaactcatatgcttgtcgcgtttgacgccgggaaaacgacgttccggcatgaagcgtttcaagagtataaaggtgggcgccagcagacgccaccggagctgtcggagcagtttccgctgttgcgcgagctgctgagggcgtatcgcatccccgcctatgaactcgagaactacgaagcggacgatattatcggaacgcttgccgcccgcgctgagcaggaagggtttgaggtgaaagtcatttccggcgaccgcgatctgacccagctcgcctccccccatgtgacggtggacattacgaaaaaagggattaccgatatcgaaccgtacacgccggaggcggtccgcgaaaaatacggcttaactccggaacaaatcgttgatttgaaaggattgatgggcgacaaatcggacaacattcccggagtgccgggcatcggggaaaagacggcggtcaagctgctcaagcaattcggcacggtcgaaaacgtgcttgcctccattgacgagatcaaaggcgaaaagttgaaagaaacgctgcgccaacaccgggagatggcgctgttaagcaaaaagctcgccgccattcgccgcgacgccccggtcgagctctcgcttgatgacatcgtctatcaaggggaagaccgggagaaagtggtcgctttatttaaagagcttgggtttcaatcgtttttagagaaaatggaatcgccgtcatcagaagaggaaaaaccgcttgccaagatggcatttacgcttgctgaccgcgtgacggaggagatgcttgccgacaaggcggcgcttgtcgttgaagtggtcgaggaaaattatcatgatgcgccgatcgtcggcatcgctgtggtcaacgaacatggacggtttttcctgcgcccggagacggcgcttgccgatccgcagtttgtcgcctggcttggtgatgaaacgaagaaaaaaagcatgtttgactcaaagcgcgcggcagtcgccttgaaatggaaaggaattgagctatgcggcgtttcctttgatttattgctggccgcctatttgcttgatccggcgcaaggtgttgatgatgtggctgccgcagcaaaaatgaagcaatacgaagcggtgcgctcggatgaagcggtgtatggcaaaggggcgaagcgggccgtgccggatgagccagtgctcgccgagcatctcgtccgcaaggcggcggcgatttgggcgctcgaacgtccgtttttggatgagctgcgccgcaacgaacaagatcggttgctcgtcgagctcgagcagccgttgtcttcgattttggcggaaatggaatttgccggagtgaaagtggatacgaagcggctcgaacagatgggcgaagagctcgccgagcagctgcgcacggtcgagcagcgcatttatgagctcgccggccaagaattcaacatcaattcaccgaaacagctcggcgtcattttatttgaaaaactgcagctgcccgtcttgaaaaaaacgaaaaccggctactccacttcggcggatgtgcttgaaaaacttgcgccttatcacgagatcgtggaaaacattttgcattaccgccagcttggcaagttgcagtcgacgtatattgaaggattgctgaaagtcgtgcgacccgatacaaagaaggtgcatacgattttcaatcaggcgttgacgcaaaccggacggctcagctcgacggagccgaacttgcaaaacattccgattcggcttgaggaaggacggaaaatccgccaagcgttcgtgccgtcggagtctgattggctcattttcgctgccgactactcgcaaattgagttgcgcgtcctcgcccatattgcggaagatgacaatttaatggaagcgttccgccgcgatttggatatccatacgaaaacagcgatggacattttccaagtgagcgaggacgaagtgacgcccaacatgcgccgtcaggcgaaggcggtcaactttgggatcgtttacgggatcagtgattacggcttggcgcaaaacttaaatatttcacgcaaagaggccgctgaattcatcgagcgctacttcgaaagcttccctggcgtgaagcggtatatggaaaacattgtgcaagaagcaaaacagaaagggtatgtgacgacgctgctgcatcggcgccgctatttgccggatatcacgagctgtaacttcaacgtccgcagctttgctgaacggatggcgatgaacacgccgattcaagggagcgccgctgacattattaaaaaggcgatgatcgatctgaacgctagactgaaggaagagcggctgcaagcgcgccttttgctacaggtgcatgacgagctcattttggaggcgccgaaagaagagatggagcggctgtgccggctcgttccggaagtgatggagcaagcggtcacacttcgcgtgccgctcaaagtcgattaccattatggctcgacgtggtatgacgcgaaataaaaaggatcc

SEQ ID NO: 2425 - DNA, 2712 bp, Artificial Sequence
  Description of Artificial Sequence: Synthetic DNA sequence of Bacillus caldolyticus EA1 DNA polymerase R803G
atgaaatacctgctgccgaccgctgctgctggtctgctgctcctcgctgcccagccggcgatggccatgggattgaaaaaaaagcttgttttaatcgacggcagcagcgtggcgtaccgcgcctttttcgccttgccgcttttgcataacgacaaaggcatccatacgaacgccgtctacgggtttacgatgatgttgaataaaattttggcggaagaagagccaactcatatgcttgtcgcgtttgacgccgggaaaacgacgttccggcatgaagcgtttcaagagtataaaggtgggcgccagcagacgccaccggagctgtcggagcagtttccgctgttgcgcgagctgctgagggcgtatcgcatccccgcctatgaactcgagaactacgaagcggacgatattatcggaacgcttgccgcccgcgctgagcaggaagggtttgaggtgaaagtcatttccggcgaccgcgatctgacccagctcgcctccccccatgtgacggtggacattacgaaaaaagggattaccgatatcgaaccgtacacgccggaggcggtccgcgaaaaatacggcttaactccggaacaaatcgttgatttgaaaggattgatgggcgacaaatcggacaacattcccggagtgccgggcatcggggaaaagacggcggtcaagctgctcaagcaattcggcacggtcgaaaacgtgcttgcctccattgacgagatcaaaggcgaaaagttgaaagaaacgctgcgccaacaccgggagatggcgctgttaagcaaaaagctcgccgccattcgccgcgacgccccggtcgagctctcgcttgatgacatcgtctatcaaggggaagaccgggagaaagtggtcgctttatttaaagagcttgggtttcaatcgtttttagagaaaatggaatcgccgtcatcagaagaggaaaaaccgcttgccaagatggcatttacgcttgctgaccgcgtgacggaggagatgcttgccgacaaggcggcgcttgtcgttgaagtggtcgaggaaaattatcatgatgcgccgatcgtcggcatcgctgtggtcaacgaacatggacggtttttcctgcgcccggagacggcgcttgccgatccgcagtttgtcgcctggcttggtgatgaaacgaagaaaaaaagcatgtttgactcaaagcgcgcggcagtcgccttgaaatggaaaggaattgagctatgcggcgtttcctttgatttattgctggccgcctatttgcttgatccggcgcaaggtgttgatgatgtggctgccgcagcaaaaatgaagcaatacgaagcggtgcgctcggatgaagcggtgtatggcaaaggggcgaagcgggccgtgccggatgagccagtgctcgccgagcatctcgtccgcaaggcggcggcgatttgggcgctcgaacgtccgtttttggatgagctgcgccgcaacgaacaagatcggttgctcgtcgagctcgagcagccgttgtcttcgattttggcggaaatggaatttgccggagtgaaagtggatacgaagcggctcgaacagatgggcgaagagctcgccgagcagctgcgcacggtcgagcagcgcatttatgagctcgccggccaagaattcaacatcaattcaccgaaacagctcggcgtcattttatttgaaaaactgcagctgcccgtcttgaaaaaaacgaaaaccggctactccacttcggcggatgtgcttgaaaaacttgcgccttatcacgagatcgtggaaaacattttgcattaccgccagcttggcaagttgcagtcgacgtatattgaaggattgctgaaagtcgtgcgacccgatacaaagaaggtgcatacgattttcaatcaggcgttgacgcaaaccggacggctcagctcgacggagccgaacttgcaaaacattccgattcggcttgaggaaggacggaaaatccgccaagcgttcgtgccgtcggagtctgattggctcattttcgctgccgactactcgcaaattgagttgcgcgtcctcgcccatattgcggaagatgacaatttaatggaagcgttccgccgcgatttggatatccatacgaaaacagcgatggacattttccaagtgagcgaggacgaagtgacgcccaacatgcgccgtcaggcgaaggcggtcaactttgggatcgtttacgggatcagtgattacggcttggcgcaaaacttaaatatttcacgcaaagaggccgctgaattcatcgagcgctacttcgaaagcttccctggcgtgaagcggtatatggaaaacattgtgcaagaagcaaaacagaaagggtatgtgacgacgctgctgcatcggcgccgctatttgccggatatcacgagcggtaacttcaacgtccgcagctttgctgaacggatggcgatgaacacgccgattcaagggagcgccgctgacattattaaaaaggcgatgatcgatctgaacgctagactgaaggaagagcggctgcaagcgcgccttttgctacaggtgcatgacgagctcattttggaggcgccgaaagaagagatggagcggctgtgccggctcgttccggaagtgatggagcaagcggtcacacttcgcgtgccgctcaaagtcgattaccattatggctcgacgtggtatgacgcgaaataaaaaggatcc

SEQ ID NO: 2426 - DNA, 2712 bp, Artificial Sequence
  Description of Artificial Sequence: Synthetic DNA sequence of Bacillus caldolyticus EA1 DNA polymerase R803Q
atgaaatacctgctgccgaccgctgctgctggtctgctgctcctcgctgcccagccggcgatggccatgggattgaaaaaaaagcttgttttaatcgacggcagcagcgtggcgtaccgcgcctttttcgccttgccgcttttgcataacgacaaaggcatccatacgaacgccgtctacgggtttacgatgatgttgaataaaattttggcggaagaagagccaactcatatgcttgtcgcgtttgacgccgggaaaacgacgttccggcatgaagcgtttcaagagtataaaggtgggcgccagcagacgccaccggagctgtcggagcagtttccgctgttgcgcgagctgctgagggcgtatcgcatccccgcctatgaactcgagaactacgaagcggacgatattatcggaacgcttgccgcccgcgctgagcaggaagggtttgaggtgaaagtcatttccggcgaccgcgatctgacccagctcgcctccccccatgtgacggtggacattacgaaaaaagggattaccgatatcgaaccgtacacgccggaggcggtccgcgaaaaatacggcttaactccggaacaaatcgttgatttgaaaggattgatgggcgacaaatcggacaacattcccggagtgccgggcatcggggaaaagacggcggtcaagctgctcaagcaattcggcacggtcgaaaacgtgcttgcctccattgacgagatcaaaggcgaaaagttgaaagaaacgctgcgccaacaccgggagatggcgctgttaagcaaaaagctcgccgccattcgccgcgacgccccggtcgagctctcgcttgatgacatcgtctatcaaggggaagaccgggagaaagtggtcgctttatttaaagagcttgggtttcaatcgtttttagagaaaatggaatcgccgtcatcagaagaggaaaaaccgcttgccaagatggcatttacgcttgctgaccgcgtgacggaggagatgcttgccgacaaggcggcgcttgtcgttgaagtggtcgaggaaaattatcatgatgcgccgatcgtcggcatcgctgtggtcaacgaacatggacggtttttcctgcgcccggagacggcgcttgccgatccgcagtttgtcgcctggcttggtgatgaaacgaagaaaaaaagcatgtttgactcaaagcgcgcggcagtcgccttgaaatggaaaggaattgagctatgcggcgtttcctttgatttattgctggccgcctatttgcttgatccggcgcaaggtgttgatgatgtggctgccgcagcaaaaatgaagcaatacgaagcggtgcgctcggatgaagcggtgtatggcaaaggggcgaagcgggccgtgccggatgagccagtgctcgccgagcatctcgtccgcaaggcggcggcgatttgggcgctcgaacgtccgtttttggatgagctgcgccgcaacgaacaagatcggttgctcgtcgagctcgagcagccgttgtcttcgattttggcggaaatggaatttgccggagtgaaagtggatacgaagcggctcgaacagatgggcgaagagctcgccgagcagctgcgcacggtcgagcagcgcatttatgagctcgccggccaagaattcaacatcaattcaccgaaacagctcggcgtcattttatttgaaaaactgcagctgcccgtcttgaaaaaaacgaaaaccggctactccacttcggcggatgtgcttgaaaaacttgcgccttatcacgagatcgtggaaaacattttgcattaccgccagcttggcaagttgcagtcgacgtatattgaaggattgctgaaagtcgtgcgacccgatacaaagaaggtgcatacgattttcaatcaggcgttgacgcaaaccggacggctcagctcgacggagccgaacttgcaaaacattccgattcggcttgaggaaggacggaaaatccgccaagcgttcgtgccgtcggagtctgattggctcattttcgctgccgactactcgcaaattgagttgcgcgtcctcgcccatattgcggaagatgacaatttaatggaagcgttccgccgcgatttggatatccatacgaaaacagcgatggacattttccaagtgagcgaggacgaagtgacgcccaacatgcgccgtcaggcgaaggcggtcaactttgggatcgtttacgggatcagtgattacggcttggcgcaaaacttaaatatttcacgcaaagaggccgctgaattcatcgagcgctacttcgaaagcttccctggcgtgaagcggtatatggaaaacattgtgcaagaagcaaaacagaaagggtatgtgacgacgctgctgcatcggcgccgctatttgccggatatcacgagccaaaacttcaacgtccgcagctttgctgaacggatggcgatgaacacgccgattcaagggagcgccgctgacattattaaaaaggcgatgatcgatctgaacgctagactgaaggaagagcggctgcaagcgcgccttttgctacaggtgcatgacgagctcattttggaggcgccgaaagaagagatggagcggctgtgccggctcgttccggaagtgatggagcaagcggtcacacttcgcgtgccgctcaaagtcgattaccattatggctcgacgtggtatgacgcgaaataaaaaggatcc

SEQ ID NO: 2427 - DNA, 2712 bp, Artificial Sequence
  Description of Artificial Sequence: Synthetic DNA sequence of Bacillus caldolyticus EA1 DNA polymerase R803H
atgaaatacctgctgccgaccgctgctgctggtctgctgctcctcgctgcccagccggcgatggccatgggattgaaaaaaaagcttgttttaatcgacggcagcagcgtggcgtaccgcgcctttttcgccttgccgcttttgcataacgacaaaggcatccatacgaacgccgtctacgggtttacgatgatgttgaataaaattttggcggaagaagagccaactcatatgcttgtcgcgtttgacgccgggaaaacgacgttccggcatgaagcgtttcaagagtataaaggtgggcgccagcagacgccaccggagctgtcggagcagtttccgctgttgcgcgagctgctgagggcgtatcgcatccccgcctatgaactcgagaactacgaagcggacgatattatcggaacgcttgccgcccgcgctgagcaggaagggtttgaggtgaaagtcatttccggcgaccgcgatctgacccagctcgcctccccccatgtgacggtggacattacgaaaaaagggattaccgatatcgaaccgtacacgccggaggcggtccgcgaaaaatacggcttaactccggaacaaatcgttgatttgaaaggattgatgggcgacaaatcggacaacattcccggagtgccgggcatcggggaaaagacggcggtcaagctgctcaagcaattcggcacggtcgaaaacgtgcttgcctccattgacgagatcaaaggcgaaaagttgaaagaaacgctgcgccaacaccgggagatggcgctgttaagcaaaaagctcgccgccattcgccgcgacgccccggtcgagctctcgcttgatgacatcgtctatcaaggggaagaccgggagaaagtggtcgctttatttaaagagcttgggtttcaatcgtttttagagaaaatggaatcgccgtcatcagaagaggaaaaaccgcttgccaagatggcatttacgcttgctgaccgcgtgacggaggagatgcttgccgacaaggcggcgcttgtcgttgaagtggtcgaggaaaattatcatgatgcgccgatcgtcggcatcgctgtggtcaacgaacatggacggtttttcctgcgcccggagacggcgcttgccgatccgcagtttgtcgcctggcttggtgatgaaacgaagaaaaaaagcatgtttgactcaaagcgcgcggcagtcgccttgaaatggaaaggaattgagctatgcggcgtttcctttgatttattgctggccgcctatttgcttgatccggcgcaaggtgttgatgatgtggctgccgcagcaaaaatgaagcaatacgaagcggtgcgctcggatgaagcggtgtatggcaaaggggcgaagcgggccgtgccggatgagccagtgctcgccgagcatctcgtccgcaaggcggcggcgatttgggcgctcgaacgtccgtttttggatgagctgcgccgcaacgaacaagatcggttgctcgtcgagctcgagcagccgttgtcttcgattttggcggaaatggaatttgccggagtgaaagtggatacgaagcggctcgaacagatgggcgaagagctcgccgagcagctgcgcacggtcgagcagcgcatttatgagctcgccggccaagaattcaacatcaattcaccgaaacagctcggcgtcattttatttgaaaaactgcagctgcccgtcttgaaaaaaacgaaaaccggctactccacttcggcggatgtgcttgaaaaacttgcgccttatcacgagatcgtggaaaacattttgcattaccgccagcttggcaagttgcagtcgacgtatattgaaggattgctgaaagtcgtgcgacccgatacaaagaaggtgcatacgattttcaatcaggcgttgacgcaaaccggacggctcagctcgacggagccgaacttgcaaaacattccgattcggcttgaggaaggacggaaaatccgccaagcgttcgtgccgtcggagtctgattggctcattttcgctgccgactactcgcaaattgagttgcgcgtcctcgcccatattgcggaagatgacaatttaatggaagcgttccgccgcgatttggatatccatacgaaaacagcgatggacattttccaagtgagcgaggacgaagtgacgcccaacatgcgccgtcaggcgaaggcggtcaactttgggatcgtttacgggatcagtgattacggcttggcgcaaaacttaaatatttcacgcaaagaggccgctgaattcatcgagcgctacttcgaaagcttccctggcgtgaagcggtatatggaaaacattgtgcaagaagcaaaacagaaagggtatgtgacgacgctgctgcatcggcgccgctatttgccggatatcacgagccataacttcaacgtccgcagctttgctgaacggatggcgatgaacacgccgattcaagggagcgccgctgacattattaaaaaggcgatgatcgatctgaacgctagactgaaggaagagcggctgcaagcgcgccttttgctacaggtgcatgacgagctcattttggaggcgccgaaagaagagatggagcggctgtgccggctcgttccggaagtgatggagcaagcggtcacacttcgcgtgccgctcaaagtcgattaccattatggctcgacgtggtatgacgcgaaataaaaaggatcc

SEQ ID NO: 2428 - DNA, 2712 bp, Artificial Sequence
  Description of Artificial Sequence: Synthetic DNA sequence of Bacillus caldolyticus EA1 DNA polymerase R803I
atgaaatacctgctgccgaccgctgctgctggtctgctgctcctcgctgcccagccggcgatggccatgggattgaaaaaaaagcttgttttaatcgacggcagcagcgtggcgtaccgcgcctttttcgccttgccgcttttgcataacgacaaaggcatccatacgaacgccgtctacgggtttacgatgatgttgaataaaattttggcggaagaagagccaactcatatgcttgtcgcgtttgacgccgggaaaacgacgttccggcatgaagcgtttcaagagtataaaggtgggcgccagcagacgccaccggagctgtcggagcagtttccgctgttgcgcgagctgctgagggcgtatcgcatccccgcctatgaactcgagaactacgaagcggacgatattatcggaacgcttgccgcccgcgctgagcaggaagggtttgaggtgaaagtcatttccggcgaccgcgatctgacccagctcgcctccccccatgtgacggtggacattacgaaaaaagggattaccgatatcgaaccgtacacgccggaggcggtccgcgaaaaatacggcttaactccggaacaaatcgttgatttgaaaggattgatgggcgacaaatcggacaacattcccggagtgccgggcatcggggaaaagacggcggtcaagctgctcaagcaattcggcacggtcgaaaacgtgcttgcctccattgacgagatcaaaggcgaaaagttgaaagaaacgctgcgccaacaccgggagatggcgctgttaagcaaaaagctcgccgccattcgccgcgacgccccggtcgagctctcgcttgatgacatcgtctatcaaggggaagaccgggagaaagtggtcgctttatttaaagagcttgggtttcaatcgtttttagagaaaatggaatcgccgtcatcagaagaggaaaaaccgcttgccaagatggcatttacgcttgctgaccgcgtgacggaggagatgcttgccgacaaggcggcgcttgtcgttgaagtggtcgaggaaaattatcatgatgcgccgatcgtcggcatcgctgtggtcaacgaacatggacggtttttcctgcgcccggagacggcgcttgccgatccgcagtttgtcgcctggcttggtgatgaaacgaagaaaaaaagcatgtttgactcaaagcgcgcggcagtcgccttgaaatggaaaggaattgagctatgcggcgtttcctttgatttattgctggccgcctatttgcttgatccggcgcaaggtgttgatgatgtggctgccgcagcaaaaatgaagcaatacgaagcggtgcgctcggatgaagcggtgtatggcaaaggggcgaagcgggccgtgccggatgagccagtgctcgccgagcatctcgtccgcaaggcggcggcgatttgggcgctcgaacgtccgtttttggatgagctgcgccgcaacgaacaagatcggttgctcgtcgagctcgagcagccgttgtcttcgattttggcggaaatggaatttgccggagtgaaagtggatacgaagcggctcgaacagatgggcgaagagctcgccgagcagctgcgcacggtcgagcagcgcatttatgagctcgccggccaagaattcaacatcaattcaccgaaacagctcggcgtcattttatttgaaaaactgcagctgcccgtcttgaaaaaaacgaaaaccggctactccacttcggcggatgtgcttgaaaaacttgcgccttatcacgagatcgtggaaaacattttgcattaccgccagcttggcaagttgcagtcgacgtatattgaaggattgctgaaagtcgtgcgacccgatacaaagaaggtgcatacgattttcaatcaggcgttgacgcaaaccggacggctcagctcgacggagccgaacttgcaaaacattccgattcggcttgaggaaggacggaaaatccgccaagcgttcgtgccgtcggagtctgattggctcattttcgctgccgactactcgcaaattgagttgcgcgtcctcgcccatattgcggaagatgacaatttaatggaagcgttccgccgcgatttggatatccatacgaaaacagcgatggacattttccaagtgagcgaggacgaagtgacgcccaacatgcgccgtcaggcgaaggcggtcaactttgggatcgtttacgggatcagtgattacggcttggcgcaaaacttaaatatttcacgcaaagaggccgctgaattcatcgagcgctacttcgaaagcttccctggcgtgaagcggtatatggaaaacattgtgcaagaagcaaaacagaaagggtatgtgacgacgctgctgcatcggcgccgctatttgccggatatcacgagcattaacttcaacgtccgcagctttgctgaacggatggcgatgaacacgccgattcaagggagcgccgctgacattattaaaaaggcgatgatcgatctgaacgctagactgaaggaagagcggctgcaagcgcgccttttgctacaggtgcatgacgagctcattttggaggcgccgaaagaagagatggagcggctgtgccggctcgttccggaagtgatggagcaagcggtcacacttcgcgtgccgctcaaagtcgattaccattatggctcgacgtggtatgacgcgaaataaaaaggatcc

SEQ ID NO: 2429 - DNA, 2712 bp, Artificial Sequence
  Description of Artificial Sequence: Synthetic DNA sequence of Bacillus caldolyticus EA1 DNA polymerase R803L
atgaaatacctgctgccgaccgctgctgctggtctgctgctcctcgctgcccagccggcgatggccatgggattgaaaaaaaagcttgttttaatcgacggcagcagcgtggcgtaccgcgcctttttcgccttgccgcttttgcataacgacaaaggcatccatacgaacgccgtctacgggtttacgatgatgttgaataaaattttggcggaagaagagccaactcatatgcttgtcgcgtttgacgccgggaaaacgacgttccggcatgaagcgtttcaagagtataaaggtgggcgccagcagacgccaccggagctgtcggagcagtttccgctgttgcgcgagctgctgagggcgtatcgcatccccgcctatgaactcgagaactacgaagcggacgatattatcggaacgcttgccgcccgcgctgagcaggaagggtttgaggtgaaagtcatttccggcgaccgcgatctgacccagctcgcctccccccatgtgacggtggacattacgaaaaaagggattaccgatatcgaaccgtacacgccggaggcggtccgcgaaaaatacggcttaactccggaacaaatcgttgatttgaaaggattgatgggcgacaaatcggacaacattcccggagtgccgggcatcggggaaaagacggcggtcaagctgctcaagcaattcggcacggtcgaaaacgtgcttgcctccattgacgagatcaaaggcgaaaagttgaaagaaacgctgcgccaacaccgggagatggcgctgttaagcaaaaagctcgccgccattcgccgcgacgccccggtcgagctctcgcttgatgacatcgtctatcaaggggaagaccgggagaaagtggtcgctttatttaaagagcttgggtttcaatcgtttttagagaaaatggaatcgccgtcatcagaagaggaaaaaccgcttgccaagatggcatttacgcttgctgaccgcgtgacggaggagatgcttgccgacaaggcggcgcttgtcgttgaagtggtcgaggaaaattatcatgatgcgccgatcgtcggcatcgctgtggtcaacgaacatggacggtttttcctgcgcccggagacggcgcttgccgatccgcagtttgtcgcctggcttggtgatgaaacgaagaaaaaaagcatgtttgactcaaagcgcgcggcagtcgccttgaaatggaaaggaattgagctatgcggcgtttcctttgatttattgctggccgcctatttgcttgatccggcgcaaggtgttgatgatgtggctgccgcagcaaaaatgaagcaatacgaagcggtgcgctcggatgaagcggtgtatggcaaaggggcgaagcgggccgtgccggatgagccagtgctcgccgagcatctcgtccgcaaggcggcggcgatttgggcgctcgaacgtccgtttttggatgagctgcgccgcaacgaacaagatcggttgctcgtcgagctcgagcagccgttgtcttcgattttggcggaaatggaatttgccggagtgaaagtggatacgaagcggctcgaacagatgggcgaagagctcgccgagcagctgcgcacggtcgagcagcgcatttatgagctcgccggccaagaattcaacatcaattcaccgaaacagctcggcgtcattttatttgaaaaactgcagctgcccgtcttgaaaaaaacgaaaaccggctactccacttcggcggatgtgcttgaaaaacttgcgccttatcacgagatcgtggaaaacattttgcattaccgccagcttggcaagttgcagtcgacgtatattgaaggattgctgaaagtcgtgcgacccgatacaaagaaggtgcatacgattttcaatcaggcgttgacgcaaaccggacggctcagctcgacggagccgaacttgcaaaacattccgattcggcttgaggaaggacggaaaatccgccaagcgttcgtgccgtcggagtctgattggctcattttcgctgccgactactcgcaaattgagttgcgcgtcctcgcccatattgcggaagatgacaatttaatggaagcgttccgccgcgatttggatatccatacgaaaacagcgatggacattttccaagtgagcgaggacgaagtgacgcccaacatgcgccgtcaggcgaaggcggtcaactttgggatcgtttacgggatcagtgattacggcttggcgcaaaacttaaatatttcacgcaaagaggccgctgaattcatcgagcgctacttcgaaagcttccctggcgtgaagcggtatatggaaaacattgtgcaagaagcaaaacagaaagggtatgtgacgacgctgctgcatcggcgccgctatttgccggatatcacgagcttaaacttcaacgtccgcagctttgctgaacggatggcgatgaacacgccgattcaagggagcgccgctgacattattaaaaaggcgatgatcgatctgaacgctagactgaaggaagagcggctgcaagcgcgccttttgctacaggtgcatgacgagctcattttggaggcgccgaaagaagagatggagcggctgtgccggctcgttccggaagtgatggagcaagcggtcacacttcgcgtgccgctcaaagtcgattaccattatggctcgacgtggtatgacgcgaaataaaaaggatcc

SEQ ID NO: 2430 - DNA, 2712 bp, Artificial Sequence
  Description of Artificial Sequence: Synthetic DNA sequence of Bacillus caldolyticus EA1 DNA polymerase R803K
atgaaatacctgctgccgaccgctgctgctggtctgctgctcctcgctgcccagccggcgatggccatgggattgaaaaaaaagcttgttttaatcgacggcagcagcgtggcgtaccgcgcctttttcgccttgccgcttttgcataacgacaaaggcatccatacgaacgccgtctacgggtttacgatgatgttgaataaaattttggcggaagaagagccaactcatatgcttgtcgcgtttgacgccgggaaaacgacgttccggcatgaagcgtttcaagagtataaaggtgggcgccagcagacgccaccggagctgtcggagcagtttccgctgttgcgcgagctgctgagggcgtatcgcatccccgcctatgaactcgagaactacgaagcggacgatattatcggaacgcttgccgcccgcgctgagcaggaagggtttgaggtgaaagtcatttccggcgaccgcgatctgacccagctcgcctccccccatgtgacggtggacattacgaaaaaagggattaccgatatcgaaccgtacacgccggaggcggtccgcgaaaaatacggcttaactccggaacaaatcgttgatttgaaaggattgatgggcgacaaatcggacaacattcccggagtgccgggcatcggggaaaagacggcggtcaagctgctcaagcaattcggcacggtcgaaaacgtgcttgcctccattgacgagatcaaaggcgaaaagttgaaagaaacgctgcgccaacaccgggagatggcgctgttaagcaaaaagctcgccgccattcgccgcgacgccccggtcgagctctcgcttgatgacatcgtctatcaaggggaagaccgggagaaagtggtcgctttatttaaagagcttgggtttcaatcgtttttagagaaaatggaatcgccgtcatcagaagaggaaaaaccgcttgccaagatggcatttacgcttgctgaccgcgtgacggaggagatgcttgccgacaaggcggcgcttgtcgttgaagtggtcgaggaaaattatcatgatgcgccgatcgtcggcatcgctgtggtcaacgaacatggacggtttttcctgcgcccggagacggcgcttgccgatccgcagtttgtcgcctggcttggtgatgaaacgaagaaaaaaagcatgtttgactcaaagcgcgcggcagtcgccttgaaatggaaaggaattgagctatgcggcgtttcctttgatttattgctggccgcctatttgcttgatccggcgcaaggtgttgatgatgtggctgccgcagcaaaaatgaagcaatacgaagcggtgcgctcggatgaagcggtgtatggcaaaggggcgaagcgggccgtgccggatgagccagtgctcgccgagcatctcgtccgcaaggcggcggcgatttgggcgctcgaacgtccgtttttggatgagctgcgccgcaacgaacaagatcggttgctcgtcgagctcgagcagccgttgtcttcgattttggcggaaatggaatttgccggagtgaaagtggatacgaagcggctcgaacagatgggcgaagagctcgccgagcagctgcgcacggtcgagcagcgcatttatgagctcgccggccaagaattcaacatcaattcaccgaaacagctcggcgtcattttatttgaaaaactgcagctgcccgtcttgaaaaaaacgaaaaccggctactccacttcggcggatgtgcttgaaaaacttgcgccttatcacgagatcgtggaaaacattttgcattaccgccagcttggcaagttgcagtcgacgtatattgaaggattgctgaaagtcgtgcgacccgatacaaagaaggtgcatacgattttcaatcaggcgttgacgcaaaccggacggctcagctcgacggagccgaacttgcaaaacattccgattcggcttgaggaaggacggaaaatccgccaagcgttcgtgccgtcggagtctgattggctcattttcgctgccgactactcgcaaattgagttgcgcgtcctcgcccatattgcggaagatgacaatttaatggaagcgttccgccgcgatttggatatccatacgaaaacagcgatggacattttccaagtgagcgaggacgaagtgacgcccaacatgcgccgtcaggcgaaggcggtcaactttgggatcgtttacgggatcagtgattacggcttggcgcaaaacttaaatatttcacgcaaagaggccgctgaattcatcgagcgctacttcgaaagcttccctggcgtgaagcggtatatggaaaacattgtgcaagaagcaaaacagaaagggtatgtgacgacgctgctgcatcggcgccgctatttgccggatatcacgagcaaaaacttcaacgtccgcagctttgctgaacggatggcgatgaacacgccgattcaagggagcgccgctgacattattaaaaaggcgatgatcgatctgaacgctagactgaaggaagagcggctgcaagcgcgccttttgctacaggtgcatgacgagctcattttggaggcgccgaaagaagagatggagcggctgtgccggctcgttccggaagtgatggagcaagcggtcacacttcgcgtgccgctcaaagtcgattaccattatggctcgacgtggtatgacgcgaaataaaaaggatcc

SEQ ID NO: 2431 - DNA, 2712 bp, Artificial Sequence
  Description of Artificial Sequence: Synthetic DNA sequence of Bacillus caldolyticus EA1 DNA polymerase R803E
atgaaatacctgctgccgaccgctgctgctggtctgctgctcctcgctgcccagccggcgatggccatgggattgaaaaaaaagcttgttttaatcgacggcagcagcgtggcgtaccgcgcctttttcgccttgccgcttttgcataacgacaaaggcatccatacgaacgccgtctacgggtttacgatgatgttgaataaaattttggcggaagaagagccaactcatatgcttgtcgcgtttgacgccgggaaaacgacgttccggcatgaagcgtttcaagagtataaaggtgggcgccagcagacgccaccggagctgtcggagcagtttccgctgttgcgcgagctgctgagggcgtatcgcatccccgcctatgaactcgagaactacgaagcggacgatattatcggaacgcttgccgcccgcgctgagcaggaagggtttgaggtgaaagtcatttccggcgaccgcgatctgacccagctcgcctccccccatgtgacggtggacattacgaaaaaagggattaccgatatcgaaccgtacacgccggaggcggtccgcgaaaaatacggcttaactccggaacaaatcgttgatttgaaaggattgatgggcgacaaatcggacaacattcccggagtgccgggcatcggggaaaagacggcggtcaagctgctcaagcaattcggcacggtcgaaaacgtgcttgcctccattgacgagatcaaaggcgaaaagttgaaagaaacgctgcgccaacaccgggagatggcgctgttaagcaaaaagctcgccgccattcgccgcgacgccccggtcgagctctcgcttgatgacatcgtctatcaaggggaagaccgggagaaagtggtcgctttatttaaagagcttgggtttcaatcgtttttagagaaaatggaatcgccgtcatcagaagaggaaaaaccgcttgccaagatggcatttacgcttgctgaccgcgtgacggaggagatgcttgccgacaaggcggcgcttgtcgttgaagtggtcgaggaaaattatcatgatgcgccgatcgtcggcatcgctgtggtcaacgaacatggacggtttttcctgcgcccggagacggcgcttgccgatccgcagtttgtcgcctggcttggtgatgaaacgaagaaaaaaagcatgtttgactcaaagcgcgcggcagtcgccttgaaatggaaaggaattgagctatgcggcgtttcctttgatttattgctggccgcctatttgcttgatccggcgcaaggtgttgatgatgtggctgccgcagcaaaaatgaagcaatacgaagcggtgcgctcggatgaagcggtgtatggcaaaggggcgaagcgggccgtgccggatgagccagtgctcgccgagcatctcgtccgcaaggcggcggcgatttgggcgctcgaacgtccgtttttggatgagctgcgccgcaacgaacaagatcggttgctcgtcgagctcgagcagccgttgtcttcgattttggcggaaatggaatttgccggagtgaaagtggatacgaagcggctcgaacagatgggcgaagagctcgccgagcagctgcgcacggtcgagcagcgcatttatgagctcgccggccaagaattcaacatcaattcaccgaaacagctcggcgtcattttatttgaaaaactgcagctgcccgtcttgaaaaaaacgaaaaccggctactccacttcggcggatgtgcttgaaaaacttgcgccttatcacgagatcgtggaaaacattttgcattaccgccagcttggcaagttgcagtcgacgtatattgaaggattgctgaaagtcgtgcgacccgatacaaagaaggtgcatacgattttcaatcaggcgttgacgcaaaccggacggctcagctcgacggagccgaacttgcaaaacattccgattcggcttgaggaaggacggaaaatccgccaagcgttcgtgccgtcggagtctgattggctcattttcgctgccgactactcgcaaattgagttgcgcgtcctcgcccatattgcggaagatgacaatttaatggaagcgttccgccgcgatttggatatccatacgaaaacagcgatggacattttccaagtgagcgaggacgaagtgacgcccaacatgcgccgtcaggcgaaggcggtcaactttgggatcgtttacgggatcagtgattacggcttggcgcaaaacttaaatatttcacgcaaagaggccgctgaattcatcgagcgctacttcgaaagcttccctggcgtgaagcggtatatggaaaacattgtgcaagaagcaaaacagaaagggtatgtgacgacgctgctgcatcggcgccgctatttgccggatatcacgagcgaaaacttcaacgtccgcagctttgctgaacggatggcgatgaacacgccgattcaagggagcgccgctgacattattaaaaaggcgatgatcgatctgaacgctagactgaaggaagagcggctgcaagcgcgccttttgctacaggtgcatgacgagctcattttggaggcgccgaaagaagagatggagcggctgtgccggctcgttccggaagtgatggagcaagcggtcacacttcgcgtgccgctcaaagtcgattaccattatggctcgacgtggtatgacgcgaaataaaaaggatcc

SEQ ID NO: 2432 - DNA, 2712 bp, Artificial Sequence
  Description of Artificial Sequence: Synthetic DNA sequence of Bacillus caldolyticus EA1 DNA polymerase R803D
atgaaatacctgctgccgaccgctgctgctggtctgctgctcctcgctgcccagccggcgatggccatgggattgaaaaaaaagcttgttttaatcgacggcagcagcgtggcgtaccgcgcctttttcgccttgccgcttttgcataacgacaaaggcatccatacgaacgccgtctacgggtttacgatgatgttgaataaaattttggcggaagaagagccaactcatatgcttgtcgcgtttgacgccgggaaaacgacgttccggcatgaagcgtttcaagagtataaaggtgggcgccagcagacgccaccggagctgtcggagcagtttccgctgttgcgcgagctgctgagggcgtatcgcatccccgcctatgaactcgagaactacgaagcggacgatattatcggaacgcttgccgcccgcgctgagcaggaagggtttgaggtgaaagtcatttccggcgaccgcgatctgacccagctcgcctccccccatgtgacggtggacattacgaaaaaagggattaccgatatcgaaccgtacacgccggaggcggtccgcgaaaaatacggcttaactccggaacaaatcgttgatttgaaaggattgatgggcgacaaatcggacaacattcccggagtgccgggcatcggggaaaagacggcggtcaagctgctcaagcaattcggcacggtcgaaaacgtgcttgcctccattgacgagatcaaaggcgaaaagttgaaagaaacgctgcgccaacaccgggagatggcgctgttaagcaaaaagctcgccgccattcgccgcgacgccccggtcgagctctcgcttgatgacatcgtctatcaaggggaagaccgggagaaagtggtcgctttatttaaagagcttgggtttcaatcgtttttagagaaaatggaatcgccgtcatcagaagaggaaaaaccgcttgccaagatggcatttacgcttgctgaccgcgtgacggaggagatgcttgccgacaaggcggcgcttgtcgttgaagtggtcgaggaaaattatcatgatgcgccgatcgtcggcatcgctgtggtcaacgaacatggacggtttttcctgcgcccggagacggcgcttgccgatccgcagtttgtcgcctggcttggtgatgaaacgaagaaaaaaagcatgtttgactcaaagcgcgcggcagtcgccttgaaatggaaaggaattgagctatgcggcgtttcctttgatttattgctggccgcctatttgcttgatccggcgcaaggtgttgatgatgtggctgccgcagcaaaaatgaagcaatacgaagcggtgcgctcggatgaagcggtgtatggcaaaggggcgaagcgggccgtgccggatgagccagtgctcgccgagcatctcgtccgcaaggcggcggcgatttgggcgctcgaacgtccgtttttggatgagctgcgccgcaacgaacaagatcggttgctcgtcgagctcgagcagccgttgtcttcgattttggcggaaatggaatttgccggagtgaaagtggatacgaagcggctcgaacagatgggcgaagagctcgccgagcagctgcgcacggtcgagcagcgcatttatgagctcgccggccaagaattcaacatcaattcaccgaaacagctcggcgtcattttatttgaaaaactgcagctgcccgtcttgaaaaaaacgaaaaccggctactccacttcggcggatgtgcttgaaaaacttgcgccttatcacgagatcgtggaaaacattttgcattaccgccagcttggcaagttgcagtcgacgtatattgaaggattgctgaaagtcgtgcgacccgatacaaagaaggtgcatacgattttcaatcaggcgttgacgcaaaccggacggctcagctcgacggagccgaacttgcaaaacattccgattcggcttgaggaaggacggaaaatccgccaagcgttcgtgccgtcggagtctgattggctcattttcgctgccgactactcgcaaattgagttgcgcgtcctcgcccatattgcggaagatgacaatttaatggaagcgttccgccgcgatttggatatccatacgaaaacagcgatggacattttccaagtgagcgaggacgaagtgacgcccaacatgcgccgtcaggcgaaggcggtcaactttgggatcgtttacgggatcagtgattacggcttggcgcaaaacttaaatatttcacgcaaagaggccgctgaattcatcgagcgctacttcgaaagcttccctggcgtgaagcggtatatggaaaacattgtgcaagaagcaaaacagaaagggtatgtgacgacgctgctgcatcggcgccgctatttgccggatatcacgagcgataacttcaacgtccgcagctttgctgaacggatggcgatgaacacgccgattcaagggagcgccgctgacattattaaaaaggcgatgatcgatctgaacgctagactgaaggaagagcggctgcaagcgcgccttttgctacaggtgcatgacgagctcattttggaggcgccgaaagaagagatggagcggctgtgccggctcgttccggaagtgatggagcaagcggtcacacttcgcgtgccgctcaaagtcgattaccattatggctcgacgtggtatgacgcgaaataaaaaggatcc

SEQ ID NO: 2433 - DNA, 2712 bp, Artificial Sequence
  Description of Artificial Sequence: Synthetic DNA sequence of Bacillus caldolyticus EA1 DNA polymerase R803F
atgaaatacctgctgccgaccgctgctgctggtctgctgctcctcgctgcccagccggcgatggccatgggattgaaaaaaaagcttgttttaatcgacggcagcagcgtggcgtaccgcgcctttttcgccttgccgcttttgcataacgacaaaggcatccatacgaacgccgtctacgggtttacgatgatgttgaataaaattttggcggaagaagagccaactcatatgcttgtcgcgtttgacgccgggaaaacgacgttccggcatgaagcgtttcaagagtataaaggtgggcgccagcagacgccaccggagctgtcggagcagtttccgctgttgcgcgagctgctgagggcgtatcgcatccccgcctatgaactcgagaactacgaagcggacgatattatcggaacgcttgccgcccgcgctgagcaggaagggtttgaggtgaaagtcatttccggcgaccgcgatctgacccagctcgcctccccccatgtgacggtggacattacgaaaaaagggattaccgatatcgaaccgtacacgccggaggcggtccgcgaaaaatacggcttaactccggaacaaatcgttgatttgaaaggattgatgggcgacaaatcggacaacattcccggagtgccgggcatcggggaaaagacggcggtcaagctgctcaagcaattcggcacggtcgaaaacgtgcttgcctccattgacgagatcaaaggcgaaaagttgaaagaaacgctgcgccaacaccgggagatggcgctgttaagcaaaaagctcgccgccattcgccgcgacgccccggtcgagctctcgcttgatgacatcgtctatcaaggggaagaccgggagaaagtggtcgctttatttaaagagcttgggtttcaatcgtttttagagaaaatggaatcgccgtcatcagaagaggaaaaaccgcttgccaagatggcatttacgcttgctgaccgcgtgacggaggagatgcttgccgacaaggcggcgcttgtcgttgaagtggtcgaggaaaattatcatgatgcgccgatcgtcggcatcgctgtggtcaacgaacatggacggtttttcctgcgcccggagacggcgcttgccgatccgcagtttgtcgcctggcttggtgatgaaacgaagaaaaaaagcatgtttgactcaaagcgcgcggcagtcgccttgaaatggaaaggaattgagctatgcggcgtttcctttgatttattgctggccgcctatttgcttgatccggcgcaaggtgttgatgatgtggctgccgcagcaaaaatgaagcaatacgaagcggtgcgctcggatgaagcggtgtatggcaaaggggcgaagcgggccgtgccggatgagccagtgctcgccgagcatctcgtccgcaaggcggcggcgatttgggcgctcgaacgtccgtttttggatgagctgcgccgcaacgaacaagatcggttgctcgtcgagctcgagcagccgttgtcttcgattttggcggaaatggaatttgccggagtgaaagtggatacgaagcggctcgaacagatgggcgaagagctcgccgagcagctgcgcacggtcgagcagcgcatttatgagctcgccggccaagaattcaacatcaattcaccgaaacagctcggcgtcattttatttgaaaaactgcagctgcccgtcttgaaaaaaacgaaaaccggctactccacttcggcggatgtgcttgaaaaacttgcgccttatcacgagatcgtggaaaacattttgcattaccgccagcttggcaagttgcagtcgacgtatattgaaggattgctgaaagtcgtgcgacccgatacaaagaaggtgcatacgattttcaatcaggcgttgacgcaaaccggacggctcagctcgacggagccgaacttgcaaaacattccgattcggcttgaggaaggacggaaaatccgccaagcgttcgtgccgtcggagtctgattggctcattttcgctgccgactactcgcaaattgagttgcgcgtcctcgcccatattgcggaagatgacaatttaatggaagcgttccgccgcgatttggatatccatacgaaaacagcgatggacattttccaagtgagcgaggacgaagtgacgcccaacatgcgccgtcaggcgaaggcggtcaactttgggatcgtttacgggatcagtgattacggcttggcgcaaaacttaaatatttcacgcaaagaggccgctgaattcatcgagcgctacttcgaaagcttccctggcgtgaagcggtatatggaaaacattgtgcaagaagcaaaacagaaagggtatgtgacgacgctgctgcatcggcgccgctatttgccggatatcacgagctttaacttcaacgtccgcagctttgctgaacggatggcgatgaacacgccgattcaagggagcgccgctgacattattaaaaaggcgatgatcgatctgaacgctagactgaaggaagagcggctgcaagcgcgccttttgctacaggtgcatgacgagctcattttggaggcgccgaaagaagagatggagcggctgtgccggctcgttccggaagtgatggagcaagcggtcacacttcgcgtgccgctcaaagtcgattaccattatggctcgacgtggtatgacgcgaaataaaaaggatcc

SEQ ID NO: 2434 - DNA, 2712 bp, Artificial Sequence
  Description of Artificial Sequence: Synthetic DNA sequence of Bacillus caldolyticus EA1 DNA polymerase R803S
atgaaatacctgctgccgaccgctgctgctggtctgctgctcctcgctgcccagccggcgatggccatgggattgaaaaaaaagcttgttttaatcgacggcagcagcgtggcgtaccgcgcctttttcgccttgccgcttttgcataacgacaaaggcatccatacgaacgccgtctacgggtttacgatgatgttgaataaaattttggcggaagaagagccaactcatatgcttgtcgcgtttgacgccgggaaaacgacgttccggcatgaagcgtttcaagagtataaaggtgggcgccagcagacgccaccggagctgtcggagcagtttccgctgttgcgcgagctgctgagggcgtatcgcatccccgcctatgaactcgagaactacgaagcggacgatattatcggaacgcttgccgcccgcgctgagcaggaagggtttgaggtgaaagtcatttccggcgaccgcgatctgacccagctcgcctccccccatgtgacggtggacattacgaaaaaagggattaccgatatcgaaccgtacacgccggaggcggtccgcgaaaaatacggcttaactccggaacaaatcgttgatttgaaaggattgatgggcgacaaatcggacaacattcccggagtgccgggcatcggggaaaagacggcggtcaagctgctcaagcaattcggcacggtcgaaaacgtgcttgcctccattgacgagatcaaaggcgaaaagttgaaagaaacgctgcgccaacaccgggagatggcgctgttaagcaaaaagctcgccgccattcgccgcgacgccccggtcgagctctcgcttgatgacatcgtctatcaaggggaagaccgggagaaagtggtcgctttatttaaagagcttgggtttcaatcgtttttagagaaaatggaatcgccgtcatcagaagaggaaaaaccgcttgccaagatggcatttacgcttgctgaccgcgtgacggaggagatgcttgccgacaaggcggcgcttgtcgttgaagtggtcgaggaaaattatcatgatgcgccgatcgtcggcatcgctgtggtcaacgaacatggacggtttttcctgcgcccggagacggcgcttgccgatccgcagtttgtcgcctggcttggtgatgaaacgaagaaaaaaagcatgtttgactcaaagcgcgcggcagtcgccttgaaatggaaaggaattgagctatgcggcgtttcctttgatttattgctggccgcctatttgcttgatccggcgcaaggtgttgatgatgtggctgccgcagcaaaaatgaagcaatacgaagcggtgcgctcggatgaagcggtgtatggcaaaggggcgaagcgggccgtgccggatgagccagtgctcgccgagcatctcgtccgcaaggcggcggcgatttgggcgctcgaacgtccgtttttggatgagctgcgccgcaacgaacaagatcggttgctcgtcgagctcgagcagccgttgtcttcgattttggcggaaatggaatttgccggagtgaaagtggatacgaagcggctcgaacagatgggcgaagagctcgccgagcagctgcgcacggtcgagcagcgcatttatgagctcgccggccaagaattcaacatcaattcaccgaaacagctcggcgtcattttatttgaaaaactgcagctgcccgtcttgaaaaaaacgaaaaccggctactccacttcggcggatgtgcttgaaaaacttgcgccttatcacgagatcgtggaaaacattttgcattaccgccagcttggcaagttgcagtcgacgtatattgaaggattgctgaaagtcgtgcgacccgatacaaagaaggtgcatacgattttcaatcaggcgttgacgcaaaccggacggctcagctcgacggagccgaacttgcaaaacattccgattcggcttgaggaaggacggaaaatccgccaagcgttcgtgccgtcggagtctgattggctcattttcgctgccgactactcgcaaattgagttgcgcgtcctcgcccatattgcggaagatgacaatttaatggaagcgttccgccgcgatttggatatccatacgaaaacagcgatggacattttccaagtgagcgaggacgaagtgacgcccaacatgcgccgtcaggcgaaggcggtcaactttgggatcgtttacgggatcagtgattacggcttggcgcaaaacttaaatatttcacgcaaagaggccgctgaattcatcgagcgctacttcgaaagcttccctggcgtgaagcggtatatggaaaacattgtgcaagaagcaaaacagaaagggtatgtgacgacgctgctgcatcggcgccgctatttgccggatatcacgagctctaacttcaacgtccgcagctttgctgaacggatggcgatgaacacgccgattcaagggagcgccgctgacattattaaaaaggcgatgatcgatctgaacgctagactgaaggaagagcggctgcaagcgcgccttttgctacaggtgcatgacgagctcattttggaggcgccgaaagaagagatggagcggctgtgccggctcgttccggaagtgatggagcaagcggtcacacttcgcgtgccgctcaaagtcgattaccattatggctcgacgtggtatgacgcgaaataaaaaggatcc

SEQ ID NO: 2435 - DNA, 2712 bp, Artificial Sequence
  Description of Artificial Sequence: Synthetic DNA sequence of Bacillus caldolyticus EA1 DNA polymerase R803Y
atgaaatacctgctgccgaccgctgctgctggtctgctgctcctcgctgcccagccggcgatggccatgggattgaaaaaaaagcttgttttaatcgacggcagcagcgtggcgtaccgcgcctttttcgccttgccgcttttgcataacgacaaaggcatccatacgaacgccgtctacgggtttacgatgatgttgaataaaattttggcggaagaagagccaactcatatgcttgtcgcgtttgacgccgggaaaacgacgttccggcatgaagcgtttcaagagtataaaggtgggcgccagcagacgccaccggagctgtcggagcagtttccgctgttgcgcgagctgctgagggcgtatcgcatccccgcctatgaactcgagaactacgaagcggacgatattatcggaacgcttgccgcccgcgctgagcaggaagggtttgaggtgaaagtcatttccggcgaccgcgatctgacccagctcgcctccccccatgtgacggtggacattacgaaaaaagggattaccgatatcgaaccgtacacgccggaggcggtccgcgaaaaatacggcttaactccggaacaaatcgttgatttgaaaggattgatgggcgacaaatcggacaacattcccggagtgccgggcatcggggaaaagacggcggtcaagctgctcaagcaattcggcacggtcgaaaacgtgcttgcctccattgacgagatcaaaggcgaaaagttgaaagaaacgctgcgccaacaccgggagatggcgctgttaagcaaaaagctcgccgccattcgccgcgacgccccggtcgagctctcgcttgatgacatcgtctatcaaggggaagaccgggagaaagtggtcgctttatttaaagagcttgggtttcaatcgtttttagagaaaatggaatcgccgtcatcagaagaggaaaaaccgcttgccaagatggcatttacgcttgctgaccgcgtgacggaggagatgcttgccgacaaggcggcgcttgtcgttgaagtggtcgaggaaaattatcatgatgcgccgatcgtcggcatcgctgtggtcaacgaacatggacggtttttcctgcgcccggagacggcgcttgccgatccgcagtttgtcgcctggcttggtgatgaaacgaagaaaaaaagcatgtttgactcaaagcgcgcggcagtcgccttgaaatggaaaggaattgagctatgcggcgtttcctttgatttattgctggccgcctatttgcttgatccggcgcaaggtgttgatgatgtggctgccgcagcaaaaatgaagcaatacgaagcggtgcgctcggatgaagcggtgtatggcaaaggggcgaagcgggccgtgccggatgagccagtgctcgccgagcatctcgtccgcaaggcggcggcgatttgggcgctcgaacgtccgtttttggatgagctgcgccgcaacgaacaagatcggttgctcgtcgagctcgagcagccgttgtcttcgattttggcggaaatggaatttgccggagtgaaagtggatacgaagcggctcgaacagatgggcgaagagctcgccgagcagctgcgcacggtcgagcagcgcatttatgagctcgccggccaagaattcaacatcaattcaccgaaacagctcggcgtcattttatttgaaaaactgcagctgcccgtcttgaaaaaaacgaaaaccggctactccacttcggcggatgtgcttgaaaaacttgcgccttatcacgagatcgtggaaaacattttgcattaccgccagcttggcaagttgcagtcgacgtatattgaaggattgctgaaagtcgtgcgacccgatacaaagaaggtgcatacgattttcaatcaggcgttgacgcaaaccggacggctcagctcgacggagccgaacttgcaaaacattccgattcggcttgaggaaggacggaaaatccgccaagcgttcgtgccgtcggagtctgattggctcattttcgctgccgactactcgcaaattgagttgcgcgtcctcgcccatattgcggaagatgacaatttaatggaagcgttccgccgcgatttggatatccatacgaaaacagcgatggacattttccaagtgagcgaggacgaagtgacgcccaacatgcgccgtcaggcgaaggcggtcaactttgggatcgtttacgggatcagtgattacggcttggcgcaaaacttaaatatttcacgcaaagaggccgctgaattcatcgagcgctacttcgaaagcttccctggcgtgaagcggtatatggaaaacattgtgcaagaagcaaaacagaaagggtatgtgacgacgctgctgcatcggcgccgctatttgccggatatcacgagctataacttcaacgtccgcagctttgctgaacggatggcgatgaacacgccgattcaagggagcgccgctgacattattaaaaaggcgatgatcgatctgaacgctagactgaaggaagagcggctgcaagcgcgccttttgctacaggtgcatgacgagctcattttggaggcgccgaaagaagagatggagcggctgtgccggctcgttccggaagtgatggagcaagcggtcacacttcgcgtgccgctcaaagtcgattaccattatggctcgacgtggtatgacgcgaaataaaaaggatcc

SEQ ID NO: 2436 - DNA, 2712 bp, Artificial Sequence
  Description of Artificial Sequence: Synthetic DNA sequence of Bacillus caldolyticus EA1 DNA polymerase R803W
atgaaatacctgctgccgaccgctgctgctggtctgctgctcctcgctgcccagccggcgatggccatgggattgaaaaaaaagcttgttttaatcgacggcagcagcgtggcgtaccgcgcctttttcgccttgccgcttttgcataacgacaaaggcatccatacgaacgccgtctacgggtttacgatgatgttgaataaaattttggcggaagaagagccaactcatatgcttgtcgcgtttgacgccgggaaaacgacgttccggcatgaagcgtttcaagagtataaaggtgggcgccagcagacgccaccggagctgtcggagcagtttccgctgttgcgcgagctgctgagggcgtatcgcatccccgcctatgaactcgagaactacgaagcggacgatattatcggaacgcttgccgcccgcgctgagcaggaagggtttgaggtgaaagtcatttccggcgaccgcgatctgacccagctcgcctccccccatgtgacggtggacattacgaaaaaagggattaccgatatcgaaccgtacacgccggaggcggtccgcgaaaaatacggcttaactccggaacaaatcgttgatttgaaaggattgatgggcgacaaatcggacaacattcccggagtgccgggcatcggggaaaagacggcggtcaagctgctcaagcaattcggcacggtcgaaaacgtgcttgcctccattgacgagatcaaaggcgaaaagttgaaagaaacgctgcgccaacaccgggagatggcgctgttaagcaaaaagctcgccgccattcgccgcgacgccccggtcgagctctcgcttgatgacatcgtctatcaaggggaagaccgggagaaagtggtcgctttatttaaagagcttgggtttcaatcgtttttagagaaaatggaatcgccgtcatcagaagaggaaaaaccgcttgccaagatggcatttacgcttgctgaccgcgtgacggaggagatgcttgccgacaaggcggcgcttgtcgttgaagtggtcgaggaaaattatcatgatgcgccgatcgtcggcatcgctgtggtcaacgaacatggacggtttttcctgcgcccggagacggcgcttgccgatccgcagtttgtcgcctggcttggtgatgaaacgaagaaaaaaagcatgtttgactcaaagcgcgcggcagtcgccttgaaatggaaaggaattgagctatgcggcgtttcctttgatttattgctggccgcctatttgcttgatccggcgcaaggtgttgatgatgtggctgccgcagcaaaaatgaagcaatacgaagcggtgcgctcggatgaagcggtgtatggcaaaggggcgaagcgggccgtgccggatgagccagtgctcgccgagcatctcgtccgcaaggcggcggcgatttgggcgctcgaacgtccgtttttggatgagctgcgccgcaacgaacaagatcggttgctcgtcgagctcgagcagccgttgtcttcgattttggcggaaatggaatttgccggagtgaaagtggatacgaagcggctcgaacagatgggcgaagagctcgccgagcagctgcgcacggtcgagcagcgcatttatgagctcgccggccaagaattcaacatcaattcaccgaaacagctcggcgtcattttatttgaaaaactgcagctgcccgtcttgaaaaaaacgaaaaccggctactccacttcggcggatgtgcttgaaaaacttgcgccttatcacgagatcgtggaaaacattttgcattaccgccagcttggcaagttgcagtcgacgtatattgaaggattgctgaaagtcgtgcgacccgatacaaagaaggtgcatacgattttcaatcaggcgttgacgcaaaccggacggctcagctcgacggagccgaacttgcaaaacattccgattcggcttgaggaaggacggaaaatccgccaagcgttcgtgccgtcggagtctgattggctcattttcgctgccgactactcgcaaattgagttgcgcgtcctcgcccatattgcggaagatgacaatttaatggaagcgttccgccgcgatttggatatccatacgaaaacagcgatggacattttccaagtgagcgaggacgaagtgacgcccaacatgcgccgtcaggcgaaggcggtcaactttgggatcgtttacgggatcagtgattacggcttggcgcaaaacttaaatatttcacgcaaagaggccgctgaattcatcgagcgctacttcgaaagcttccctggcgtgaagcggtatatggaaaacattgtgcaagaagcaaaacagaaagggtatgtgacgacgctgctgcatcggcgccgctatttgccggatatcacgagctggaacttcaacgtccgcagctttgctgaacggatggcgatgaacacgccgattcaagggagcgccgctgacattattaaaaaggcgatgatcgatctgaacgctagactgaaggaagagcggctgcaagcgcgccttttgctacaggtgcatgacgagctcattttggaggcgccgaaagaagagatggagcggctgtgccggctcgttccggaagtgatggagcaagcggtcacacttcgcgtgccgctcaaagtcgattaccattatggctcgacgtggtatgacgcgaaataaaaaggatcc

SEQ ID NO: 2437 - DNA, 2712 bp, Artificial Sequence
  Description of Artificial Sequence: Synthetic DNA sequence of Bacillus caldolyticus EA1 DNA polymerase R803P
atgaaatacctgctgccgaccgctgctgctggtctgctgctcctcgctgcccagccggcgatggccatgggattgaaaaaaaagcttgttttaatcgacggcagcagcgtggcgtaccgcgcctttttcgccttgccgcttttgcataacgacaaaggcatccatacgaacgccgtctacgggtttacgatgatgttgaataaaattttggcggaagaagagccaactcatatgcttgtcgcgtttgacgccgggaaaacgacgttccggcatgaagcgtttcaagagtataaaggtgggcgccagcagacgccaccggagctgtcggagcagtttccgctgttgcgcgagctgctgagggcgtatcgcatccccgcctatgaactcgagaactacgaagcggacgatattatcggaacgcttgccgcccgcgctgagcaggaagggtttgaggtgaaagtcatttccggcgaccgcgatctgacccagctcgcctccccccatgtgacggtggacattacgaaaaaagggattaccgatatcgaaccgtacacgccggaggcggtccgcgaaaaatacggcttaactccggaacaaatcgttgatttgaaaggattgatgggcgacaaatcggacaacattcccggagtgccgggcatcggggaaaagacggcggtcaagctgctcaagcaattcggcacggtcgaaaacgtgcttgcctccattgacgagatcaaaggcgaaaagttgaaagaaacgctgcgccaacaccgggagatggcgctgttaagcaaaaagctcgccgccattcgccgcgacgccccggtcgagctctcgcttgatgacatcgtctatcaaggggaagaccgggagaaagtggtcgctttatttaaagagcttgggtttcaatcgtttttagagaaaatggaatcgccgtcatcagaagaggaaaaaccgcttgccaagatggcatttacgcttgctgaccgcgtgacggaggagatgcttgccgacaaggcggcgcttgtcgttgaagtggtcgaggaaaattatcatgatgcgccgatcgtcggcatcgctgtggtcaacgaacatggacggtttttcctgcgcccggagacggcgcttgccgatccgcagtttgtcgcctggcttggtgatgaaacgaagaaaaaaagcatgtttgactcaaagcgcgcggcagtcgccttgaaatggaaaggaattgagctatgcggcgtttcctttgatttattgctggccgcctatttgcttgatccggcgcaaggtgttgatgatgtggctgccgcagcaaaaatgaagcaatacgaagcggtgcgctcggatgaagcggtgtatggcaaaggggcgaagcgggccgtgccggatgagccagtgctcgccgagcatctcgtccgcaaggcggcggcgatttgggcgctcgaacgtccgtttttggatgagctgcgccgcaacgaacaagatcggttgctcgtcgagctcgagcagccgttgtcttcgattttggcggaaatggaatttgccggagtgaaagtggatacgaagcggctcgaacagatgggcgaagagctcgccgagcagctgcgcacggtcgagcagcgcatttatgagctcgccggccaagaattcaacatcaattcaccgaaacagctcggcgtcattttatttgaaaaactgcagctgcccgtcttgaaaaaaacgaaaaccggctactccacttcggcggatgtgcttgaaaaacttgcgccttatcacgagatcgtggaaaacattttgcattaccgccagcttggcaagttgcagtcgacgtatattgaaggattgctgaaagtcgtgcgacccgatacaaagaaggtgcatacgattttcaatcaggcgttgacgcaaaccggacggctcagctcgacggagccgaacttgcaaaacattccgattcggcttgaggaaggacggaaaatccgccaagcgttcgtgccgtcggagtctgattggctcattttcgctgccgactactcgcaaattgagttgcgcgtcctcgcccatattgcggaagatgacaatttaatggaagcgttccgccgcgatttggatatccatacgaaaacagcgatggacattttccaagtgagcgaggacgaagtgacgcccaacatgcgccgtcaggcgaaggcggtcaactttgggatcgtttacgggatcagtgattacggcttggcgcaaaacttaaatatttcacgcaaagaggccgctgaattcatcgagcgctacttcgaaagcttccctggcgtgaagcggtatatggaaaacattgtgcaagaagcaaaacagaaagggtatgtgacgacgctgctgcatcggcgccgctatttgccggatatcacgagccctaacttcaacgtccgcagctttgctgaacggatggcgatgaacacgccgattcaagggagcgccgctgacattattaaaaaggcgatgatcgatctgaacgctagactgaaggaagagcggctgcaagcgcgccttttgctacaggtgcatgacgagctcattttggaggcgccgaaagaagagatggagcggctgtgccggctcgttccggaagtgatggagcaagcggtcacacttcgcgtgccgctcaaagtcgattaccattatggctcgacgtggtatgacgcgaaataaaaaggatcc

SEQ ID NO: 2438 - DNA, 2712 bp, Artificial Sequence
  Description of Artificial Sequence: Synthetic DNA sequence of Bacillus caldolyticus EA1 DNA polymerase R803M
atgaaatacctgctgccgaccgctgctgctggtctgctgctcctcgctgcccagccggcgatggccatgggattgaaaaaaaagcttgttttaatcgacggcagcagcgtggcgtaccgcgcctttttcgccttgccgcttttgcataacgacaaaggcatccatacgaacgccgtctacgggtttacgatgatgttgaataaaattttggcggaagaagagccaactcatatgcttgtcgcgtttgacgccgggaaaacgacgttccggcatgaagcgtttcaagagtataaaggtgggcgccagcagacgccaccggagctgtcggagcagtttccgctgttgcgcgagctgctgagggcgtatcgcatccccgcctatgaactcgagaactacgaagcggacgatattatcggaacgcttgccgcccgcgctgagcaggaagggtttgaggtgaaagtcatttccggcgaccgcgatctgacccagctcgcctccccccatgtgacggtggacattacgaaaaaagggattaccgatatcgaaccgtacacgccggaggcggtccgcgaaaaatacggcttaactccggaacaaatcgttgatttgaaaggattgatgggcgacaaatcggacaacattcccggagtgccgggcatcggggaaaagacggcggtcaagctgctcaagcaattcggcacggtcgaaaacgtgcttgcctccattgacgagatcaaaggcgaaaagttgaaagaaacgctgcgccaacaccgggagatggcgctgttaagcaaaaagctcgccgccattcgccgcgacgccccggtcgagctctcgcttgatgacatcgtctatcaaggggaagaccgggagaaagtggtcgctttatttaaagagcttgggtttcaatcgtttttagagaaaatggaatcgccgtcatcagaagaggaaaaaccgcttgccaagatggcatttacgcttgctgaccgcgtgacggaggagatgcttgccgacaaggcggcgcttgtcgttgaagtggtcgaggaaaattatcatgatgcgccgatcgtcggcatcgctgtggtcaacgaacatggacggtttttcctgcgcccggagacggcgcttgccgatccgcagtttgtcgcctggcttggtgatgaaacgaagaaaaaaagcatgtttgactcaaagcgcgcggcagtcgccttgaaatggaaaggaattgagctatgcggcgtttcctttgatttattgctggccgcctatttgcttgatccggcgcaaggtgttgatgatgtggctgccgcagcaaaaatgaagcaatacgaagcggtgcgctcggatgaagcggtgtatggcaaaggggcgaagcgggccgtgccggatgagccagtgctcgccgagcatctcgtccgcaaggcggcggcgatttgggcgctcgaacgtccgtttttggatgagctgcgccgcaacgaacaagatcggttgctcgtcgagctcgagcagccgttgtcttcgattttggcggaaatggaatttgccggagtgaaagtggatacgaagcggctcgaacagatgggcgaagagctcgccgagcagctgcgcacggtcgagcagcgcatttatgagctcgccggccaagaattcaacatcaattcaccgaaacagctcggcgtcattttatttgaaaaactgcagctgcccgtcttgaaaaaaacgaaaaccggctactccacttcggcggatgtgcttgaaaaacttgcgccttatcacgagatcgtggaaaacattttgcattaccgccagcttggcaagttgcagtcgacgtatattgaaggattgctgaaagtcgtgcgacccgatacaaagaaggtgcatacgattttcaatcaggcgttgacgcaaaccggacggctcagctcgacggagccgaacttgcaaaacattccgattcggcttgaggaaggacggaaaatccgccaagcgttcgtgccgtcggagtctgattggctcattttcgctgccgactactcgcaaattgagttgcgcgtcctcgcccatattgcggaagatgacaatttaatggaagcgttccgccgcgatttggatatccatacgaaaacagcgatggacattttccaagtgagcgaggacgaagtgacgcccaacatgcgccgtcaggcgaaggcggtcaactttgggatcgtttacgggatcagtgattacggcttggcgcaaaacttaaatatttcacgcaaagaggccgctgaattcatcgagcgctacttcgaaagcttccctggcgtgaagcggtatatggaaaacattgtgcaagaagcaaaacagaaagggtatgtgacgacgctgctgcatcggcgccgctatttgccggatatcacgagcatgaacttcaacgtccgcagctttgctgaacggatggcgatgaacacgccgattcaagggagcgccgctgacattattaaaaaggcgatgatcgatctgaacgctagactgaaggaagagcggctgcaagcgcgccttttgctacaggtgcatgacgagctcattttggaggcgccgaaagaagagatggagcggctgtgccggctcgttccggaagtgatggagcaagcggtcacacttcgcgtgccgctcaaagtcgattaccattatggctcgacgtggtatgacgcgaaataaaaaggatcc

SEQ ID NO: 2439 - DNA, 2712 bp, Artificial Sequence
  Description of Artificial Sequence: Synthetic DNA sequence of Bacillus caldolyticus EA1 DNA polymerase R803T
atgaaatacctgctgccgaccgctgctgctggtctgctgctcctcgctgcccagccggcgatggccatgggattgaaaaaaaagcttgttttaatcgacggcagcagcgtggcgtaccgcgcctttttcgccttgccgcttttgcataacgacaaaggcatccatacgaacgccgtctacgggtttacgatgatgttgaataaaattttggcggaagaagagccaactcatatgcttgtcgcgtttgacgccgggaaaacgacgttccggcatgaagcgtttcaagagtataaaggtgggcgccagcagacgccaccggagctgtcggagcagtttccgctgttgcgcgagctgctgagggcgtatcgcatccccgcctatgaactcgagaactacgaagcggacgatattatcggaacgcttgccgcccgcgctgagcaggaagggtttgaggtgaaagtcatttccggcgaccgcgatctgacccagctcgcctccccccatgtgacggtggacattacgaaaaaagggattaccgatatcgaaccgtacacgccggaggcggtccgcgaaaaatacggcttaactccggaacaaatcgttgatttgaaaggattgatgggcgacaaatcggacaacattcccggagtgccgggcatcggggaaaagacggcggtcaagctgctcaagcaattcggcacggtcgaaaacgtgcttgcctccattgacgagatcaaaggcgaaaagttgaaagaaacgctgcgccaacaccgggagatggcgctgttaagcaaaaagctcgccgccattcgccgcgacgccccggtcgagctctcgcttgatgacatcgtctatcaaggggaagaccgggagaaagtggtcgctttatttaaagagcttgggtttcaatcgtttttagagaaaatggaatcgccgtcatcagaagaggaaaaaccgcttgccaagatggcatttacgcttgctgaccgcgtgacggaggagatgcttgccgacaaggcggcgcttgtcgttgaagtggtcgaggaaaattatcatgatgcgccgatcgtcggcatcgctgtggtcaacgaacatggacggtttttcctgcgcccggagacggcgcttgccgatccgcagtttgtcgcctggcttggtgatgaaacgaagaaaaaaagcatgtttgactcaaagcgcgcggcagtcgccttgaaatggaaaggaattgagctatgcggcgtttcctttgatttattgctggccgcctatttgcttgatccggcgcaaggtgttgatgatgtggctgccgcagcaaaaatgaagcaatacgaagcggtgcgctcggatgaagcggtgtatggcaaaggggcgaagcgggccgtgccggatgagccagtgctcgccgagcatctcgtccgcaaggcggcggcgatttgggcgctcgaacgtccgtttttggatgagctgcgccgcaacgaacaagatcggttgctcgtcgagctcgagcagccgttgtcttcgattttggcggaaatggaatttgccggagtgaaagtggatacgaagcggctcgaacagatgggcgaagagctcgccgagcagctgcgcacggtcgagcagcgcatttatgagctcgccggccaagaattcaacatcaattcaccgaaacagctcggcgtcattttatttgaaaaactgcagctgcccgtcttgaaaaaaacgaaaaccggctactccacttcggcggatgtgcttgaaaaacttgcgccttatcacgagatcgtggaaaacattttgcattaccgccagcttggcaagttgcagtcgacgtatattgaaggattgctgaaagtcgtgcgacccgatacaaagaaggtgcatacgattttcaatcaggcgttgacgcaaaccggacggctcagctcgacggagccgaacttgcaaaacattccgattcggcttgaggaaggacggaaaatccgccaagcgttcgtgccgtcggagtctgattggctcattttcgctgccgactactcgcaaattgagttgcgcgtcctcgcccatattgcggaagatgacaatttaatggaagcgttccgccgcgatttggatatccatacgaaaacagcgatggacattttccaagtgagcgaggacgaagtgacgcccaacatgcgccgtcaggcgaaggcggtcaactttgggatcgtttacgggatcagtgattacggcttggcgcaaaacttaaatatttcacgcaaagaggccgctgaattcatcgagcgctacttcgaaagcttccctggcgtgaagcggtatatggaaaacattgtgcaagaagcaaaacagaaagggtatgtgacgacgctgctgcatcggcgccgctatttgccggatatcacgagcactaacttcaacgtccgcagctttgctgaacggatggcgatgaacacgccgattcaagggagcgccgctgacattattaaaaaggcgatgatcgatctgaacgctagactgaaggaagagcggctgcaagcgcgccttttgctacaggtgcatgacgagctcattttggaggcgccgaaagaagagatggagcggctgtgccggctcgttccggaagtgatggagcaagcggtcacacttcgcgtgccgctcaaagtcgattaccattatggctcgacgtggtatgacgcgaaataaaaaggatcc

SEQ ID NO: 2440 - DNA, 2712 bp, Artificial Sequence
  Description of Artificial Sequence: Synthetic DNA sequence of Bacillus caldolyticus EA1 DNA polymerase R803N
atgaaatacctgctgccgaccgctgctgctggtctgctgctcctcgctgcccagccggcgatggccatgggattgaaaaaaaagcttgttttaatcgacggcagcagcgtggcgtaccgcgcctttttcgccttgccgcttttgcataacgacaaaggcatccatacgaacgccgtctacgggtttacgatgatgttgaataaaattttggcggaagaagagccaactcatatgcttgtcgcgtttgacgccgggaaaacgacgttccggcatgaagcgtttcaagagtataaaggtgggcgccagcagacgccaccggagctgtcggagcagtttccgctgttgcgcgagctgctgagggcgtatcgcatccccgcctatgaactcgagaactacgaagcggacgatattatcggaacgcttgccgcccgcgctgagcaggaagggtttgaggtgaaagtcatttccggcgaccgcgatctgacccagctcgcctccccccatgtgacggtggacattacgaaaaaagggattaccgatatcgaaccgtacacgccggaggcggtccgcgaaaaatacggcttaactccggaacaaatcgttgatttgaaaggattgatgggcgacaaatcggacaacattcccggagtgccgggcatcggggaaaagacggcggtcaagctgctcaagcaattcggcacggtcgaaaacgtgcttgcctccattgacgagatcaaaggcgaaaagttgaaagaaacgctgcgccaacaccgggagatggcgctgttaagcaaaaagctcgccgccattcgccgcgacgccccggtcgagctctcgcttgatgacatcgtctatcaaggggaagaccgggagaaagtggtcgctttatttaaagagcttgggtttcaatcgtttttagagaaaatggaatcgccgtcatcagaagaggaaaaaccgcttgccaagatggcatttacgcttgctgaccgcgtgacggaggagatgcttgccgacaaggcggcgcttgtcgttgaagtggtcgaggaaaattatcatgatgcgccgatcgtcggcatcgctgtggtcaacgaacatggacggtttttcctgcgcccggagacggcgcttgccgatccgcagtttgtcgcctggcttggtgatgaaacgaagaaaaaaagcatgtttgactcaaagcgcgcggcagtcgccttgaaatggaaaggaattgagctatgcggcgtttcctttgatttattgctggccgcctatttgcttgatccggcgcaaggtgttgatgatgtggctgccgcagcaaaaatgaagcaatacgaagcggtgcgctcggatgaagcggtgtatggcaaaggggcgaagcgggccgtgccggatgagccagtgctcgccgagcatctcgtccgcaaggcggcggcgatttgggcgctcgaacgtccgtttttggatgagctgcgccgcaacgaacaagatcggttgctcgtcgagctcgagcagccgttgtcttcgattttggcggaaatggaatttgccggagtgaaagtggatacgaagcggctcgaacagatgggcgaagagctcgccgagcagctgcgcacggtcgagcagcgcatttatgagctcgccggccaagaattcaacatcaattcaccgaaacagctcggcgtcattttatttgaaaaactgcagctgcccgtcttgaaaaaaacgaaaaccggctactccacttcggcggatgtgcttgaaaaacttgcgccttatcacgagatcgtggaaaacattttgcattaccgccagcttggcaagttgcagtcgacgtatattgaaggattgctgaaagtcgtgcgacccgatacaaagaaggtgcatacgattttcaatcaggcgttgacgcaaaccggacggctcagctcgacggagccgaacttgcaaaacattccgattcggcttgaggaaggacggaaaatccgccaagcgttcgtgccgtcggagtctgattggctcattttcgctgccgactactcgcaaattgagttgcgcgtcctcgcccatattgcggaagatgacaatttaatggaagcgttccgccgcgatttggatatccatacgaaaacagcgatggacattttccaagtgagcgaggacgaagtgacgcccaacatgcgccgtcaggcgaaggcggtcaactttgggatcgtttacgggatcagtgattacggcttggcgcaaaacttaaatatttcacgcaaagaggccgctgaattcatcgagcgctacttcgaaagcttccctggcgtgaagcggtatatggaaaacattgtgcaagaagcaaaacagaaagggtatgtgacgacgctgctgcatcggcgccgctatttgccggatatcacgagcaataacttcaacgtccgcagctttgctgaacggatggcgatgaacacgccgattcaagggagcgccgctgacattattaaaaaggcgatgatcgatctgaacgctagactgaaggaagagcggctgcaagcgcgccttttgctacaggtgcatgacgagctcattttggaggcgccgaaagaagagatggagcggctgtgccggctcgttccggaagtgatggagcaagcggtcacacttcgcgtgccgctcaaagtcgattaccattatggctcgacgtggtatgacgcgaaataaaaaggatcc

SEQ ID NO: 2441 - DNA, 2712 bp, Artificial Sequence
  Description of Artificial Sequence: Synthetic DNA sequence of Bacillus caldolyticus EA1 DNA polymerase R803V
atgaaatacctgctgccgaccgctgctgctggtctgctgctcctcgctgcccagccggcgatggccatgggattgaaaaaaaagcttgttttaatcgacggcagcagcgtggcgtaccgcgcctttttcgccttgccgcttttgcataacgacaaaggcatccatacgaacgccgtctacgggtttacgatgatgttgaataaaattttggcggaagaagagccaactcatatgcttgtcgcgtttgacgccgggaaaacgacgttccggcatgaagcgtttcaagagtataaaggtgggcgccagcagacgccaccggagctgtcggagcagtttccgctgttgcgcgagctgctgagggcgtatcgcatccccgcctatgaactcgagaactacgaagcggacgatattatcggaacgcttgccgcccgcgctgagcaggaagggtttgaggtgaaagtcatttccggcgaccgcgatctgacccagctcgcctccccccatgtgacggtggacattacgaaaaaagggattaccgatatcgaaccgtacacgccggaggcggtccgcgaaaaatacggcttaactccggaacaaatcgttgatttgaaaggattgatgggcgacaaatcggacaacattcccggagtgccgggcatcggggaaaagacggcggtcaagctgctcaagcaattcggcacggtcgaaaacgtgcttgcctccattgacgagatcaaaggcgaaaagttgaaagaaacgctgcgccaacaccgggagatggcgctgttaagcaaaaagctcgccgccattcgccgcgacgccccggtcgagctctcgcttgatgacatcgtctatcaaggggaagaccgggagaaagtggtcgctttatttaaagagcttgggtttcaatcgtttttagagaaaatggaatcgccgtcatcagaagaggaaaaaccgcttgccaagatggcatttacgcttgctgaccgcgtgacggaggagatgcttgccgacaaggcggcgcttgtcgttgaagtggtcgaggaaaattatcatgatgcgccgatcgtcggcatcgctgtggtcaacgaacatggacggtttttcctgcgcccggagacggcgcttgccgatccgcagtttgtcgcctggcttggtgatgaaacgaagaaaaaaagcatgtttgactcaaagcgcgcggcagtcgccttgaaatggaaaggaattgagctatgcggcgtttcctttgatttattgctggccgcctatttgcttgatccggcgcaaggtgttgatgatgtggctgccgcagcaaaaatgaagcaatacgaagcggtgcgctcggatgaagcggtgtatggcaaaggggcgaagcgggccgtgccggatgagccagtgctcgccgagcatctcgtccgcaaggcggcggcgatttgggcgctcgaacgtccgtttttggatgagctgcgccgcaacgaacaagatcggttgctcgtcgagctcgagcagccgttgtcttcgattttggcggaaatggaatttgccggagtgaaagtggatacgaagcggctcgaacagatgggcgaagagctcgccgagcagctgcgcacggtcgagcagcgcatttatgagctcgccggccaagaattcaacatcaattcaccgaaacagctcggcgtcattttatttgaaaaactgcagctgcccgtcttgaaaaaaacgaaaaccggctactccacttcggcggatgtgcttgaaaaacttgcgccttatcacgagatcgtggaaaacattttgcattaccgccagcttggcaagttgcagtcgacgtatattgaaggattgctgaaagtcgtgcgacccgatacaaagaaggtgcatacgattttcaatcaggcgttgacgcaaaccggacggctcagctcgacggagccgaacttgcaaaacattccgattcggcttgaggaaggacggaaaatccgccaagcgttcgtgccgtcggagtctgattggctcattttcgctgccgactactcgcaaattgagttgcgcgtcctcgcccatattgcggaagatgacaatttaatggaagcgttccgccgcgatttggatatccatacgaaaacagcgatggacattttccaagtgagcgaggacgaagtgacgcccaacatgcgccgtcaggcgaaggcggtcaactttgggatcgtttacgggatcagtgattacggcttggcgcaaaacttaaatatttcacgcaaagaggccgctgaattcatcgagcgctacttcgaaagcttccctggcgtgaagcggtatatggaaaacattgtgcaagaagcaaaacagaaagggtatgtgacgacgctgctgcatcggcgccgctatttgccggatatcacgagcgtcaacttcaacgtccgcagctttgctgaacggatggcgatgaacacgccgattcaagggagcgccgctgacattattaaaaaggcgatgatcgatctgaacgctagactgaaggaagagcggctgcaagcgcgccttttgctacaggtgcatgacgagctcattttggaggcgccgaaagaagagatggagcggctgtgccggctcgttccggaagtgatggagcaagcggtcacacttcgcgtgccgctcaaagtcgattaccattatggctcgacgtggtatgacgcgaaataaaaaggatcc

SEQ ID NO: 2442 - DNA, 2712 bp, Artificial Sequence
  Description of Artificial Sequence: Synthetic DNA sequence of Bacillus caldolyticus EA1 DNA polymerase N804A
atgaaatacctgctgccgaccgctgctgctggtctgctgctcctcgctgcccagccggcgatggccatgggattgaaaaaaaagcttgttttaatcgacggcagcagcgtggcgtaccgcgcctttttcgccttgccgcttttgcataacgacaaaggcatccatacgaacgccgtctacgggtttacgatgatgttgaataaaattttggcggaagaagagccaactcatatgcttgtcgcgtttgacgccgggaaaacgacgttccggcatgaagcgtttcaagagtataaaggtgggcgccagcagacgccaccggagctgtcggagcagtttccgctgttgcgcgagctgctgagggcgtatcgcatccccgcctatgaactcgagaactacgaagcggacgatattatcggaacgcttgccgcccgcgctgagcaggaagggtttgaggtgaaagtcatttccggcgaccgcgatctgacccagctcgcctccccccatgtgacggtggacattacgaaaaaagggattaccgatatcgaaccgtacacgccggaggcggtccgcgaaaaatacggcttaactccggaacaaatcgttgatttgaaaggattgatgggcgacaaatcggacaacattcccggagtgccgggcatcggggaaaagacggcggtcaagctgctcaagcaattcggcacggtcgaaaacgtgcttgcctccattgacgagatcaaaggcgaaaagttgaaagaaacgctgcgccaacaccgggagatggcgctgttaagcaaaaagctcgccgccattcgccgcgacgccccggtcgagctctcgcttgatgacatcgtctatcaaggggaagaccgggagaaagtggtcgctttatttaaagagcttgggtttcaatcgtttttagagaaaatggaatcgccgtcatcagaagaggaaaaaccgcttgccaagatggcatttacgcttgctgaccgcgtgacggaggagatgcttgccgacaaggcggcgcttgtcgttgaagtggtcgaggaaaattatcatgatgcgccgatcgtcggcatcgctgtggtcaacgaacatggacggtttttcctgcgcccggagacggcgcttgccgatccgcagtttgtcgcctggcttggtgatgaaacgaagaaaaaaagcatgtttgactcaaagcgcgcggcagtcgccttgaaatggaaaggaattgagctatgcggcgtttcctttgatttattgctggccgcctatttgcttgatccggcgcaaggtgttgatgatgtggctgccgcagcaaaaatgaagcaatacgaagcggtgcgctcggatgaagcggtgtatggcaaaggggcgaagcgggccgtgccggatgagccagtgctcgccgagcatctcgtccgcaaggcggcggcgatttgggcgctcgaacgtccgtttttggatgagctgcgccgcaacgaacaagatcggttgctcgtcgagctcgagcagccgttgtcttcgattttggcggaaatggaatttgccggagtgaaagtggatacgaagcggctcgaacagatgggcgaagagctcgccgagcagctgcgcacggtcgagcagcgcatttatgagctcgccggccaagaattcaacatcaattcaccgaaacagctcggcgtcattttatttgaaaaactgcagctgcccgtcttgaaaaaaacgaaaaccggctactccacttcggcggatgtgcttgaaaaacttgcgccttatcacgagatcgtggaaaacattttgcattaccgccagcttggcaagttgcagtcgacgtatattgaaggattgctgaaagtcgtgcgacccgatacaaagaaggtgcatacgattttcaatcaggcgttgacgcaaaccggacggctcagctcgacggagccgaacttgcaaaacattccgattcggcttgaggaaggacggaaaatccgccaagcgttcgtgccgtcggagtctgattggctcattttcgctgccgactactcgcaaattgagttgcgcgtcctcgcccatattgcggaagatgacaatttaatggaagcgttccgccgcgatttggatatccatacgaaaacagcgatggacattttccaagtgagcgaggacgaagtgacgcccaacatgcgccgtcaggcgaaggcggtcaactttgggatcgtttacgggatcagtgattacggcttggcgcaaaacttaaatatttcacgcaaagaggccgctgaattcatcgagcgctacttcgaaagcttccctggcgtgaagcggtatatggaaaacattgtgcaagaagcaaaacagaaagggtatgtgacgacgctgctgcatcggcgccgctatttgccggatatcacgagccgcgctttcaacgtccgcagctttgctgaacggatggcgatgaacacgccgattcaagggagcgccgctgacattattaaaaaggcgatgatcgatctgaacgctagactgaaggaagagcggctgcaagcgcgccttttgctacaggtgcatgacgagctcattttggaggcgccgaaagaagagatggagcggctgtgccggctcgttccggaagtgatggagcaagcggtcacacttcgcgtgccgctcaaagtcgattaccattatggctcgacgtggtatgacgcgaaataaaaaggatcc

SEQ ID NO: 2443 - DNA, 2712 bp, Artificial Sequence
  Description of Artificial Sequence: Synthetic DNA sequence of Bacillus caldolyticus EA1 DNA polymerase N804R
atgaaatacctgctgccgaccgctgctgctggtctgctgctcctcgctgcccagccggcgatggccatgggattgaaaaaaaagcttgttttaatcgacggcagcagcgtggcgtaccgcgcctttttcgccttgccgcttttgcataacgacaaaggcatccatacgaacgccgtctacgggtttacgatgatgttgaataaaattttggcggaagaagagccaactcatatgcttgtcgcgtttgacgccgggaaaacgacgttccggcatgaagcgtttcaagagtataaaggtgggcgccagcagacgccaccggagctgtcggagcagtttccgctgttgcgcgagctgctgagggcgtatcgcatccccgcctatgaactcgagaactacgaagcggacgatattatcggaacgcttgccgcccgcgctgagcaggaagggtttgaggtgaaagtcatttccggcgaccgcgatctgacccagctcgcctccccccatgtgacggtggacattacgaaaaaagggattaccgatatcgaaccgtacacgccggaggcggtccgcgaaaaatacggcttaactccggaacaaatcgttgatttgaaaggattgatgggcgacaaatcggacaacattcccggagtgccgggcatcggggaaaagacggcggtcaagctgctcaagcaattcggcacggtcgaaaacgtgcttgcctccattgacgagatcaaaggcgaaaagttgaaagaaacgctgcgccaacaccgggagatggcgctgttaagcaaaaagctcgccgccattcgccgcgacgccccggtcgagctctcgcttgatgacatcgtctatcaaggggaagaccgggagaaagtggtcgctttatttaaagagcttgggtttcaatcgtttttagagaaaatggaatcgccgtcatcagaagaggaaaaaccgcttgccaagatggcatttacgcttgctgaccgcgtgacggaggagatgcttgccgacaaggcggcgcttgtcgttgaagtggtcgaggaaaattatcatgatgcgccgatcgtcggcatcgctgtggtcaacgaacatggacggtttttcctgcgcccggagacggcgcttgccgatccgcagtttgtcgcctggcttggtgatgaaacgaagaaaaaaagcatgtttgactcaaagcgcgcggcagtcgccttgaaatggaaaggaattgagctatgcggcgtttcctttgatttattgctggccgcctatttgcttgatccggcgcaaggtgttgatgatgtggctgccgcagcaaaaatgaagcaatacgaagcggtgcgctcggatgaagcggtgtatggcaaaggggcgaagcgggccgtgccggatgagccagtgctcgccgagcatctcgtccgcaaggcggcggcgatttgggcgctcgaacgtccgtttttggatgagctgcgccgcaacgaacaagatcggttgctcgtcgagctcgagcagccgttgtcttcgattttggcggaaatggaatttgccggagtgaaagtggatacgaagcggctcgaacagatgggcgaagagctcgccgagcagctgcgcacggtcgagcagcgcatttatgagctcgccggccaagaattcaacatcaattcaccgaaacagctcggcgtcattttatttgaaaaactgcagctgcccgtcttgaaaaaaacgaaaaccggctactccacttcggcggatgtgcttgaaaaacttgcgccttatcacgagatcgtggaaaacattttgcattaccgccagcttggcaagttgcagtcgacgtatattgaaggattgctgaaagtcgtgcgacccgatacaaagaaggtgcatacgattttcaatcaggcgttgacgcaaaccggacggctcagctcgacggagccgaacttgcaaaacattccgattcggcttgaggaaggacggaaaatccgccaagcgttcgtgccgtcggagtctgattggctcattttcgctgccgactactcgcaaattgagttgcgcgtcctcgcccatattgcggaagatgacaatttaatggaagcgttccgccgcgatttggatatccatacgaaaacagcgatggacattttccaagtgagcgaggacgaagtgacgcccaacatgcgccgtcaggcgaaggcggtcaactttgggatcgtttacgggatcagtgattacggcttggcgcaaaacttaaatatttcacgcaaagaggccgctgaattcatcgagcgctacttcgaaagcttccctggcgtgaagcggtatatggaaaacattgtgcaagaagcaaaacagaaagggtatgtgacgacgctgctgcatcggcgccgctatttgccggatatcacgagccgccgattcaacgtccgcagctttgctgaacggatggcgatgaacacgccgattcaagggagcgccgctgacattattaaaaaggcgatgatcgatctgaacgctagactgaaggaagagcggctgcaagcgcgccttttgctacaggtgcatgacgagctcattttggaggcgccgaaagaagagatggagcggctgtgccggctcgttccggaagtgatggagcaagcggtcacacttcgcgtgccgctcaaagtcgattaccattatggctcgacgtggtatgacgcgaaataaaaaggatcc

SEQ ID NO: 2444 - DNA, 2712 bp, Artificial Sequence
  Description of Artificial Sequence: Synthetic DNA sequence of Bacillus caldolyticus EA1 DNA polymerase N804C
atgaaatacctgctgccgaccgctgctgctggtctgctgctcctcgctgcccagccggcgatggccatgggattgaaaaaaaagcttgttttaatcgacggcagcagcgtggcgtaccgcgcctttttcgccttgccgcttttgcataacgacaaaggcatccatacgaacgccgtctacgggtttacgatgatgttgaataaaattttggcggaagaagagccaactcatatgcttgtcgcgtttgacgccgggaaaacgacgttccggcatgaagcgtttcaagagtataaaggtgggcgccagcagacgccaccggagctgtcggagcagtttccgctgttgcgcgagctgctgagggcgtatcgcatccccgcctatgaactcgagaactacgaagcggacgatattatcggaacgcttgccgcccgcgctgagcaggaagggtttgaggtgaaagtcatttccggcgaccgcgatctgacccagctcgcctccccccatgtgacggtggacattacgaaaaaagggattaccgatatcgaaccgtacacgccggaggcggtccgcgaaaaatacggcttaactccggaacaaatcgttgatttgaaaggattgatgggcgacaaatcggacaacattcccggagtgccgggcatcggggaaaagacggcggtcaagctgctcaagcaattcggcacggtcgaaaacgtgcttgcctccattgacgagatcaaaggcgaaaagttgaaagaaacgctgcgccaacaccgggagatggcgctgttaagcaaaaagctcgccgccattcgccgcgacgccccggtcgagctctcgcttgatgacatcgtctatcaaggggaagaccgggagaaagtggtcgctttatttaaagagcttgggtttcaatcgtttttagagaaaatggaatcgccgtcatcagaagaggaaaaaccgcttgccaagatggcatttacgcttgctgaccgcgtgacggaggagatgcttgccgacaaggcggcgcttgtcgttgaagtggtcgaggaaaattatcatgatgcgccgatcgtcggcatcgctgtggtcaacgaacatggacggtttttcctgcgcccggagacggcgcttgccgatccgcagtttgtcgcctggcttggtgatgaaacgaagaaaaaaagcatgtttgactcaaagcgcgcggcagtcgccttgaaatggaaaggaattgagctatgcggcgtttcctttgatttattgctggccgcctatttgcttgatccggcgcaaggtgttgatgatgtggctgccgcagcaaaaatgaagcaatacgaagcggtgcgctcggatgaagcggtgtatggcaaaggggcgaagcgggccgtgccggatgagccagtgctcgccgagcatctcgtccgcaaggcggcggcgatttgggcgctcgaacgtccgtttttggatgagctgcgccgcaacgaacaagatcggttgctcgtcgagctcgagcagccgttgtcttcgattttggcggaaatggaatttgccggagtgaaagtggatacgaagcggctcgaacagatgggcgaagagctcgccgagcagctgcgcacggtcgagcagcgcatttatgagctcgccggccaagaattcaacatcaattcaccgaaacagctcggcgtcattttatttgaaaaactgcagctgcccgtcttgaaaaaaacgaaaaccggctactccacttcggcggatgtgcttgaaaaacttgcgccttatcacgagatcgtggaaaacattttgcattaccgccagcttggcaagttgcagtcgacgtatattgaaggattgctgaaagtcgtgcgacccgatacaaagaaggtgcatacgattttcaatcaggcgttgacgcaaaccggacggctcagctcgacggagccgaacttgcaaaacattccgattcggcttgaggaaggacggaaaatccgccaagcgttcgtgccgtcggagtctgattggctcattttcgctgccgactactcgcaaattgagttgcgcgtcctcgcccatattgcggaagatgacaatttaatggaagcgttccgccgcgatttggatatccatacgaaaacagcgatggacattttccaagtgagcgaggacgaagtgacgcccaacatgcgccgtcaggcgaaggcggtcaactttgggatcgtttacgggatcagtgattacggcttggcgcaaaacttaaatatttcacgcaaagaggccgctgaattcatcgagcgctacttcgaaagcttccctggcgtgaagcggtatatggaaaacattgtgcaagaagcaaaacagaaagggtatgtgacgacgctgctgcatcggcgccgctatttgccggatatcacgagccgctgtttcaacgtccgcagctttgctgaacggatggcgatgaacacgccgattcaagggagcgccgctgacattattaaaaaggcgatgatcgatctgaacgctagactgaaggaagagcggctgcaagcgcgccttttgctacaggtgcatgacgagctcattttggaggcgccgaaagaagagatggagcggctgtgccggctcgttccggaagtgatggagcaagcggtcacacttcgcgtgccgctcaaagtcgattaccattatggctcgacgtggtatgacgcgaaataaaaaggatcc

SEQ ID NO: 2445 - DNA, 2712 bp, Artificial Sequence
  Description of Artificial Sequence: Synthetic DNA sequence of Bacillus caldolyticus EA1 DNA polymerase N804G
atgaaatacctgctgccgaccgctgctgctggtctgctgctcctcgctgcccagccggcgatggccatgggattgaaaaaaaagcttgttttaatcgacggcagcagcgtggcgtaccgcgcctttttcgccttgccgcttttgcataacgacaaaggcatccatacgaacgccgtctacgggtttacgatgatgttgaataaaattttggcggaagaagagccaactcatatgcttgtcgcgtttgacgccgggaaaacgacgttccggcatgaagcgtttcaagagtataaaggtgggcgccagcagacgccaccggagctgtcggagcagtttccgctgttgcgcgagctgctgagggcgtatcgcatccccgcctatgaactcgagaactacgaagcggacgatattatcggaacgcttgccgcccgcgctgagcaggaagggtttgaggtgaaagtcatttccggcgaccgcgatctgacccagctcgcctccccccatgtgacggtggacattacgaaaaaagggattaccgatatcgaaccgtacacgccggaggcggtccgcgaaaaatacggcttaactccggaacaaatcgttgatttgaaaggattgatgggcgacaaatcggacaacattcccggagtgccgggcatcggggaaaagacggcggtcaagctgctcaagcaattcggcacggtcgaaaacgtgcttgcctccattgacgagatcaaaggcgaaaagttgaaagaaacgctgcgccaacaccgggagatggcgctgttaagcaaaaagctcgccgccattcgccgcgacgccccggtcgagctctcgcttgatgacatcgtctatcaaggggaagaccgggagaaagtggtcgctttatttaaagagcttgggtttcaatcgtttttagagaaaatggaatcgccgtcatcagaagaggaaaaaccgcttgccaagatggcatttacgcttgctgaccgcgtgacggaggagatgcttgccgacaaggcggcgcttgtcgttgaagtggtcgaggaaaattatcatgatgcgccgatcgtcggcatcgctgtggtcaacgaacatggacggtttttcctgcgcccggagacggcgcttgccgatccgcagtttgtcgcctggcttggtgatgaaacgaagaaaaaaagcatgtttgactcaaagcgcgcggcagtcgccttgaaatggaaaggaattgagctatgcggcgtttcctttgatttattgctggccgcctatttgcttgatccggcgcaaggtgttgatgatgtggctgccgcagcaaaaatgaagcaatacgaagcggtgcgctcggatgaagcggtgtatggcaaaggggcgaagcgggccgtgccggatgagccagtgctcgccgagcatctcgtccgcaaggcggcggcgatttgggcgctcgaacgtccgtttttggatgagctgcgccgcaacgaacaagatcggttgctcgtcgagctcgagcagccgttgtcttcgattttggcggaaatggaatttgccggagtgaaagtggatacgaagcggctcgaacagatgggcgaagagctcgccgagcagctgcgcacggtcgagcagcgcatttatgagctcgccggccaagaattcaacatcaattcaccgaaacagctcggcgtcattttatttgaaaaactgcagctgcccgtcttgaaaaaaacgaaaaccggctactccacttcggcggatgtgcttgaaaaacttgcgccttatcacgagatcgtggaaaacattttgcattaccgccagcttggcaagttgcagtcgacgtatattgaaggattgctgaaagtcgtgcgacccgatacaaagaaggtgcatacgattttcaatcaggcgttgacgcaaaccggacggctcagctcgacggagccgaacttgcaaaacattccgattcggcttgaggaaggacggaaaatccgccaagcgttcgtgccgtcggagtctgattggctcattttcgctgccgactactcgcaaattgagttgcgcgtcctcgcccatattgcggaagatgacaatttaatggaagcgttccgccgcgatttggatatccatacgaaaacagcgatggacattttccaagtgagcgaggacgaagtgacgcccaacatgcgccgtcaggcgaaggcggtcaactttgggatcgtttacgggatcagtgattacggcttggcgcaaaacttaaatatttcacgcaaagaggccgctgaattcatcgagcgctacttcgaaagcttccctggcgtgaagcggtatatggaaaacattgtgcaagaagcaaaacagaaagggtatgtgacgacgctgctgcatcggcgccgctatttgccggatatcacgagccgcggtttcaacgtccgcagctttgctgaacggatggcgatgaacacgccgattcaagggagcgccgctgacattattaaaaaggcgatgatcgatctgaacgctagactgaaggaagagcggctgcaagcgcgccttttgctacaggtgcatgacgagctcattttggaggcgccgaaagaagagatggagcggctgtgccggctcgttccggaagtgatggagcaagcggtcacacttcgcgtgccgctcaaagtcgattaccattatggctcgacgtggtatgacgcgaaataaaaaggatcc

SEQ ID NO: 2446 - DNA, 2712 bp, Artificial Sequence
  Description of Artificial Sequence: Synthetic DNA sequence of Bacillus caldolyticus EA1 DNA polymerase N804Q
atgaaatacctgctgccgaccgctgctgctggtctgctgctcctcgctgcccagccggcgatggccatgggattgaaaaaaaagcttgttttaatcgacggcagcagcgtggcgtaccgcgcctttttcgccttgccgcttttgcataacgacaaaggcatccatacgaacgccgtctacgggtttacgatgatgttgaataaaattttggcggaagaagagccaactcatatgcttgtcgcgtttgacgccgggaaaacgacgttccggcatgaagcgtttcaagagtataaaggtgggcgccagcagacgccaccggagctgtcggagcagtttccgctgttgcgcgagctgctgagggcgtatcgcatccccgcctatgaactcgagaactacgaagcggacgatattatcggaacgcttgccgcccgcgctgagcaggaagggtttgaggtgaaagtcatttccggcgaccgcgatctgacccagctcgcctccccccatgtgacggtggacattacgaaaaaagggattaccgatatcgaaccgtacacgccggaggcggtccgcgaaaaatacggcttaactccggaacaaatcgttgatttgaaaggattgatgggcgacaaatcggacaacattcccggagtgccgggcatcggggaaaagacggcggtcaagctgctcaagcaattcggcacggtcgaaaacgtgcttgcctccattgacgagatcaaaggcgaaaagttgaaagaaacgctgcgccaacaccgggagatggcgctgttaagcaaaaagctcgccgccattcgccgcgacgccccggtcgagctctcgcttgatgacatcgtctatcaaggggaagaccgggagaaagtggtcgctttatttaaagagcttgggtttcaatcgtttttagagaaaatggaatcgccgtcatcagaagaggaaaaaccgcttgccaagatggcatttacgcttgctgaccgcgtgacggaggagatgcttgccgacaaggcggcgcttgtcgttgaagtggtcgaggaaaattatcatgatgcgccgatcgtcggcatcgctgtggtcaacgaacatggacggtttttcctgcgcccggagacggcgcttgccgatccgcagtttgtcgcctggcttggtgatgaaacgaagaaaaaaagcatgtttgactcaaagcgcgcggcagtcgccttgaaatggaaaggaattgagctatgcggcgtttcctttgatttattgctggccgcctatttgcttgatccggcgcaaggtgttgatgatgtggctgccgcagcaaaaatgaagcaatacgaagcggtgcgctcggatgaagcggtgtatggcaaaggggcgaagcgggccgtgccggatgagccagtgctcgccgagcatctcgtccgcaaggcggcggcgatttgggcgctcgaacgtccgtttttggatgagctgcgccgcaacgaacaagatcggttgctcgtcgagctcgagcagccgttgtcttcgattttggcggaaatggaatttgccggagtgaaagtggatacgaagcggctcgaacagatgggcgaagagctcgccgagcagctgcgcacggtcgagcagcgcatttatgagctcgccggccaagaattcaacatcaattcaccgaaacagctcggcgtcattttatttgaaaaactgcagctgcccgtcttgaaaaaaacgaaaaccggctactccacttcggcggatgtgcttgaaaaacttgcgccttatcacgagatcgtggaaaacattttgcattaccgccagcttggcaagttgcagtcgacgtatattgaaggattgctgaaagtcgtgcgacccgatacaaagaaggtgcatacgattttcaatcaggcgttgacgcaaaccggacggctcagctcgacggagccgaacttgcaaaacattccgattcggcttgaggaaggacggaaaatccgccaagcgttcgtgccgtcggagtctgattggctcattttcgctgccgactactcgcaaattgagttgcgcgtcctcgcccatattgcggaagatgacaatttaatggaagcgttccgccgcgatttggatatccatacgaaaacagcgatggacattttccaagtgagcgaggacgaagtgacgcccaacatgcgccgtcaggcgaaggcggtcaactttgggatcgtttacgggatcagtgattacggcttggcgcaaaacttaaatatttcacgcaaagaggccgctgaattcatcgagcgctacttcgaaagcttccctggcgtgaagcggtatatggaaaacattgtgcaagaagcaaaacagaaagggtatgtgacgacgctgctgcatcggcgccgctatttgccggatatcacgagccgccaattcaacgtccgcagctttgctgaacggatggcgatgaacacgccgattcaagggagcgccgctgacattattaaaaaggcgatgatcgatctgaacgctagactgaaggaagagcggctgcaagcgcgccttttgctacaggtgcatgacgagctcattttggaggcgccgaaagaagagatggagcggctgtgccggctcgttccggaagtgatggagcaagcggtcacacttcgcgtgccgctcaaagtcgattaccattatggctcgacgtggtatgacgcgaaataaaaaggatcc

SEQ ID NO: 2447 - DNA, 2712 bp, Artificial Sequence
  Description of Artificial Sequence: Synthetic DNA sequence of Bacillus caldolyticus EA1 DNA polymerase N804H
atgaaatacctgctgccgaccgctgctgctggtctgctgctcctcgctgcccagccggcgatggccatgggattgaaaaaaaagcttgttttaatcgacggcagcagcgtggcgtaccgcgcctttttcgccttgccgcttttgcataacgacaaaggcatccatacgaacgccgtctacgggtttacgatgatgttgaataaaattttggcggaagaagagccaactcatatgcttgtcgcgtttgacgccgggaaaacgacgttccggcatgaagcgtttcaagagtataaaggtgggcgccagcagacgccaccggagctgtcggagcagtttccgctgttgcgcgagctgctgagggcgtatcgcatccccgcctatgaactcgagaactacgaagcggacgatattatcggaacgcttgccgcccgcgctgagcaggaagggtttgaggtgaaagtcatttccggcgaccgcgatctgacccagctcgcctccccccatgtgacggtggacattacgaaaaaagggattaccgatatcgaaccgtacacgccggaggcggtccgcgaaaaatacggcttaactccggaacaaatcgttgatttgaaaggattgatgggcgacaaatcggacaacattcccggagtgccgggcatcggggaaaagacggcggtcaagctgctcaagcaattcggcacggtcgaaaacgtgcttgcctccattgacgagatcaaaggcgaaaagttgaaagaaacgctgcgccaacaccgggagatggcgctgttaagcaaaaagctcgccgccattcgccgcgacgccccggtcgagctctcgcttgatgacatcgtctatcaaggggaagaccgggagaaagtggtcgctttatttaaagagcttgggtttcaatcgtttttagagaaaatggaatcgccgtcatcagaagaggaaaaaccgcttgccaagatggcatttacgcttgctgaccgcgtgacggaggagatgcttgccgacaaggcggcgcttgtcgttgaagtggtcgaggaaaattatcatgatgcgccgatcgtcggcatcgctgtggtcaacgaacatggacggtttttcctgcgcccggagacggcgcttgccgatccgcagtttgtcgcctggcttggtgatgaaacgaagaaaaaaagcatgtttgactcaaagcgcgcggcagtcgccttgaaatggaaaggaattgagctatgcggcgtttcctttgatttattgctggccgcctatttgcttgatccggcgcaaggtgttgatgatgtggctgccgcagcaaaaatgaagcaatacgaagcggtgcgctcggatgaagcggtgtatggcaaaggggcgaagcgggccgtgccggatgagccagtgctcgccgagcatctcgtccgcaaggcggcggcgatttgggcgctcgaacgtccgtttttggatgagctgcgccgcaacgaacaagatcggttgctcgtcgagctcgagcagccgttgtcttcgattttggcggaaatggaatttgccggagtgaaagtggatacgaagcggctcgaacagatgggcgaagagctcgccgagcagctgcgcacggtcgagcagcgcatttatgagctcgccggccaagaattcaacatcaattcaccgaaacagctcggcgtcattttatttgaaaaactgcagctgcccgtcttgaaaaaaacgaaaaccggctactccacttcggcggatgtgcttgaaaaacttgcgccttatcacgagatcgtggaaaacattttgcattaccgccagcttggcaagttgcagtcgacgtatattgaaggattgctgaaagtcgtgcgacccgatacaaagaaggtgcatacgattttcaatcaggcgttgacgcaaaccggacggctcagctcgacggagccgaacttgcaaaacattccgattcggcttgaggaaggacggaaaatccgccaagcgttcgtgccgtcggagtctgattggctcattttcgctgccgactactcgcaaattgagttgcgcgtcctcgcccatattgcggaagatgacaatttaatggaagcgttccgccgcgatttggatatccatacgaaaacagcgatggacattttccaagtgagcgaggacgaagtgacgcccaacatgcgccgtcaggcgaaggcggtcaactttgggatcgtttacgggatcagtgattacggcttggcgcaaaacttaaatatttcacgcaaagaggccgctgaattcatcgagcgctacttcgaaagcttccctggcgtgaagcggtatatggaaaacattgtgcaagaagcaaaacagaaagggtatgtgacgacgctgctgcatcggcgccgctatttgccggatatcacgagccgccatttcaacgtccgcagctttgctgaacggatggcgatgaacacgccgattcaagggagcgccgctgacattattaaaaaggcgatgatcgatctgaacgctagactgaaggaagagcggctgcaagcgcgccttttgctacaggtgcatgacgagctcattttggaggcgccgaaagaagagatggagcggctgtgccggctcgttccggaagtgatggagcaagcggtcacacttcgcgtgccgctcaaagtcgattaccattatggctcgacgtggtatgacgcgaaataaaaaggatcc

SEQ ID NO: 2448 - DNA, 2712 bp, Artificial Sequence
  Description of Artificial Sequence: Synthetic DNA sequence of Bacillus caldolyticus EA1 DNA polymerase N804I
atgaaatacctgctgccgaccgctgctgctggtctgctgctcctcgctgcccagccggcgatggccatgggattgaaaaaaaagcttgttttaatcgacggcagcagcgtggcgtaccgcgcctttttcgccttgccgcttttgcataacgacaaaggcatccatacgaacgccgtctacgggtttacgatgatgttgaataaaattttggcggaagaagagccaactcatatgcttgtcgcgtttgacgccgggaaaacgacgttccggcatgaagcgtttcaagagtataaaggtgggcgccagcagacgccaccggagctgtcggagcagtttccgctgttgcgcgagctgctgagggcgtatcgcatccccgcctatgaactcgagaactacgaagcggacgatattatcggaacgcttgccgcccgcgctgagcaggaagggtttgaggtgaaagtcatttccggcgaccgcgatctgacccagctcgcctccccccatgtgacggtggacattacgaaaaaagggattaccgatatcgaaccgtacacgccggaggcggtccgcgaaaaatacggcttaactccggaacaaatcgttgatttgaaaggattgatgggcgacaaatcggacaacattcccggagtgccgggcatcggggaaaagacggcggtcaagctgctcaagcaattcggcacggtcgaaaacgtgcttgcctccattgacgagatcaaaggcgaaaagttgaaagaaacgctgcgccaacaccgggagatggcgctgttaagcaaaaagctcgccgccattcgccgcgacgccccggtcgagctctcgcttgatgacatcgtctatcaaggggaagaccgggagaaagtggtcgctttatttaaagagcttgggtttcaatcgtttttagagaaaatggaatcgccgtcatcagaagaggaaaaaccgcttgccaagatggcatttacgcttgctgaccgcgtgacggaggagatgcttgccgacaaggcggcgcttgtcgttgaagtggtcgaggaaaattatcatgatgcgccgatcgtcggcatcgctgtggtcaacgaacatggacggtttttcctgcgcccggagacggcgcttgccgatccgcagtttgtcgcctggcttggtgatgaaacgaagaaaaaaagcatgtttgactcaaagcgcgcggcagtcgccttgaaatggaaaggaattgagctatgcggcgtttcctttgatttattgctggccgcctatttgcttgatccggcgcaaggtgttgatgatgtggctgccgcagcaaaaatgaagcaatacgaagcggtgcgctcggatgaagcggtgtatggcaaaggggcgaagcgggccgtgccggatgagccagtgctcgccgagcatctcgtccgcaaggcggcggcgatttgggcgctcgaacgtccgtttttggatgagctgcgccgcaacgaacaagatcggttgctcgtcgagctcgagcagccgttgtcttcgattttggcggaaatggaatttgccggagtgaaagtggatacgaagcggctcgaacagatgggcgaagagctcgccgagcagctgcgcacggtcgagcagcgcatttatgagctcgccggccaagaattcaacatcaattcaccgaaacagctcggcgtcattttatttgaaaaactgcagctgcccgtcttgaaaaaaacgaaaaccggctactccacttcggcggatgtgcttgaaaaacttgcgccttatcacgagatcgtggaaaacattttgcattaccgccagcttggcaagttgcagtcgacgtatattgaaggattgctgaaagtcgtgcgacccgatacaaagaaggtgcatacgattttcaatcaggcgttgacgcaaaccggacggctcagctcgacggagccgaacttgcaaaacattccgattcggcttgaggaaggacggaaaatccgccaagcgttcgtgccgtcggagtctgattggctcattttcgctgccgactactcgcaaattgagttgcgcgtcctcgcccatattgcggaagatgacaatttaatggaagcgttccgccgcgatttggatatccatacgaaaacagcgatggacattttccaagtgagcgaggacgaagtgacgcccaacatgcgccgtcaggcgaaggcggtcaactttgggatcgtttacgggatcagtgattacggcttggcgcaaaacttaaatatttcacgcaaagaggccgctgaattcatcgagcgctacttcgaaagcttccctggcgtgaagcggtatatggaaaacattgtgcaagaagcaaaacagaaagggtatgtgacgacgctgctgcatcggcgccgctatttgccggatatcacgagccgcattttcaacgtccgcagctttgctgaacggatggcgatgaacacgccgattcaagggagcgccgctgacattattaaaaaggcgatgatcgatctgaacgctagactgaaggaagagcggctgcaagcgcgccttttgctacaggtgcatgacgagctcattttggaggcgccgaaagaagagatggagcggctgtgccggctcgttccggaagtgatggagcaagcggtcacacttcgcgtgccgctcaaagtcgattaccattatggctcgacgtggtatgacgcgaaataaaaaggatcc

SEQ ID NO: 2449 - DNA, 2712 bp, Artificial Sequence
  Description of Artificial Sequence: Synthetic DNA sequence of Bacillus caldolyticus EA1 DNA polymerase N804L
atgaaatacctgctgccgaccgctgctgctggtctgctgctcctcgctgcccagccggcgatggccatgggattgaaaaaaaagcttgttttaatcgacggcagcagcgtggcgtaccgcgcctttttcgccttgccgcttttgcataacgacaaaggcatccatacgaacgccgtctacgggtttacgatgatgttgaataaaattttggcggaagaagagccaactcatatgcttgtcgcgtttgacgccgggaaaacgacgttccggcatgaagcgtttcaagagtataaaggtgggcgccagcagacgccaccggagctgtcggagcagtttccgctgttgcgcgagctgctgagggcgtatcgcatccccgcctatgaactcgagaactacgaagcggacgatattatcggaacgcttgccgcccgcgctgagcaggaagggtttgaggtgaaagtcatttccggcgaccgcgatctgacccagctcgcctccccccatgtgacggtggacattacgaaaaaagggattaccgatatcgaaccgtacacgccggaggcggtccgcgaaaaatacggcttaactccggaacaaatcgttgatttgaaaggattgatgggcgacaaatcggacaacattcccggagtgccgggcatcggggaaaagacggcggtcaagctgctcaagcaattcggcacggtcgaaaacgtgcttgcctccattgacgagatcaaaggcgaaaagttgaaagaaacgctgcgccaacaccgggagatggcgctgttaagcaaaaagctcgccgccattcgccgcgacgccccggtcgagctctcgcttgatgacatcgtctatcaaggggaagaccgggagaaagtggtcgctttatttaaagagcttgggtttcaatcgtttttagagaaaatggaatcgccgtcatcagaagaggaaaaaccgcttgccaagatggcatttacgcttgctgaccgcgtgacggaggagatgcttgccgacaaggcggcgcttgtcgttgaagtggtcgaggaaaattatcatgatgcgccgatcgtcggcatcgctgtggtcaacgaacatggacggtttttcctgcgcccggagacggcgcttgccgatccgcagtttgtcgcctggcttggtgatgaaacgaagaaaaaaagcatgtttgactcaaagcgcgcggcagtcgccttgaaatggaaaggaattgagctatgcggcgtttcctttgatttattgctggccgcctatttgcttgatccggcgcaaggtgttgatgatgtggctgccgcagcaaaaatgaagcaatacgaagcggtgcgctcggatgaagcggtgtatggcaaaggggcgaagcgggccgtgccggatgagccagtgctcgccgagcatctcgtccgcaaggcggcggcgatttgggcgctcgaacgtccgtttttggatgagctgcgccgcaacgaacaagatcggttgctcgtcgagctcgagcagccgttgtcttcgattttggcggaaatggaatttgccggagtgaaagtggatacgaagcggctcgaacagatgggcgaagagctcgccgagcagctgcgcacggtcgagcagcgcatttatgagctcgccggccaagaattcaacatcaattcaccgaaacagctcggcgtcattttatttgaaaaactgcagctgcccgtcttgaaaaaaacgaaaaccggctactccacttcggcggatgtgcttgaaaaacttgcgccttatcacgagatcgtggaaaacattttgcattaccgccagcttggcaagttgcagtcgacgtatattgaaggattgctgaaagtcgtgcgacccgatacaaagaaggtgcatacgattttcaatcaggcgttgacgcaaaccggacggctcagctcgacggagccgaacttgcaaaacattccgattcggcttgaggaaggacggaaaatccgccaagcgttcgtgccgtcggagtctgattggctcattttcgctgccgactactcgcaaattgagttgcgcgtcctcgcccatattgcggaagatgacaatttaatggaagcgttccgccgcgatttggatatccatacgaaaacagcgatggacattttccaagtgagcgaggacgaagtgacgcccaacatgcgccgtcaggcgaaggcggtcaactttgggatcgtttacgggatcagtgattacggcttggcgcaaaacttaaatatttcacgcaaagaggccgctgaattcatcgagcgctacttcgaaagcttccctggcgtgaagcggtatatggaaaacattgtgcaagaagcaaaacagaaagggtatgtgacgacgctgctgcatcggcgccgctatttgccggatatcacgagccgcttattcaacgtccgcagctttgctgaacggatggcgatgaacacgccgattcaagggagcgccgctgacattattaaaaaggcgatgatcgatctgaacgctagactgaaggaagagcggctgcaagcgcgccttttgctacaggtgcatgacgagctcattttggaggcgccgaaagaagagatggagcggctgtgccggctcgttccggaagtgatggagcaagcggtcacacttcgcgtgccgctcaaagtcgattaccattatggctcgacgtggtatgacgcgaaataaaaaggatcc

SEQ ID NO: 2450 - DNA, 2712 bp, Artificial Sequence
  Description of Artificial Sequence: Synthetic DNA sequence of Bacillus caldolyticus EA1 DNA polymerase N804K
atgaaatacctgctgccgaccgctgctgctggtctgctgctcctcgctgcccagccggcgatggccatgggattgaaaaaaaagcttgttttaatcgacggcagcagcgtggcgtaccgcgcctttttcgccttgccgcttttgcataacgacaaaggcatccatacgaacgccgtctacgggtttacgatgatgttgaataaaattttggcggaagaagagccaactcatatgcttgtcgcgtttgacgccgggaaaacgacgttccggcatgaagcgtttcaagagtataaaggtgggcgccagcagacgccaccggagctgtcggagcagtttccgctgttgcgcgagctgctgagggcgtatcgcatccccgcctatgaactcgagaactacgaagcggacgatattatcggaacgcttgccgcccgcgctgagcaggaagggtttgaggtgaaagtcatttccggcgaccgcgatctgacccagctcgcctccccccatgtgacggtggacattacgaaaaaagggattaccgatatcgaaccgtacacgccggaggcggtccgcgaaaaatacggcttaactccggaacaaatcgttgatttgaaaggattgatgggcgacaaatcggacaacattcccggagtgccgggcatcggggaaaagacggcggtcaagctgctcaagcaattcggcacggtcgaaaacgtgcttgcctccattgacgagatcaaaggcgaaaagttgaaagaaacgctgcgccaacaccgggagatggcgctgttaagcaaaaagctcgccgccattcgccgcgacgccccggtcgagctctcgcttgatgacatcgtctatcaaggggaagaccgggagaaagtggtcgctttatttaaagagcttgggtttcaatcgtttttagagaaaatggaatcgccgtcatcagaagaggaaaaaccgcttgccaagatggcatttacgcttgctgaccgcgtgacggaggagatgcttgccgacaaggcggcgcttgtcgttgaagtggtcgaggaaaattatcatgatgcgccgatcgtcggcatcgctgtggtcaacgaacatggacggtttttcctgcgcccggagacggcgcttgccgatccgcagtttgtcgcctggcttggtgatgaaacgaagaaaaaaagcatgtttgactcaaagcgcgcggcagtcgccttgaaatggaaaggaattgagctatgcggcgtttcctttgatttattgctggccgcctatttgcttgatccggcgcaaggtgttgatgatgtggctgccgcagcaaaaatgaagcaatacgaagcggtgcgctcggatgaagcggtgtatggcaaaggggcgaagcgggccgtgccggatgagccagtgctcgccgagcatctcgtccgcaaggcggcggcgatttgggcgctcgaacgtccgtttttggatgagctgcgccgcaacgaacaagatcggttgctcgtcgagctcgagcagccgttgtcttcgattttggcggaaatggaatttgccggagtgaaagtggatacgaagcggctcgaacagatgggcgaagagctcgccgagcagctgcgcacggtcgagcagcgcatttatgagctcgccggccaagaattcaacatcaattcaccgaaacagctcggcgtcattttatttgaaaaactgcagctgcccgtcttgaaaaaaacgaaaaccggctactccacttcggcggatgtgcttgaaaaacttgcgccttatcacgagatcgtggaaaacattttgcattaccgccagcttggcaagttgcagtcgacgtatattgaaggattgctgaaagtcgtgcgacccgatacaaagaaggtgcatacgattttcaatcaggcgttgacgcaaaccggacggctcagctcgacggagccgaacttgcaaaacattccgattcggcttgaggaaggacggaaaatccgccaagcgttcgtgccgtcggagtctgattggctcattttcgctgccgactactcgcaaattgagttgcgcgtcctcgcccatattgcggaagatgacaatttaatggaagcgttccgccgcgatttggatatccatacgaaaacagcgatggacattttccaagtgagcgaggacgaagtgacgcccaacatgcgccgtcaggcgaaggcggtcaactttgggatcgtttacgggatcagtgattacggcttggcgcaaaacttaaatatttcacgcaaagaggccgctgaattcatcgagcgctacttcgaaagcttccctggcgtgaagcggtatatggaaaacattgtgcaagaagcaaaacagaaagggtatgtgacgacgctgctgcatcggcgccgctatttgccggatatcacgagccgcaaattcaacgtccgcagctttgctgaacggatggcgatgaacacgccgattcaagggagcgccgctgacattattaaaaaggcgatgatcgatctgaacgctagactgaaggaagagcggctgcaagcgcgccttttgctacaggtgcatgacgagctcattttggaggcgccgaaagaagagatggagcggctgtgccggctcgttccggaagtgatggagcaagcggtcacacttcgcgtgccgctcaaagtcgattaccattatggctcgacgtggtatgacgcgaaataaaaaggatcc

SEQ ID NO: 2451 - DNA, 2712 bp, Artificial Sequence
  Description of Artificial Sequence: Synthetic DNA sequence of Bacillus caldolyticus EA1 DNA polymerase N804E
atgaaatacctgctgccgaccgctgctgctggtctgctgctcctcgctgcccagccggcgatggccatgggattgaaaaaaaagcttgttttaatcgacggcagcagcgtggcgtaccgcgcctttttcgccttgccgcttttgcataacgacaaaggcatccatacgaacgccgtctacgggtttacgatgatgttgaataaaattttggcggaagaagagccaactcatatgcttgtcgcgtttgacgccgggaaaacgacgttccggcatgaagcgtttcaagagtataaaggtgggcgccagcagacgccaccggagctgtcggagcagtttccgctgttgcgcgagctgctgagggcgtatcgcatccccgcctatgaactcgagaactacgaagcggacgatattatcggaacgcttgccgcccgcgctgagcaggaagggtttgaggtgaaagtcatttccggcgaccgcgatctgacccagctcgcctccccccatgtgacggtggacattacgaaaaaagggattaccgatatcgaaccgtacacgccggaggcggtccgcgaaaaatacggcttaactccggaacaaatcgttgatttgaaaggattgatgggcgacaaatcggacaacattcccggagtgccgggcatcggggaaaagacggcggtcaagctgctcaagcaattcggcacggtcgaaaacgtgcttgcctccattgacgagatcaaaggcgaaaagttgaaagaaacgctgcgccaacaccgggagatggcgctgttaagcaaaaagctcgccgccattcgccgcgacgccccggtcgagctctcgcttgatgacatcgtctatcaaggggaagaccgggagaaagtggtcgctttatttaaagagcttgggtttcaatcgtttttagagaaaatggaatcgccgtcatcagaagaggaaaaaccgcttgccaagatggcatttacgcttgctgaccgcgtgacggaggagatgcttgccgacaaggcggcgcttgtcgttgaagtggtcgaggaaaattatcatgatgcgccgatcgtcggcatcgctgtggtcaacgaacatggacggtttttcctgcgcccggagacggcgcttgccgatccgcagtttgtcgcctggcttggtgatgaaacgaagaaaaaaagcatgtttgactcaaagcgcgcggcagtcgccttgaaatggaaaggaattgagctatgcggcgtttcctttgatttattgctggccgcctatttgcttgatccggcgcaaggtgttgatgatgtggctgccgcagcaaaaatgaagcaatacgaagcggtgcgctcggatgaagcggtgtatggcaaaggggcgaagcgggccgtgccggatgagccagtgctcgccgagcatctcgtccgcaaggcggcggcgatttgggcgctcgaacgtccgtttttggatgagctgcgccgcaacgaacaagatcggttgctcgtcgagctcgagcagccgttgtcttcgattttggcggaaatggaatttgccggagtgaaagtggatacgaagcggctcgaacagatgggcgaagagctcgccgagcagctgcgcacggtcgagcagcgcatttatgagctcgccggccaagaattcaacatcaattcaccgaaacagctcggcgtcattttatttgaaaaactgcagctgcccgtcttgaaaaaaacgaaaaccggctactccacttcggcggatgtgcttgaaaaacttgcgccttatcacgagatcgtggaaaacattttgcattaccgccagcttggcaagttgcagtcgacgtatattgaaggattgctgaaagtcgtgcgacccgatacaaagaaggtgcatacgattttcaatcaggcgttgacgcaaaccggacggctcagctcgacggagccgaacttgcaaaacattccgattcggcttgaggaaggacggaaaatccgccaagcgttcgtgccgtcggagtctgattggctcattttcgctgccgactactcgcaaattgagttgcgcgtcctcgcccatattgcggaagatgacaatttaatggaagcgttccgccgcgatttggatatccatacgaaaacagcgatggacattttccaagtgagcgaggacgaagtgacgcccaacatgcgccgtcaggcgaaggcggtcaactttgggatcgtttacgggatcagtgattacggcttggcgcaaaacttaaatatttcacgcaaagaggccgctgaattcatcgagcgctacttcgaaagcttccctggcgtgaagcggtatatggaaaacattgtgcaagaagcaaaacagaaagggtatgtgacgacgctgctgcatcggcgccgctatttgccggatatcacgagccgcgaattcaacgtccgcagctttgctgaacggatggcgatgaacacgccgattcaagggagcgccgctgacattattaaaaaggcgatgatcgatctgaacgctagactgaaggaagagcggctgcaagcgcgccttttgctacaggtgcatgacgagctcattttggaggcgccgaaagaagagatggagcggctgtgccggctcgttccggaagtgatggagcaagcggtcacacttcgcgtgccgctcaaagtcgattaccattatggctcgacgtggtatgacgcgaaataaaaaggatcc

SEQ ID NO: 2452 - DNA, 2712 bp, Artificial Sequence
  Description of Artificial Sequence: Synthetic DNA sequence of Bacillus caldolyticus EA1 DNA polymerase N804D
atgaaatacctgctgccgaccgctgctgctggtctgctgctcctcgctgcccagccggcgatggccatgggattgaaaaaaaagcttgttttaatcgacggcagcagcgtggcgtaccgcgcctttttcgccttgccgcttttgcataacgacaaaggcatccatacgaacgccgtctacgggtttacgatgatgttgaataaaattttggcggaagaagagccaactcatatgcttgtcgcgtttgacgccgggaaaacgacgttccggcatgaagcgtttcaagagtataaaggtgggcgccagcagacgccaccggagctgtcggagcagtttccgctgttgcgcgagctgctgagggcgtatcgcatccccgcctatgaactcgagaactacgaagcggacgatattatcggaacgcttgccgcccgcgctgagcaggaagggtttgaggtgaaagtcatttccggcgaccgcgatctgacccagctcgcctccccccatgtgacggtggacattacgaaaaaagggattaccgatatcgaaccgtacacgccggaggcggtccgcgaaaaatacggcttaactccggaacaaatcgttgatttgaaaggattgatgggcgacaaatcggacaacattcccggagtgccgggcatcggggaaaagacggcggtcaagctgctcaagcaattcggcacggtcgaaaacgtgcttgcctccattgacgagatcaaaggcgaaaagttgaaagaaacgctgcgccaacaccgggagatggcgctgttaagcaaaaagctcgccgccattcgccgcgacgccccggtcgagctctcgcttgatgacatcgtctatcaaggggaagaccgggagaaagtggtcgctttatttaaagagcttgggtttcaatcgtttttagagaaaatggaatcgccgtcatcagaagaggaaaaaccgcttgccaagatggcatttacgcttgctgaccgcgtgacggaggagatgcttgccgacaaggcggcgcttgtcgttgaagtggtcgaggaaaattatcatgatgcgccgatcgtcggcatcgctgtggtcaacgaacatggacggtttttcctgcgcccggagacggcgcttgccgatccgcagtttgtcgcctggcttggtgatgaaacgaagaaaaaaagcatgtttgactcaaagcgcgcggcagtcgccttgaaatggaaaggaattgagctatgcggcgtttcctttgatttattgctggccgcctatttgcttgatccggcgcaaggtgttgatgatgtggctgccgcagcaaaaatgaagcaatacgaagcggtgcgctcggatgaagcggtgtatggcaaaggggcgaagcgggccgtgccggatgagccagtgctcgccgagcatctcgtccgcaaggcggcggcgatttgggcgctcgaacgtccgtttttggatgagctgcgccgcaacgaacaagatcggttgctcgtcgagctcgagcagccgttgtcttcgattttggcggaaatggaatttgccggagtgaaagtggatacgaagcggctcgaacagatgggcgaagagctcgccgagcagctgcgcacggtcgagcagcgcatttatgagctcgccggccaagaattcaacatcaattcaccgaaacagctcggcgtcattttatttgaaaaactgcagctgcccgtcttgaaaaaaacgaaaaccggctactccacttcggcggatgtgcttgaaaaacttgcgccttatcacgagatcgtggaaaacattttgcattaccgccagcttggcaagttgcagtcgacgtatattgaaggattgctgaaagtcgtgcgacccgatacaaagaaggtgcatacgattttcaatcaggcgttgacgcaaaccggacggctcagctcgacggagccgaacttgcaaaacattccgattcggcttgaggaaggacggaaaatccgccaagcgttcgtgccgtcggagtctgattggctcattttcgctgccgactactcgcaaattgagttgcgcgtcctcgcccatattgcggaagatgacaatttaatggaagcgttccgccgcgatttggatatccatacgaaaacagcgatggacattttccaagtgagcgaggacgaagtgacgcccaacatgcgccgtcaggcgaaggcggtcaactttgggatcgtttacgggatcagtgattacggcttggcgcaaaacttaaatatttcacgcaaagaggccgctgaattcatcgagcgctacttcgaaagcttccctggcgtgaagcggtatatggaaaacattgtgcaagaagcaaaacagaaagggtatgtgacgacgctgctgcatcggcgccgctatttgccggatatcacgagccgcgatttcaacgtccgcagctttgctgaacggatggcgatgaacacgccgattcaagggagcgccgctgacattattaaaaaggcgatgatcgatctgaacgctagactgaaggaagagcggctgcaagcgcgccttttgctacaggtgcatgacgagctcattttggaggcgccgaaagaagagatggagcggctgtgccggctcgttccggaagtgatggagcaagcggtcacacttcgcgtgccgctcaaagtcgattaccattatggctcgacgtggtatgacgcgaaataaaaaggatcc

SEQ ID NO: 2453 - DNA, 2712 bp, Artificial Sequence
  Description of Artificial Sequence: Synthetic DNA sequence of Bacillus caldolyticus EA1 DNA polymerase N804F
atgaaatacctgctgccgaccgctgctgctggtctgctgctcctcgctgcccagccggcgatggccatgggattgaaaaaaaagcttgttttaatcgacggcagcagcgtggcgtaccgcgcctttttcgccttgccgcttttgcataacgacaaaggcatccatacgaacgccgtctacgggtttacgatgatgttgaataaaattttggcggaagaagagccaactcatatgcttgtcgcgtttgacgccgggaaaacgacgttccggcatgaagcgtttcaagagtataaaggtgggcgccagcagacgccaccggagctgtcggagcagtttccgctgttgcgcgagctgctgagggcgtatcgcatccccgcctatgaactcgagaactacgaagcggacgatattatcggaacgcttgccgcccgcgctgagcaggaagggtttgaggtgaaagtcatttccggcgaccgcgatctgacccagctcgcctccccccatgtgacggtggacattacgaaaaaagggattaccgatatcgaaccgtacacgccggaggcggtccgcgaaaaatacggcttaactccggaacaaatcgttgatttgaaaggattgatgggcgacaaatcggacaacattcccggagtgccgggcatcggggaaaagacggcggtcaagctgctcaagcaattcggcacggtcgaaaacgtgcttgcctccattgacgagatcaaaggcgaaaagttgaaagaaacgctgcgccaacaccgggagatggcgctgttaagcaaaaagctcgccgccattcgccgcgacgccccggtcgagctctcgcttgatgacatcgtctatcaaggggaagaccgggagaaagtggtcgctttatttaaagagcttgggtttcaatcgtttttagagaaaatggaatcgccgtcatcagaagaggaaaaaccgcttgccaagatggcatttacgcttgctgaccgcgtgacggaggagatgcttgccgacaaggcggcgcttgtcgttgaagtggtcgaggaaaattatcatgatgcgccgatcgtcggcatcgctgtggtcaacgaacatggacggtttttcctgcgcccggagacggcgcttgccgatccgcagtttgtcgcctggcttggtgatgaaacgaagaaaaaaagcatgtttgactcaaagcgcgcggcagtcgccttgaaatggaaaggaattgagctatgcggcgtttcctttgatttattgctggccgcctatttgcttgatccggcgcaaggtgttgatgatgtggctgccgcagcaaaaatgaagcaatacgaagcggtgcgctcggatgaagcggtgtatggcaaaggggcgaagcgggccgtgccggatgagccagtgctcgccgagcatctcgtccgcaaggcggcggcgatttgggcgctcgaacgtccgtttttggatgagctgcgccgcaacgaacaagatcggttgctcgtcgagctcgagcagccgttgtcttcgattttggcggaaatggaatttgccggagtgaaagtggatacgaagcggctcgaacagatgggcgaagagctcgccgagcagctgcgcacggtcgagcagcgcatttatgagctcgccggccaagaattcaacatcaattcaccgaaacagctcggcgtcattttatttgaaaaactgcagctgcccgtcttgaaaaaaacgaaaaccggctactccacttcggcggatgtgcttgaaaaacttgcgccttatcacgagatcgtggaaaacattttgcattaccgccagcttggcaagttgcagtcgacgtatattgaaggattgctgaaagtcgtgcgacccgatacaaagaaggtgcatacgattttcaatcaggcgttgacgcaaaccggacggctcagctcgacggagccgaacttgcaaaacattccgattcggcttgaggaaggacggaaaatccgccaagcgttcgtgccgtcggagtctgattggctcattttcgctgccgactactcgcaaattgagttgcgcgtcctcgcccatattgcggaagatgacaatttaatggaagcgttccgccgcgatttggatatccatacgaaaacagcgatggacattttccaagtgagcgaggacgaagtgacgcccaacatgcgccgtcaggcgaaggcggtcaactttgggatcgtttacgggatcagtgattacggcttggcgcaaaacttaaatatttcacgcaaagaggccgctgaattcatcgagcgctacttcgaaagcttccctggcgtgaagcggtatatggaaaacattgtgcaagaagcaaaacagaaagggtatgtgacgacgctgctgcatcggcgccgctatttgccggatatcacgagccgctttttcaacgtccgcagctttgctgaacggatggcgatgaacacgccgattcaagggagcgccgctgacattattaaaaaggcgatgatcgatctgaacgctagactgaaggaagagcggctgcaagcgcgccttttgctacaggtgcatgacgagctcattttggaggcgccgaaagaagagatggagcggctgtgccggctcgttccggaagtgatggagcaagcggtcacacttcgcgtgccgctcaaagtcgattaccattatggctcgacgtggtatgacgcgaaataaaaaggatcc

SEQ ID NO: 2454 - DNA, 2712 bp, Artificial Sequence
  Description of Artificial Sequence: Synthetic DNA sequence of Bacillus caldolyticus EA1 DNA polymerase N804S
atgaaatacctgctgccgaccgctgctgctggtctgctgctcctcgctgcccagccggcgatggccatgggattgaaaaaaaagcttgttttaatcgacggcagcagcgtggcgtaccgcgcctttttcgccttgccgcttttgcataacgacaaaggcatccatacgaacgccgtctacgggtttacgatgatgttgaataaaattttggcggaagaagagccaactcatatgcttgtcgcgtttgacgccgggaaaacgacgttccggcatgaagcgtttcaagagtataaaggtgggcgccagcagacgccaccggagctgtcggagcagtttccgctgttgcgcgagctgctgagggcgtatcgcatccccgcctatgaactcgagaactacgaagcggacgatattatcggaacgcttgccgcccgcgctgagcaggaagggtttgaggtgaaagtcatttccggcgaccgcgatctgacccagctcgcctccccccatgtgacggtggacattacgaaaaaagggattaccgatatcgaaccgtacacgccggaggcggtccgcgaaaaatacggcttaactccggaacaaatcgttgatttgaaaggattgatgggcgacaaatcggacaacattcccggagtgccgggcatcggggaaaagacggcggtcaagctgctcaagcaattcggcacggtcgaaaacgtgcttgcctccattgacgagatcaaaggcgaaaagttgaaagaaacgctgcgccaacaccgggagatggcgctgttaagcaaaaagctcgccgccattcgccgcgacgccccggtcgagctctcgcttgatgacatcgtctatcaaggggaagaccgggagaaagtggtcgctttatttaaagagcttgggtttcaatcgtttttagagaaaatggaatcgccgtcatcagaagaggaaaaaccgcttgccaagatggcatttacgcttgctgaccgcgtgacggaggagatgcttgccgacaaggcggcgcttgtcgttgaagtggtcgaggaaaattatcatgatgcgccgatcgtcggcatcgctgtggtcaacgaacatggacggtttttcctgcgcccggagacggcgcttgccgatccgcagtttgtcgcctggcttggtgatgaaacgaagaaaaaaagcatgtttgactcaaagcgcgcggcagtcgccttgaaatggaaaggaattgagctatgcggcgtttcctttgatttattgctggccgcctatttgcttgatccggcgcaaggtgttgatgatgtggctgccgcagcaaaaatgaagcaatacgaagcggtgcgctcggatgaagcggtgtatggcaaaggggcgaagcgggccgtgccggatgagccagtgctcgccgagcatctcgtccgcaaggcggcggcgatttgggcgctcgaacgtccgtttttggatgagctgcgccgcaacgaacaagatcggttgctcgtcgagctcgagcagccgttgtcttcgattttggcggaaatggaatttgccggagtgaaagtggatacgaagcggctcgaacagatgggcgaagagctcgccgagcagctgcgcacggtcgagcagcgcatttatgagctcgccggccaagaattcaacatcaattcaccgaaacagctcggcgtcattttatttgaaaaactgcagctgcccgtcttgaaaaaaacgaaaaccggctactccacttcggcggatgtgcttgaaaaacttgcgccttatcacgagatcgtggaaaacattttgcattaccgccagcttggcaagttgcagtcgacgtatattgaaggattgctgaaagtcgtgcgacccgatacaaagaaggtgcatacgattttcaatcaggcgttgacgcaaaccggacggctcagctcgacggagccgaacttgcaaaacattccgattcggcttgaggaaggacggaaaatccgccaagcgttcgtgccgtcggagtctgattggctcattttcgctgccgactactcgcaaattgagttgcgcgtcctcgcccatattgcggaagatgacaatttaatggaagcgttccgccgcgatttggatatccatacgaaaacagcgatggacattttccaagtgagcgaggacgaagtgacgcccaacatgcgccgtcaggcgaaggcggtcaactttgggatcgtttacgggatcagtgattacggcttggcgcaaaacttaaatatttcacgcaaagaggccgctgaattcatcgagcgctacttcgaaagcttccctggcgtgaagcggtatatggaaaacattgtgcaagaagcaaaacagaaagggtatgtgacgacgctgctgcatcggcgccgctatttgccggatatcacgagccgctctttcaacgtccgcagctttgctgaacggatggcgatgaacacgccgattcaagggagcgccgctgacattattaaaaaggcgatgatcgatctgaacgctagactgaaggaagagcggctgcaagcgcgccttttgctacaggtgcatgacgagctcattttggaggcgccgaaagaagagatggagcggctgtgccggctcgttccggaagtgatggagcaagcggtcacacttcgcgtgccgctcaaagtcgattaccattatggctcgacgtggtatgacgcgaaataaaaaggatcc

SEQ ID NO: 2455 - DNA, 2712 bp, Artificial Sequence
  Description of Artificial Sequence: Synthetic DNA sequence of Bacillus caldolyticus EA1 DNA polymerase N804Y
atgaaatacctgctgccgaccgctgctgctggtctgctgctcctcgctgcccagccggcgatggccatgggattgaaaaaaaagcttgttttaatcgacggcagcagcgtggcgtaccgcgcctttttcgccttgccgcttttgcataacgacaaaggcatccatacgaacgccgtctacgggtttacgatgatgttgaataaaattttggcggaagaagagccaactcatatgcttgtcgcgtttgacgccgggaaaacgacgttccggcatgaagcgtttcaagagtataaaggtgggcgccagcagacgccaccggagctgtcggagcagtttccgctgttgcgcgagctgctgagggcgtatcgcatccccgcctatgaactcgagaactacgaagcggacgatattatcggaacgcttgccgcccgcgctgagcaggaagggtttgaggtgaaagtcatttccggcgaccgcgatctgacccagctcgcctccccccatgtgacggtggacattacgaaaaaagggattaccgatatcgaaccgtacacgccggaggcggtccgcgaaaaatacggcttaactccggaacaaatcgttgatttgaaaggattgatgggcgacaaatcggacaacattcccggagtgccgggcatcggggaaaagacggcggtcaagctgctcaagcaattcggcacggtcgaaaacgtgcttgcctccattgacgagatcaaaggcgaaaagttgaaagaaacgctgcgccaacaccgggagatggcgctgttaagcaaaaagctcgccgccattcgccgcgacgccccggtcgagctctcgcttgatgacatcgtctatcaaggggaagaccgggagaaagtggtcgctttatttaaagagcttgggtttcaatcgtttttagagaaaatggaatcgccgtcatcagaagaggaaaaaccgcttgccaagatggcatttacgcttgctgaccgcgtgacggaggagatgcttgccgacaaggcggcgcttgtcgttgaagtggtcgaggaaaattatcatgatgcgccgatcgtcggcatcgctgtggtcaacgaacatggacggtttttcctgcgcccggagacggcgcttgccgatccgcagtttgtcgcctggcttggtgatgaaacgaagaaaaaaagcatgtttgactcaaagcgcgcggcagtcgccttgaaatggaaaggaattgagctatgcggcgtttcctttgatttattgctggccgcctatttgcttgatccggcgcaaggtgttgatgatgtggctgccgcagcaaaaatgaagcaatacgaagcggtgcgctcggatgaagcggtgtatggcaaaggggcgaagcgggccgtgccggatgagccagtgctcgccgagcatctcgtccgcaaggcggcggcgatttgggcgctcgaacgtccgtttttggatgagctgcgccgcaacgaacaagatcggttgctcgtcgagctcgagcagccgttgtcttcgattttggcggaaatggaatttgccggagtgaaagtggatacgaagcggctcgaacagatgggcgaagagctcgccgagcagctgcgcacggtcgagcagcgcatttatgagctcgccggccaagaattcaacatcaattcaccgaaacagctcggcgtcattttatttgaaaaactgcagctgcccgtcttgaaaaaaacgaaaaccggctactccacttcggcggatgtgcttgaaaaacttgcgccttatcacgagatcgtggaaaacattttgcattaccgccagcttggcaagttgcagtcgacgtatattgaaggattgctgaaagtcgtgcgacccgatacaaagaaggtgcatacgattttcaatcaggcgttgacgcaaaccggacggctcagctcgacggagccgaacttgcaaaacattccgattcggcttgaggaaggacggaaaatccgccaagcgttcgtgccgtcggagtctgattggctcattttcgctgccgactactcgcaaattgagttgcgcgtcctcgcccatattgcggaagatgacaatttaatggaagcgttccgccgcgatttggatatccatacgaaaacagcgatggacattttccaagtgagcgaggacgaagtgacgcccaacatgcgccgtcaggcgaaggcggtcaactttgggatcgtttacgggatcagtgattacggcttggcgcaaaacttaaatatttcacgcaaagaggccgctgaattcatcgagcgctacttcgaaagcttccctggcgtgaagcggtatatggaaaacattgtgcaagaagcaaaacagaaagggtatgtgacgacgctgctgcatcggcgccgctatttgccggatatcacgagccgctatttcaacgtccgcagctttgctgaacggatggcgatgaacacgccgattcaagggagcgccgctgacattattaaaaaggcgatgatcgatctgaacgctagactgaaggaagagcggctgcaagcgcgccttttgctacaggtgcatgacgagctcattttggaggcgccgaaagaagagatggagcggctgtgccggctcgttccggaagtgatggagcaagcggtcacacttcgcgtgccgctcaaagtcgattaccattatggctcgacgtggtatgacgcgaaataaaaaggatcc

SEQ ID NO: 2456 - DNA, 2712 bp, Artificial Sequence
  Description of Artificial Sequence: Synthetic DNA sequence of Bacillus caldolyticus EA1 DNA polymerase N804W
atgaaatacctgctgccgaccgctgctgctggtctgctgctcctcgctgcccagccggcgatggccatgggattgaaaaaaaagcttgttttaatcgacggcagcagcgtggcgtaccgcgcctttttcgccttgccgcttttgcataacgacaaaggcatccatacgaacgccgtctacgggtttacgatgatgttgaataaaattttggcggaagaagagccaactcatatgcttgtcgcgtttgacgccgggaaaacgacgttccggcatgaagcgtttcaagagtataaaggtgggcgccagcagacgccaccggagctgtcggagcagtttccgctgttgcgcgagctgctgagggcgtatcgcatccccgcctatgaactcgagaactacgaagcggacgatattatcggaacgcttgccgcccgcgctgagcaggaagggtttgaggtgaaagtcatttccggcgaccgcgatctgacccagctcgcctccccccatgtgacggtggacattacgaaaaaagggattaccgatatcgaaccgtacacgccggaggcggtccgcgaaaaatacggcttaactccggaacaaatcgttgatttgaaaggattgatgggcgacaaatcggacaacattcccggagtgccgggcatcggggaaaagacggcggtcaagctgctcaagcaattcggcacggtcgaaaacgtgcttgcctccattgacgagatcaaaggcgaaaagttgaaagaaacgctgcgccaacaccgggagatggcgctgttaagcaaaaagctcgccgccattcgccgcgacgccccggtcgagctctcgcttgatgacatcgtctatcaaggggaagaccgggagaaagtggtcgctttatttaaagagcttgggtttcaatcgtttttagagaaaatggaatcgccgtcatcagaagaggaaaaaccgcttgccaagatggcatttacgcttgctgaccgcgtgacggaggagatgcttgccgacaaggcggcgcttgtcgttgaagtggtcgaggaaaattatcatgatgcgccgatcgtcggcatcgctgtggtcaacgaacatggacggtttttcctgcgcccggagacggcgcttgccgatccgcagtttgtcgcctggcttggtgatgaaacgaagaaaaaaagcatgtttgactcaaagcgcgcggcagtcgccttgaaatggaaaggaattgagctatgcggcgtttcctttgatttattgctggccgcctatttgcttgatccggcgcaaggtgttgatgatgtggctgccgcagcaaaaatgaagcaatacgaagcggtgcgctcggatgaagcggtgtatggcaaaggggcgaagcgggccgtgccggatgagccagtgctcgccgagcatctcgtccgcaaggcggcggcgatttgggcgctcgaacgtccgtttttggatgagctgcgccgcaacgaacaagatcggttgctcgtcgagctcgagcagccgttgtcttcgattttggcggaaatggaatttgccggagtgaaagtggatacgaagcggctcgaacagatgggcgaagagctcgccgagcagctgcgcacggtcgagcagcgcatttatgagctcgccggccaagaattcaacatcaattcaccgaaacagctcggcgtcattttatttgaaaaactgcagctgcccgtcttgaaaaaaacgaaaaccggctactccacttcggcggatgtgcttgaaaaacttgcgccttatcacgagatcgtggaaaacattttgcattaccgccagcttggcaagttgcagtcgacgtatattgaaggattgctgaaagtcgtgcgacccgatacaaagaaggtgcatacgattttcaatcaggcgttgacgcaaaccggacggctcagctcgacggagccgaacttgcaaaacattccgattcggcttgaggaaggacggaaaatccgccaagcgttcgtgccgtcggagtctgattggctcattttcgctgccgactactcgcaaattgagttgcgcgtcctcgcccatattgcggaagatgacaatttaatggaagcgttccgccgcgatttggatatccatacgaaaacagcgatggacattttccaagtgagcgaggacgaagtgacgcccaacatgcgccgtcaggcgaaggcggtcaactttgggatcgtttacgggatcagtgattacggcttggcgcaaaacttaaatatttcacgcaaagaggccgctgaattcatcgagcgctacttcgaaagcttccctggcgtgaagcggtatatggaaaacattgtgcaagaagcaaaacagaaagggtatgtgacgacgctgctgcatcggcgccgctatttgccggatatcacgagccgctggttcaacgtccgcagctttgctgaacggatggcgatgaacacgccgattcaagggagcgccgctgacattattaaaaaggcgatgatcgatctgaacgctagactgaaggaagagcggctgcaagcgcgccttttgctacaggtgcatgacgagctcattttggaggcgccgaaagaagagatggagcggctgtgccggctcgttccggaagtgatggagcaagcggtcacacttcgcgtgccgctcaaagtcgattaccattatggctcgacgtggtatgacgcgaaataaaaaggatcc

SEQ ID NO: 2457 - DNA, 2712 bp, Artificial Sequence
  Description of Artificial Sequence: Synthetic DNA sequence of Bacillus caldolyticus EA1 DNA polymerase N804P
atgaaatacctgctgccgaccgctgctgctggtctgctgctcctcgctgcccagccggcgatggccatgggattgaaaaaaaagcttgttttaatcgacggcagcagcgtggcgtaccgcgcctttttcgccttgccgcttttgcataacgacaaaggcatccatacgaacgccgtctacgggtttacgatgatgttgaataaaattttggcggaagaagagccaactcatatgcttgtcgcgtttgacgccgggaaaacgacgttccggcatgaagcgtttcaagagtataaaggtgggcgccagcagacgccaccggagctgtcggagcagtttccgctgttgcgcgagctgctgagggcgtatcgcatccccgcctatgaactcgagaactacgaagcggacgatattatcggaacgcttgccgcccgcgctgagcaggaagggtttgaggtgaaagtcatttccggcgaccgcgatctgacccagctcgcctccccccatgtgacggtggacattacgaaaaaagggattaccgatatcgaaccgtacacgccggaggcggtccgcgaaaaatacggcttaactccggaacaaatcgttgatttgaaaggattgatgggcgacaaatcggacaacattcccggagtgccgggcatcggggaaaagacggcggtcaagctgctcaagcaattcggcacggtcgaaaacgtgcttgcctccattgacgagatcaaaggcgaaaagttgaaagaaacgctgcgccaacaccgggagatggcgctgttaagcaaaaagctcgccgccattcgccgcgacgccccggtcgagctctcgcttgatgacatcgtctatcaaggggaagaccgggagaaagtggtcgctttatttaaagagcttgggtttcaatcgtttttagagaaaatggaatcgccgtcatcagaagaggaaaaaccgcttgccaagatggcatttacgcttgctgaccgcgtgacggaggagatgcttgccgacaaggcggcgcttgtcgttgaagtggtcgaggaaaattatcatgatgcgccgatcgtcggcatcgctgtggtcaacgaacatggacggtttttcctgcgcccggagacggcgcttgccgatccgcagtttgtcgcctggcttggtgatgaaacgaagaaaaaaagcatgtttgactcaaagcgcgcggcagtcgccttgaaatggaaaggaattgagctatgcggcgtttcctttgatttattgctggccgcctatttgcttgatccggcgcaaggtgttgatgatgtggctgccgcagcaaaaatgaagcaatacgaagcggtgcgctcggatgaagcggtgtatggcaaaggggcgaagcgggccgtgccggatgagccagtgctcgccgagcatctcgtccgcaaggcggcggcgatttgggcgctcgaacgtccgtttttggatgagctgcgccgcaacgaacaagatcggttgctcgtcgagctcgagcagccgttgtcttcgattttggcggaaatggaatttgccggagtgaaagtggatacgaagcggctcgaacagatgggcgaagagctcgccgagcagctgcgcacggtcgagcagcgcatttatgagctcgccggccaagaattcaacatcaattcaccgaaacagctcggcgtcattttatttgaaaaactgcagctgcccgtcttgaaaaaaacgaaaaccggctactccacttcggcggatgtgcttgaaaaacttgcgccttatcacgagatcgtggaaaacattttgcattaccgccagcttggcaagttgcagtcgacgtatattgaaggattgctgaaagtcgtgcgacccgatacaaagaaggtgcatacgattttcaatcaggcgttgacgcaaaccggacggctcagctcgacggagccgaacttgcaaaacattccgattcggcttgaggaaggacggaaaatccgccaagcgttcgtgccgtcggagtctgattggctcattttcgctgccgactactcgcaaattgagttgcgcgtcctcgcccatattgcggaagatgacaatttaatggaagcgttccgccgcgatttggatatccatacgaaaacagcgatggacattttccaagtgagcgaggacgaagtgacgcccaacatgcgccgtcaggcgaaggcggtcaactttgggatcgtttacgggatcagtgattacggcttggcgcaaaacttaaatatttcacgcaaagaggccgctgaattcatcgagcgctacttcgaaagcttccctggcgtgaagcggtatatggaaaacattgtgcaagaagcaaaacagaaagggtatgtgacgacgctgctgcatcggcgccgctatttgccggatatcacgagccgccctttcaacgtccgcagctttgctgaacggatggcgatgaacacgccgattcaagggagcgccgctgacattattaaaaaggcgatgatcgatctgaacgctagactgaaggaagagcggctgcaagcgcgccttttgctacaggtgcatgacgagctcattttggaggcgccgaaagaagagatggagcggctgtgccggctcgttccggaagtgatggagcaagcggtcacacttcgcgtgccgctcaaagtcgattaccattatggctcgacgtggtatgacgcgaaataaaaaggatcc

SEQ ID NO: 2458 - DNA, 2712 bp, Artificial Sequence
  Description of Artificial Sequence: Synthetic DNA sequence of Bacillus caldolyticus EA1 DNA polymerase N804M
atgaaatacctgctgccgaccgctgctgctggtctgctgctcctcgctgcccagccggcgatggccatgggattgaaaaaaaagcttgttttaatcgacggcagcagcgtggcgtaccgcgcctttttcgccttgccgcttttgcataacgacaaaggcatccatacgaacgccgtctacgggtttacgatgatgttgaataaaattttggcggaagaagagccaactcatatgcttgtcgcgtttgacgccgggaaaacgacgttccggcatgaagcgtttcaagagtataaaggtgggcgccagcagacgccaccggagctgtcggagcagtttccgctgttgcgcgagctgctgagggcgtatcgcatccccgcctatgaactcgagaactacgaagcggacgatattatcggaacgcttgccgcccgcgctgagcaggaagggtttgaggtgaaagtcatttccggcgaccgcgatctgacccagctcgcctccccccatgtgacggtggacattacgaaaaaagggattaccgatatcgaaccgtacacgccggaggcggtccgcgaaaaatacggcttaactccggaacaaatcgttgatttgaaaggattgatgggcgacaaatcggacaacattcccggagtgccgggcatcggggaaaagacggcggtcaagctgctcaagcaattcggcacggtcgaaaacgtgcttgcctccattgacgagatcaaaggcgaaaagttgaaagaaacgctgcgccaacaccgggagatggcgctgttaagcaaaaagctcgccgccattcgccgcgacgccccggtcgagctctcgcttgatgacatcgtctatcaaggggaagaccgggagaaagtggtcgctttatttaaagagcttgggtttcaatcgtttttagagaaaatggaatcgccgtcatcagaagaggaaaaaccgcttgccaagatggcatttacgcttgctgaccgcgtgacggaggagatgcttgccgacaaggcggcgcttgtcgttgaagtggtcgaggaaaattatcatgatgcgccgatcgtcggcatcgctgtggtcaacgaacatggacggtttttcctgcgcccggagacggcgcttgccgatccgcagtttgtcgcctggcttggtgatgaaacgaagaaaaaaagcatgtttgactcaaagcgcgcggcagtcgccttgaaatggaaaggaattgagctatgcggcgtttcctttgatttattgctggccgcctatttgcttgatccggcgcaaggtgttgatgatgtggctgccgcagcaaaaatgaagcaatacgaagcggtgcgctcggatgaagcggtgtatggcaaaggggcgaagcgggccgtgccggatgagccagtgctcgccgagcatctcgtccgcaaggcggcggcgatttgggcgctcgaacgtccgtttttggatgagctgcgccgcaacgaacaagatcggttgctcgtcgagctcgagcagccgttgtcttcgattttggcggaaatggaatttgccggagtgaaagtggatacgaagcggctcgaacagatgggcgaagagctcgccgagcagctgcgcacggtcgagcagcgcatttatgagctcgccggccaagaattcaacatcaattcaccgaaacagctcggcgtcattttatttgaaaaactgcagctgcccgtcttgaaaaaaacgaaaaccggctactccacttcggcggatgtgcttgaaaaacttgcgccttatcacgagatcgtggaaaacattttgcattaccgccagcttggcaagttgcagtcgacgtatattgaaggattgctgaaagtcgtgcgacccgatacaaagaaggtgcatacgattttcaatcaggcgttgacgcaaaccggacggctcagctcgacggagccgaacttgcaaaacattccgattcggcttgaggaaggacggaaaatccgccaagcgttcgtgccgtcggagtctgattggctcattttcgctgccgactactcgcaaattgagttgcgcgtcctcgcccatattgcggaagatgacaatttaatggaagcgttccgccgcgatttggatatccatacgaaaacagcgatggacattttccaagtgagcgaggacgaagtgacgcccaacatgcgccgtcaggcgaaggcggtcaactttgggatcgtttacgggatcagtgattacggcttggcgcaaaacttaaatatttcacgcaaagaggccgctgaattcatcgagcgctacttcgaaagcttccctggcgtgaagcggtatatggaaaacattgtgcaagaagcaaaacagaaagggtatgtgacgacgctgctgcatcggcgccgctatttgccggatatcacgagccgcatgttcaacgtccgcagctttgctgaacggatggcgatgaacacgccgattcaagggagcgccgctgacattattaaaaaggcgatgatcgatctgaacgctagactgaaggaagagcggctgcaagcgcgccttttgctacaggtgcatgacgagctcattttggaggcgccgaaagaagagatggagcggctgtgccggctcgttccggaagtgatggagcaagcggtcacacttcgcgtgccgctcaaagtcgattaccattatggctcgacgtggtatgacgcgaaataaaaaggatcc

SEQ ID NO: 2459 - DNA, 2712 bp, Artificial Sequence
  Description of Artificial Sequence: Synthetic DNA sequence of Bacillus caldolyticus EA1 DNA polymerase N804T
atgaaatacctgctgccgaccgctgctgctggtctgctgctcctcgctgcccagccggcgatggccatgggattgaaaaaaaagcttgttttaatcgacggcagcagcgtggcgtaccgcgcctttttcgccttgccgcttttgcataacgacaaaggcatccatacgaacgccgtctacgggtttacgatgatgttgaataaaattttggcggaagaagagccaactcatatgcttgtcgcgtttgacgccgggaaaacgacgttccggcatgaagcgtttcaagagtataaaggtgggcgccagcagacgccaccggagctgtcggagcagtttccgctgttgcgcgagctgctgagggcgtatcgcatccccgcctatgaactcgagaactacgaagcggacgatattatcggaacgcttgccgcccgcgctgagcaggaagggtttgaggtgaaagtcatttccggcgaccgcgatctgacccagctcgcctccccccatgtgacggtggacattacgaaaaaagggattaccgatatcgaaccgtacacgccggaggcggtccgcgaaaaatacggcttaactccggaacaaatcgttgatttgaaaggattgatgggcgacaaatcggacaacattcccggagtgccgggcatcggggaaaagacggcggtcaagctgctcaagcaattcggcacggtcgaaaacgtgcttgcctccattgacgagatcaaaggcgaaaagttgaaagaaacgctgcgccaacaccgggagatggcgctgttaagcaaaaagctcgccgccattcgccgcgacgccccggtcgagctctcgcttgatgacatcgtctatcaaggggaagaccgggagaaagtggtcgctttatttaaagagcttgggtttcaatcgtttttagagaaaatggaatcgccgtcatcagaagaggaaaaaccgcttgccaagatggcatttacgcttgctgaccgcgtgacggaggagatgcttgccgacaaggcggcgcttgtcgttgaagtggtcgaggaaaattatcatgatgcgccgatcgtcggcatcgctgtggtcaacgaacatggacggtttttcctgcgcccggagacggcgcttgccgatccgcagtttgtcgcctggcttggtgatgaaacgaagaaaaaaagcatgtttgactcaaagcgcgcggcagtcgccttgaaatggaaaggaattgagctatgcggcgtttcctttgatttattgctggccgcctatttgcttgatccggcgcaaggtgttgatgatgtggctgccgcagcaaaaatgaagcaatacgaagcggtgcgctcggatgaagcggtgtatggcaaaggggcgaagcgggccgtgccggatgagccagtgctcgccgagcatctcgtccgcaaggcggcggcgatttgggcgctcgaacgtccgtttttggatgagctgcgccgcaacgaacaagatcggttgctcgtcgagctcgagcagccgttgtcttcgattttggcggaaatggaatttgccggagtgaaagtggatacgaagcggctcgaacagatgggcgaagagctcgccgagcagctgcgcacggtcgagcagcgcatttatgagctcgccggccaagaattcaacatcaattcaccgaaacagctcggcgtcattttatttgaaaaactgcagctgcccgtcttgaaaaaaacgaaaaccggctactccacttcggcggatgtgcttgaaaaacttgcgccttatcacgagatcgtggaaaacattttgcattaccgccagcttggcaagttgcagtcgacgtatattgaaggattgctgaaagtcgtgcgacccgatacaaagaaggtgcatacgattttcaatcaggcgttgacgcaaaccggacggctcagctcgacggagccgaacttgcaaaacattccgattcggcttgaggaaggacggaaaatccgccaagcgttcgtgccgtcggagtctgattggctcattttcgctgccgactactcgcaaattgagttgcgcgtcctcgcccatattgcggaagatgacaatttaatggaagcgttccgccgcgatttggatatccatacgaaaacagcgatggacattttccaagtgagcgaggacgaagtgacgcccaacatgcgccgtcaggcgaaggcggtcaactttgggatcgtttacgggatcagtgattacggcttggcgcaaaacttaaatatttcacgcaaagaggccgctgaattcatcgagcgctacttcgaaagcttccctggcgtgaagcggtatatggaaaacattgtgcaagaagcaaaacagaaagggtatgtgacgacgctgctgcatcggcgccgctatttgccggatatcacgagccgcactttcaacgtccgcagctttgctgaacggatggcgatgaacacgccgattcaagggagcgccgctgacattattaaaaaggcgatgatcgatctgaacgctagactgaaggaagagcggctgcaagcgcgccttttgctacaggtgcatgacgagctcattttggaggcgccgaaagaagagatggagcggctgtgccggctcgttccggaagtgatggagcaagcggtcacacttcgcgtgccgctcaaagtcgattaccattatggctcgacgtggtatgacgcgaaataaaaaggatcc

SEQ ID NO: 2460 - DNA, 2712 bp, Artificial Sequence
  Description of Artificial Sequence: Synthetic DNA sequence of Bacillus caldolyticus EA1 DNA polymerase N804V
atgaaatacctgctgccgaccgctgctgctggtctgctgctcctcgctgcccagccggcgatggccatgggattgaaaaaaaagcttgttttaatcgacggcagcagcgtggcgtaccgcgcctttttcgccttgccgcttttgcataacgacaaaggcatccatacgaacgccgtctacgggtttacgatgatgttgaataaaattttggcggaagaagagccaactcatatgcttgtcgcgtttgacgccgggaaaacgacgttccggcatgaagcgtttcaagagtataaaggtgggcgccagcagacgccaccggagctgtcggagcagtttccgctgttgcgcgagctgctgagggcgtatcgcatccccgcctatgaactcgagaactacgaagcggacgatattatcggaacgcttgccgcccgcgctgagcaggaagggtttgaggtgaaagtcatttccggcgaccgcgatctgacccagctcgcctccccccatgtgacggtggacattacgaaaaaagggattaccgatatcgaaccgtacacgccggaggcggtccgcgaaaaatacggcttaactccggaacaaatcgttgatttgaaaggattgatgggcgacaaatcggacaacattcccggagtgccgggcatcggggaaaagacggcggtcaagctgctcaagcaattcggcacggtcgaaaacgtgcttgcctccattgacgagatcaaaggcgaaaagttgaaagaaacgctgcgccaacaccgggagatggcgctgttaagcaaaaagctcgccgccattcgccgcgacgccccggtcgagctctcgcttgatgacatcgtctatcaaggggaagaccgggagaaagtggtcgctttatttaaagagcttgggtttcaatcgtttttagagaaaatggaatcgccgtcatcagaagaggaaaaaccgcttgccaagatggcatttacgcttgctgaccgcgtgacggaggagatgcttgccgacaaggcggcgcttgtcgttgaagtggtcgaggaaaattatcatgatgcgccgatcgtcggcatcgctgtggtcaacgaacatggacggtttttcctgcgcccggagacggcgcttgccgatccgcagtttgtcgcctggcttggtgatgaaacgaagaaaaaaagcatgtttgactcaaagcgcgcggcagtcgccttgaaatggaaaggaattgagctatgcggcgtttcctttgatttattgctggccgcctatttgcttgatccggcgcaaggtgttgatgatgtggctgccgcagcaaaaatgaagcaatacgaagcggtgcgctcggatgaagcggtgtatggcaaaggggcgaagcgggccgtgccggatgagccagtgctcgccgagcatctcgtccgcaaggcggcggcgatttgggcgctcgaacgtccgtttttggatgagctgcgccgcaacgaacaagatcggttgctcgtcgagctcgagcagccgttgtcttcgattttggcggaaatggaatttgccggagtgaaagtggatacgaagcggctcgaacagatgggcgaagagctcgccgagcagctgcgcacggtcgagcagcgcatttatgagctcgccggccaagaattcaacatcaattcaccgaaacagctcggcgtcattttatttgaaaaactgcagctgcccgtcttgaaaaaaacgaaaaccggctactccacttcggcggatgtgcttgaaaaacttgcgccttatcacgagatcgtggaaaacattttgcattaccgccagcttggcaagttgcagtcgacgtatattgaaggattgctgaaagtcgtgcgacccgatacaaagaaggtgcatacgattttcaatcaggcgttgacgcaaaccggacggctcagctcgacggagccgaacttgcaaaacattccgattcggcttgaggaaggacggaaaatccgccaagcgttcgtgccgtcggagtctgattggctcattttcgctgccgactactcgcaaattgagttgcgcgtcctcgcccatattgcggaagatgacaatttaatggaagcgttccgccgcgatttggatatccatacgaaaacagcgatggacattttccaagtgagcgaggacgaagtgacgcccaacatgcgccgtcaggcgaaggcggtcaactttgggatcgtttacgggatcagtgattacggcttggcgcaaaacttaaatatttcacgcaaagaggccgctgaattcatcgagcgctacttcgaaagcttccctggcgtgaagcggtatatggaaaacattgtgcaagaagcaaaacagaaagggtatgtgacgacgctgctgcatcggcgccgctatttgccggatatcacgagccgcgtcttcaacgtccgcagctttgctgaacggatggcgatgaacacgccgattcaagggagcgccgctgacattattaaaaaggcgatgatcgatctgaacgctagactgaaggaagagcggctgcaagcgcgccttttgctacaggtgcatgacgagctcattttggaggcgccgaaagaagagatggagcggctgtgccggctcgttccggaagtgatggagcaagcggtcacacttcgcgtgccgctcaaagtcgattaccattatggctcgacgtggtatgacgcgaaataaaaaggatcc

SEQ ID NO: 2461 - DNA, 2712 bp, Artificial Sequence
  Description of Artificial Sequence: Synthetic DNA sequence of Bacillus caldolyticus EA1 DNA polymerase F805A
atgaaatacctgctgccgaccgctgctgctggtctgctgctcctcgctgcccagccggcgatggccatgggattgaaaaaaaagcttgttttaatcgacggcagcagcgtggcgtaccgcgcctttttcgccttgccgcttttgcataacgacaaaggcatccatacgaacgccgtctacgggtttacgatgatgttgaataaaattttggcggaagaagagccaactcatatgcttgtcgcgtttgacgccgggaaaacgacgttccggcatgaagcgtttcaagagtataaaggtgggcgccagcagacgccaccggagctgtcggagcagtttccgctgttgcgcgagctgctgagggcgtatcgcatccccgcctatgaactcgagaactacgaagcggacgatattatcggaacgcttgccgcccgcgctgagcaggaagggtttgaggtgaaagtcatttccggcgaccgcgatctgacccagctcgcctccccccatgtgacggtggacattacgaaaaaagggattaccgatatcgaaccgtacacgccggaggcggtccgcgaaaaatacggcttaactccggaacaaatcgttgatttgaaaggattgatgggcgacaaatcggacaacattcccggagtgccgggcatcggggaaaagacggcggtcaagctgctcaagcaattcggcacggtcgaaaacgtgcttgcctccattgacgagatcaaaggcgaaaagttgaaagaaacgctgcgccaacaccgggagatggcgctgttaagcaaaaagctcgccgccattcgccgcgacgccccggtcgagctctcgcttgatgacatcgtctatcaaggggaagaccgggagaaagtggtcgctttatttaaagagcttgggtttcaatcgtttttagagaaaatggaatcgccgtcatcagaagaggaaaaaccgcttgccaagatggcatttacgcttgctgaccgcgtgacggaggagatgcttgccgacaaggcggcgcttgtcgttgaagtggtcgaggaaaattatcatgatgcgccgatcgtcggcatcgctgtggtcaacgaacatggacggtttttcctgcgcccggagacggcgcttgccgatccgcagtttgtcgcctggcttggtgatgaaacgaagaaaaaaagcatgtttgactcaaagcgcgcggcagtcgccttgaaatggaaaggaattgagctatgcggcgtttcctttgatttattgctggccgcctatttgcttgatccggcgcaaggtgttgatgatgtggctgccgcagcaaaaatgaagcaatacgaagcggtgcgctcggatgaagcggtgtatggcaaaggggcgaagcgggccgtgccggatgagccagtgctcgccgagcatctcgtccgcaaggcggcggcgatttgggcgctcgaacgtccgtttttggatgagctgcgccgcaacgaacaagatcggttgctcgtcgagctcgagcagccgttgtcttcgattttggcggaaatggaatttgccggagtgaaagtggatacgaagcggctcgaacagatgggcgaagagctcgccgagcagctgcgcacggtcgagcagcgcatttatgagctcgccggccaagaattcaacatcaattcaccgaaacagctcggcgtcattttatttgaaaaactgcagctgcccgtcttgaaaaaaacgaaaaccggctactccacttcggcggatgtgcttgaaaaacttgcgccttatcacgagatcgtggaaaacattttgcattaccgccagcttggcaagttgcagtcgacgtatattgaaggattgctgaaagtcgtgcgacccgatacaaagaaggtgcatacgattttcaatcaggcgttgacgcaaaccggacggctcagctcgacggagccgaacttgcaaaacattccgattcggcttgaggaaggacggaaaatccgccaagcgttcgtgccgtcggagtctgattggctcattttcgctgccgactactcgcaaattgagttgcgcgtcctcgcccatattgcggaagatgacaatttaatggaagcgttccgccgcgatttggatatccatacgaaaacagcgatggacattttccaagtgagcgaggacgaagtgacgcccaacatgcgccgtcaggcgaaggcggtcaactttgggatcgtttacgggatcagtgattacggcttggcgcaaaacttaaatatttcacgcaaagaggccgctgaattcatcgagcgctacttcgaaagcttccctggcgtgaagcggtatatggaaaacattgtgcaagaagcaaaacagaaagggtatgtgacgacgctgctgcatcggcgccgctatttgccggatatcacgagccgcaacgctaacgtccgcagctttgctgaacggatggcgatgaacacgccgattcaagggagcgccgctgacattattaaaaaggcgatgatcgatctgaacgctagactgaaggaagagcggctgcaagcgcgccttttgctacaggtgcatgacgagctcattttggaggcgccgaaagaagagatggagcggctgtgccggctcgttccggaagtgatggagcaagcggtcacacttcgcgtgccgctcaaagtcgattaccattatggctcgacgtggtatgacgcgaaataaaaaggatcc

SEQ ID NO: 2462 - DNA, 2712 bp, Artificial Sequence
  Description of Artificial Sequence: Synthetic DNA sequence of Bacillus caldolyticus EA1 DNA polymerase F805R
atgaaatacctgctgccgaccgctgctgctggtctgctgctcctcgctgcccagccggcgatggccatgggattgaaaaaaaagcttgttttaatcgacggcagcagcgtggcgtaccgcgcctttttcgccttgccgcttttgcataacgacaaaggcatccatacgaacgccgtctacgggtttacgatgatgttgaataaaattttggcggaagaagagccaactcatatgcttgtcgcgtttgacgccgggaaaacgacgttccggcatgaagcgtttcaagagtataaaggtgggcgccagcagacgccaccggagctgtcggagcagtttccgctgttgcgcgagctgctgagggcgtatcgcatccccgcctatgaactcgagaactacgaagcggacgatattatcggaacgcttgccgcccgcgctgagcaggaagggtttgaggtgaaagtcatttccggcgaccgcgatctgacccagctcgcctccccccatgtgacggtggacattacgaaaaaagggattaccgatatcgaaccgtacacgccggaggcggtccgcgaaaaatacggcttaactccggaacaaatcgttgatttgaaaggattgatgggcgacaaatcggacaacattcccggagtgccgggcatcggggaaaagacggcggtcaagctgctcaagcaattcggcacggtcgaaaacgtgcttgcctccattgacgagatcaaaggcgaaaagttgaaagaaacgctgcgccaacaccgggagatggcgctgttaagcaaaaagctcgccgccattcgccgcgacgccccggtcgagctctcgcttgatgacatcgtctatcaaggggaagaccgggagaaagtggtcgctttatttaaagagcttgggtttcaatcgtttttagagaaaatggaatcgccgtcatcagaagaggaaaaaccgcttgccaagatggcatttacgcttgctgaccgcgtgacggaggagatgcttgccgacaaggcggcgcttgtcgttgaagtggtcgaggaaaattatcatgatgcgccgatcgtcggcatcgctgtggtcaacgaacatggacggtttttcctgcgcccggagacggcgcttgccgatccgcagtttgtcgcctggcttggtgatgaaacgaagaaaaaaagcatgtttgactcaaagcgcgcggcagtcgccttgaaatggaaaggaattgagctatgcggcgtttcctttgatttattgctggccgcctatttgcttgatccggcgcaaggtgttgatgatgtggctgccgcagcaaaaatgaagcaatacgaagcggtgcgctcggatgaagcggtgtatggcaaaggggcgaagcgggccgtgccggatgagccagtgctcgccgagcatctcgtccgcaaggcggcggcgatttgggcgctcgaacgtccgtttttggatgagctgcgccgcaacgaacaagatcggttgctcgtcgagctcgagcagccgttgtcttcgattttggcggaaatggaatttgccggagtgaaagtggatacgaagcggctcgaacagatgggcgaagagctcgccgagcagctgcgcacggtcgagcagcgcatttatgagctcgccggccaagaattcaacatcaattcaccgaaacagctcggcgtcattttatttgaaaaactgcagctgcccgtcttgaaaaaaacgaaaaccggctactccacttcggcggatgtgcttgaaaaacttgcgccttatcacgagatcgtggaaaacattttgcattaccgccagcttggcaagttgcagtcgacgtatattgaaggattgctgaaagtcgtgcgacccgatacaaagaaggtgcatacgattttcaatcaggcgttgacgcaaaccggacggctcagctcgacggagccgaacttgcaaaacattccgattcggcttgaggaaggacggaaaatccgccaagcgttcgtgccgtcggagtctgattggctcattttcgctgccgactactcgcaaattgagttgcgcgtcctcgcccatattgcggaagatgacaatttaatggaagcgttccgccgcgatttggatatccatacgaaaacagcgatggacattttccaagtgagcgaggacgaagtgacgcccaacatgcgccgtcaggcgaaggcggtcaactttgggatcgtttacgggatcagtgattacggcttggcgcaaaacttaaatatttcacgcaaagaggccgctgaattcatcgagcgctacttcgaaagcttccctggcgtgaagcggtatatggaaaacattgtgcaagaagcaaaacagaaagggtatgtgacgacgctgctgcatcggcgccgctatttgccggatatcacgagccgcaaccgaaacgtccgcagctttgctgaacggatggcgatgaacacgccgattcaagggagcgccgctgacattattaaaaaggcgatgatcgatctgaacgctagactgaaggaagagcggctgcaagcgcgccttttgctacaggtgcatgacgagctcattttggaggcgccgaaagaagagatggagcggctgtgccggctcgttccggaagtgatggagcaagcggtcacacttcgcgtgccgctcaaagtcgattaccattatggctcgacgtggtatgacgcgaaataaaaaggatcc

SEQ ID NO: 2463 - DNA, 2712 bp, Artificial Sequence
  Description of Artificial Sequence: Synthetic DNA sequence of Bacillus caldolyticus EA1 DNA polymerase F805C
atgaaatacctgctgccgaccgctgctgctggtctgctgctcctcgctgcccagccggcgatggccatgggattgaaaaaaaagcttgttttaatcgacggcagcagcgtggcgtaccgcgcctttttcgccttgccgcttttgcataacgacaaaggcatccatacgaacgccgtctacgggtttacgatgatgttgaataaaattttggcggaagaagagccaactcatatgcttgtcgcgtttgacgccgggaaaacgacgttccggcatgaagcgtttcaagagtataaaggtgggcgccagcagacgccaccggagctgtcggagcagtttccgctgttgcgcgagctgctgagggcgtatcgcatccccgcctatgaactcgagaactacgaagcggacgatattatcggaacgcttgccgcccgcgctgagcaggaagggtttgaggtgaaagtcatttccggcgaccgcgatctgacccagctcgcctccccccatgtgacggtggacattacgaaaaaagggattaccgatatcgaaccgtacacgccggaggcggtccgcgaaaaatacggcttaactccggaacaaatcgttgatttgaaaggattgatgggcgacaaatcggacaacattcccggagtgccgggcatcggggaaaagacggcggtcaagctgctcaagcaattcggcacggtcgaaaacgtgcttgcctccattgacgagatcaaaggcgaaaagttgaaagaaacgctgcgccaacaccgggagatggcgctgttaagcaaaaagctcgccgccattcgccgcgacgccccggtcgagctctcgcttgatgacatcgtctatcaaggggaagaccgggagaaagtggtcgctttatttaaagagcttgggtttcaatcgtttttagagaaaatggaatcgccgtcatcagaagaggaaaaaccgcttgccaagatggcatttacgcttgctgaccgcgtgacggaggagatgcttgccgacaaggcggcgcttgtcgttgaagtggtcgaggaaaattatcatgatgcgccgatcgtcggcatcgctgtggtcaacgaacatggacggtttttcctgcgcccggagacggcgcttgccgatccgcagtttgtcgcctggcttggtgatgaaacgaagaaaaaaagcatgtttgactcaaagcgcgcggcagtcgccttgaaatggaaaggaattgagctatgcggcgtttcctttgatttattgctggccgcctatttgcttgatccggcgcaaggtgttgatgatgtggctgccgcagcaaaaatgaagcaatacgaagcggtgcgctcggatgaagcggtgtatggcaaaggggcgaagcgggccgtgccggatgagccagtgctcgccgagcatctcgtccgcaaggcggcggcgatttgggcgctcgaacgtccgtttttggatgagctgcgccgcaacgaacaagatcggttgctcgtcgagctcgagcagccgttgtcttcgattttggcggaaatggaatttgccggagtgaaagtggatacgaagcggctcgaacagatgggcgaagagctcgccgagcagctgcgcacggtcgagcagcgcatttatgagctcgccggccaagaattcaacatcaattcaccgaaacagctcggcgtcattttatttgaaaaactgcagctgcccgtcttgaaaaaaacgaaaaccggctactccacttcggcggatgtgcttgaaaaacttgcgccttatcacgagatcgtggaaaacattttgcattaccgccagcttggcaagttgcagtcgacgtatattgaaggattgctgaaagtcgtgcgacccgatacaaagaaggtgcatacgattttcaatcaggcgttgacgcaaaccggacggctcagctcgacggagccgaacttgcaaaacattccgattcggcttgaggaaggacggaaaatccgccaagcgttcgtgccgtcggagtctgattggctcattttcgctgccgactactcgcaaattgagttgcgcgtcctcgcccatattgcggaagatgacaatttaatggaagcgttccgccgcgatttggatatccatacgaaaacagcgatggacattttccaagtgagcgaggacgaagtgacgcccaacatgcgccgtcaggcgaaggcggtcaactttgggatcgtttacgggatcagtgattacggcttggcgcaaaacttaaatatttcacgcaaagaggccgctgaattcatcgagcgctacttcgaaagcttccctggcgtgaagcggtatatggaaaacattgtgcaagaagcaaaacagaaagggtatgtgacgacgctgctgcatcggcgccgctatttgccggatatcacgagccgcaactgtaacgtccgcagctttgctgaacggatggcgatgaacacgccgattcaagggagcgccgctgacattattaaaaaggcgatgatcgatctgaacgctagactgaaggaagagcggctgcaagcgcgccttttgctacaggtgcatgacgagctcattttggaggcgccgaaagaagagatggagcggctgtgccggctcgttccggaagtgatggagcaagcggtcacacttcgcgtgccgctcaaagtcgattaccattatggctcgacgtggtatgacgcgaaataaaaaggatcc

SEQ ID NO: 2464 - DNA, 2712 bp, Artificial Sequence
  Description of Artificial Sequence: Synthetic DNA sequence of Bacillus caldolyticus EA1 DNA polymerase F805G
atgaaatacctgctgccgaccgctgctgctggtctgctgctcctcgctgcccagccggcgatggccatgggattgaaaaaaaagcttgttttaatcgacggcagcagcgtggcgtaccgcgcctttttcgccttgccgcttttgcataacgacaaaggcatccatacgaacgccgtctacgggtttacgatgatgttgaataaaattttggcggaagaagagccaactcatatgcttgtcgcgtttgacgccgggaaaacgacgttccggcatgaagcgtttcaagagtataaaggtgggcgccagcagacgccaccggagctgtcggagcagtttccgctgttgcgcgagctgctgagggcgtatcgcatccccgcctatgaactcgagaactacgaagcggacgatattatcggaacgcttgccgcccgcgctgagcaggaagggtttgaggtgaaagtcatttccggcgaccgcgatctgacccagctcgcctccccccatgtgacggtggacattacgaaaaaagggattaccgatatcgaaccgtacacgccggaggcggtccgcgaaaaatacggcttaactccggaacaaatcgttgatttgaaaggattgatgggcgacaaatcggacaacattcccggagtgccgggcatcggggaaaagacggcggtcaagctgctcaagcaattcggcacggtcgaaaacgtgcttgcctccattgacgagatcaaaggcgaaaagttgaaagaaacgctgcgccaacaccgggagatggcgctgttaagcaaaaagctcgccgccattcgccgcgacgccccggtcgagctctcgcttgatgacatcgtctatcaaggggaagaccgggagaaagtggtcgctttatttaaagagcttgggtttcaatcgtttttagagaaaatggaatcgccgtcatcagaagaggaaaaaccgcttgccaagatggcatttacgcttgctgaccgcgtgacggaggagatgcttgccgacaaggcggcgcttgtcgttgaagtggtcgaggaaaattatcatgatgcgccgatcgtcggcatcgctgtggtcaacgaacatggacggtttttcctgcgcccggagacggcgcttgccgatccgcagtttgtcgcctggcttggtgatgaaacgaagaaaaaaagcatgtttgactcaaagcgcgcggcagtcgccttgaaatggaaaggaattgagctatgcggcgtttcctttgatttattgctggccgcctatttgcttgatccggcgcaaggtgttgatgatgtggctgccgcagcaaaaatgaagcaatacgaagcggtgcgctcggatgaagcggtgtatggcaaaggggcgaagcgggccgtgccggatgagccagtgctcgccgagcatctcgtccgcaaggcggcggcgatttgggcgctcgaacgtccgtttttggatgagctgcgccgcaacgaacaagatcggttgctcgtcgagctcgagcagccgttgtcttcgattttggcggaaatggaatttgccggagtgaaagtggatacgaagcggctcgaacagatgggcgaagagctcgccgagcagctgcgcacggtcgagcagcgcatttatgagctcgccggccaagaattcaacatcaattcaccgaaacagctcggcgtcattttatttgaaaaactgcagctgcccgtcttgaaaaaaacgaaaaccggctactccacttcggcggatgtgcttgaaaaacttgcgccttatcacgagatcgtggaaaacattttgcattaccgccagcttggcaagttgcagtcgacgtatattgaaggattgctgaaagtcgtgcgacccgatacaaagaaggtgcatacgattttcaatcaggcgttgacgcaaaccggacggctcagctcgacggagccgaacttgcaaaacattccgattcggcttgaggaaggacggaaaatccgccaagcgttcgtgccgtcggagtctgattggctcattttcgctgccgactactcgcaaattgagttgcgcgtcctcgcccatattgcggaagatgacaatttaatggaagcgttccgccgcgatttggatatccatacgaaaacagcgatggacattttccaagtgagcgaggacgaagtgacgcccaacatgcgccgtcaggcgaaggcggtcaactttgggatcgtttacgggatcagtgattacggcttggcgcaaaacttaaatatttcacgcaaagaggccgctgaattcatcgagcgctacttcgaaagcttccctggcgtgaagcggtatatggaaaacattgtgcaagaagcaaaacagaaagggtatgtgacgacgctgctgcatcggcgccgctatttgccggatatcacgagccgcaacggtaacgtccgcagctttgctgaacggatggcgatgaacacgccgattcaagggagcgccgctgacattattaaaaaggcgatgatcgatctgaacgctagactgaaggaagagcggctgcaagcgcgccttttgctacaggtgcatgacgagctcattttggaggcgccgaaagaagagatggagcggctgtgccggctcgttccggaagtgatggagcaagcggtcacacttcgcgtgccgctcaaagtcgattaccattatggctcgacgtggtatgacgcgaaataaaaaggatcc

SEQ ID NO: 2465 - DNA, 2712 bp, Artificial Sequence
  Description of Artificial Sequence: Synthetic DNA sequence of Bacillus caldolyticus EA1 DNA polymerase F805Q
atgaaatacctgctgccgaccgctgctgctggtctgctgctcctcgctgcccagccggcgatggccatgggattgaaaaaaaagcttgttttaatcgacggcagcagcgtggcgtaccgcgcctttttcgccttgccgcttttgcataacgacaaaggcatccatacgaacgccgtctacgggtttacgatgatgttgaataaaattttggcggaagaagagccaactcatatgcttgtcgcgtttgacgccgggaaaacgacgttccggcatgaagcgtttcaagagtataaaggtgggcgccagcagacgccaccggagctgtcggagcagtttccgctgttgcgcgagctgctgagggcgtatcgcatccccgcctatgaactcgagaactacgaagcggacgatattatcggaacgcttgccgcccgcgctgagcaggaagggtttgaggtgaaagtcatttccggcgaccgcgatctgacccagctcgcctccccccatgtgacggtggacattacgaaaaaagggattaccgatatcgaaccgtacacgccggaggcggtccgcgaaaaatacggcttaactccggaacaaatcgttgatttgaaaggattgatgggcgacaaatcggacaacattcccggagtgccgggcatcggggaaaagacggcggtcaagctgctcaagcaattcggcacggtcgaaaacgtgcttgcctccattgacgagatcaaaggcgaaaagttgaaagaaacgctgcgccaacaccgggagatggcgctgttaagcaaaaagctcgccgccattcgccgcgacgccccggtcgagctctcgcttgatgacatcgtctatcaaggggaagaccgggagaaagtggtcgctttatttaaagagcttgggtttcaatcgtttttagagaaaatggaatcgccgtcatcagaagaggaaaaaccgcttgccaagatggcatttacgcttgctgaccgcgtgacggaggagatgcttgccgacaaggcggcgcttgtcgttgaagtggtcgaggaaaattatcatgatgcgccgatcgtcggcatcgctgtggtcaacgaacatggacggtttttcctgcgcccggagacggcgcttgccgatccgcagtttgtcgcctggcttggtgatgaaacgaagaaaaaaagcatgtttgactcaaagcgcgcggcagtcgccttgaaatggaaaggaattgagctatgcggcgtttcctttgatttattgctggccgcctatttgcttgatccggcgcaaggtgttgatgatgtggctgccgcagcaaaaatgaagcaatacgaagcggtgcgctcggatgaagcggtgtatggcaaaggggcgaagcgggccgtgccggatgagccagtgctcgccgagcatctcgtccgcaaggcggcggcgatttgggcgctcgaacgtccgtttttggatgagctgcgccgcaacgaacaagatcggttgctcgtcgagctcgagcagccgttgtcttcgattttggcggaaatggaatttgccggagtgaaagtggatacgaagcggctcgaacagatgggcgaagagctcgccgagcagctgcgcacggtcgagcagcgcatttatgagctcgccggccaagaattcaacatcaattcaccgaaacagctcggcgtcattttatttgaaaaactgcagctgcccgtcttgaaaaaaacgaaaaccggctactccacttcggcggatgtgcttgaaaaacttgcgccttatcacgagatcgtggaaaacattttgcattaccgccagcttggcaagttgcagtcgacgtatattgaaggattgctgaaagtcgtgcgacccgatacaaagaaggtgcatacgattttcaatcaggcgttgacgcaaaccggacggctcagctcgacggagccgaacttgcaaaacattccgattcggcttgaggaaggacggaaaatccgccaagcgttcgtgccgtcggagtctgattggctcattttcgctgccgactactcgcaaattgagttgcgcgtcctcgcccatattgcggaagatgacaatttaatggaagcgttccgccgcgatttggatatccatacgaaaacagcgatggacattttccaagtgagcgaggacgaagtgacgcccaacatgcgccgtcaggcgaaggcggtcaactttgggatcgtttacgggatcagtgattacggcttggcgcaaaacttaaatatttcacgcaaagaggccgctgaattcatcgagcgctacttcgaaagcttccctggcgtgaagcggtatatggaaaacattgtgcaagaagcaaaacagaaagggtatgtgacgacgctgctgcatcggcgccgctatttgccggatatcacgagccgcaaccaaaacgtccgcagctttgctgaacggatggcgatgaacacgccgattcaagggagcgccgctgacattattaaaaaggcgatgatcgatctgaacgctagactgaaggaagagcggctgcaagcgcgccttttgctacaggtgcatgacgagctcattttggaggcgccgaaagaagagatggagcggctgtgccggctcgttccggaagtgatggagcaagcggtcacacttcgcgtgccgctcaaagtcgattaccattatggctcgacgtggtatgacgcgaaataaaaaggatcc

SEQ ID NO: 2466 - DNA, 2712 bp, Artificial Sequence
  Description of Artificial Sequence: Synthetic DNA sequence of Bacillus caldolyticus EA1 DNA polymerase F805H
atgaaatacctgctgccgaccgctgctgctggtctgctgctcctcgctgcccagccggcgatggccatgggattgaaaaaaaagcttgttttaatcgacggcagcagcgtggcgtaccgcgcctttttcgccttgccgcttttgcataacgacaaaggcatccatacgaacgccgtctacgggtttacgatgatgttgaataaaattttggcggaagaagagccaactcatatgcttgtcgcgtttgacgccgggaaaacgacgttccggcatgaagcgtttcaagagtataaaggtgggcgccagcagacgccaccggagctgtcggagcagtttccgctgttgcgcgagctgctgagggcgtatcgcatccccgcctatgaactcgagaactacgaagcggacgatattatcggaacgcttgccgcccgcgctgagcaggaagggtttgaggtgaaagtcatttccggcgaccgcgatctgacccagctcgcctccccccatgtgacggtggacattacgaaaaaagggattaccgatatcgaaccgtacacgccggaggcggtccgcgaaaaatacggcttaactccggaacaaatcgttgatttgaaaggattgatgggcgacaaatcggacaacattcccggagtgccgggcatcggggaaaagacggcggtcaagctgctcaagcaattcggcacggtcgaaaacgtgcttgcctccattgacgagatcaaaggcgaaaagttgaaagaaacgctgcgccaacaccgggagatggcgctgttaagcaaaaagctcgccgccattcgccgcgacgccccggtcgagctctcgcttgatgacatcgtctatcaaggggaagaccgggagaaagtggtcgctttatttaaagagcttgggtttcaatcgtttttagagaaaatggaatcgccgtcatcagaagaggaaaaaccgcttgccaagatggcatttacgcttgctgaccgcgtgacggaggagatgcttgccgacaaggcggcgcttgtcgttgaagtggtcgaggaaaattatcatgatgcgccgatcgtcggcatcgctgtggtcaacgaacatggacggtttttcctgcgcccggagacggcgcttgccgatccgcagtttgtcgcctggcttggtgatgaaacgaagaaaaaaagcatgtttgactcaaagcgcgcggcagtcgccttgaaatggaaaggaattgagctatgcggcgtttcctttgatttattgctggccgcctatttgcttgatccggcgcaaggtgttgatgatgtggctgccgcagcaaaaatgaagcaatacgaagcggtgcgctcggatgaagcggtgtatggcaaaggggcgaagcgggccgtgccggatgagccagtgctcgccgagcatctcgtccgcaaggcggcggcgatttgggcgctcgaacgtccgtttttggatgagctgcgccgcaacgaacaagatcggttgctcgtcgagctcgagcagccgttgtcttcgattttggcggaaatggaatttgccggagtgaaagtggatacgaagcggctcgaacagatgggcgaagagctcgccgagcagctgcgcacggtcgagcagcgcatttatgagctcgccggccaagaattcaacatcaattcaccgaaacagctcggcgtcattttatttgaaaaactgcagctgcccgtcttgaaaaaaacgaaaaccggctactccacttcggcggatgtgcttgaaaaacttgcgccttatcacgagatcgtggaaaacattttgcattaccgccagcttggcaagttgcagtcgacgtatattgaaggattgctgaaagtcgtgcgacccgatacaaagaaggtgcatacgattttcaatcaggcgttgacgcaaaccggacggctcagctcgacggagccgaacttgcaaaacattccgattcggcttgaggaaggacggaaaatccgccaagcgttcgtgccgtcggagtctgattggctcattttcgctgccgactactcgcaaattgagttgcgcgtcctcgcccatattgcggaagatgacaatttaatggaagcgttccgccgcgatttggatatccatacgaaaacagcgatggacattttccaagtgagcgaggacgaagtgacgcccaacatgcgccgtcaggcgaaggcggtcaactttgggatcgtttacgggatcagtgattacggcttggcgcaaaacttaaatatttcacgcaaagaggccgctgaattcatcgagcgctacttcgaaagcttccctggcgtgaagcggtatatggaaaacattgtgcaagaagcaaaacagaaagggtatgtgacgacgctgctgcatcggcgccgctatttgccggatatcacgagccgcaaccataacgtccgcagctttgctgaacggatggcgatgaacacgccgattcaagggagcgccgctgacattattaaaaaggcgatgatcgatctgaacgctagactgaaggaagagcggctgcaagcgcgccttttgctacaggtgcatgacgagctcattttggaggcgccgaaagaagagatggagcggctgtgccggctcgttccggaagtgatggagcaagcggtcacacttcgcgtgccgctcaaagtcgattaccattatggctcgacgtggtatgacgcgaaataaaaaggatcc

SEQ ID NO: 2467 - DNA, 2712 bp, Artificial Sequence
  Description of Artificial Sequence: Synthetic DNA sequence of Bacillus caldolyticus EA1 DNA polymerase F805I
atgaaatacctgctgccgaccgctgctgctggtctgctgctcctcgctgcccagccggcgatggccatgggattgaaaaaaaagcttgttttaatcgacggcagcagcgtggcgtaccgcgcctttttcgccttgccgcttttgcataacgacaaaggcatccatacgaacgccgtctacgggtttacgatgatgttgaataaaattttggcggaagaagagccaactcatatgcttgtcgcgtttgacgccgggaaaacgacgttccggcatgaagcgtttcaagagtataaaggtgggcgccagcagacgccaccggagctgtcggagcagtttccgctgttgcgcgagctgctgagggcgtatcgcatccccgcctatgaactcgagaactacgaagcggacgatattatcggaacgcttgccgcccgcgctgagcaggaagggtttgaggtgaaagtcatttccggcgaccgcgatctgacccagctcgcctccccccatgtgacggtggacattacgaaaaaagggattaccgatatcgaaccgtacacgccggaggcggtccgcgaaaaatacggcttaactccggaacaaatcgttgatttgaaaggattgatgggcgacaaatcggacaacattcccggagtgccgggcatcggggaaaagacggcggtcaagctgctcaagcaattcggcacggtcgaaaacgtgcttgcctccattgacgagatcaaaggcgaaaagttgaaagaaacgctgcgccaacaccgggagatggcgctgttaagcaaaaagctcgccgccattcgccgcgacgccccggtcgagctctcgcttgatgacatcgtctatcaaggggaagaccgggagaaagtggtcgctttatttaaagagcttgggtttcaatcgtttttagagaaaatggaatcgccgtcatcagaagaggaaaaaccgcttgccaagatggcatttacgcttgctgaccgcgtgacggaggagatgcttgccgacaaggcggcgcttgtcgttgaagtggtcgaggaaaattatcatgatgcgccgatcgtcggcatcgctgtggtcaacgaacatggacggtttttcctgcgcccggagacggcgcttgccgatccgcagtttgtcgcctggcttggtgatgaaacgaagaaaaaaagcatgtttgactcaaagcgcgcggcagtcgccttgaaatggaaaggaattgagctatgcggcgtttcctttgatttattgctggccgcctatttgcttgatccggcgcaaggtgttgatgatgtggctgccgcagcaaaaatgaagcaatacgaagcggtgcgctcggatgaagcggtgtatggcaaaggggcgaagcgggccgtgccggatgagccagtgctcgccgagcatctcgtccgcaaggcggcggcgatttgggcgctcgaacgtccgtttttggatgagctgcgccgcaacgaacaagatcggttgctcgtcgagctcgagcagccgttgtcttcgattttggcggaaatggaatttgccggagtgaaagtggatacgaagcggctcgaacagatgggcgaagagctcgccgagcagctgcgcacggtcgagcagcgcatttatgagctcgccggccaagaattcaacatcaattcaccgaaacagctcggcgtcattttatttgaaaaactgcagctgcccgtcttgaaaaaaacgaaaaccggctactccacttcggcggatgtgcttgaaaaacttgcgccttatcacgagatcgtggaaaacattttgcattaccgccagcttggcaagttgcagtcgacgtatattgaaggattgctgaaagtcgtgcgacccgatacaaagaaggtgcatacgattttcaatcaggcgttgacgcaaaccggacggctcagctcgacggagccgaacttgcaaaacattccgattcggcttgaggaaggacggaaaatccgccaagcgttcgtgccgtcggagtctgattggctcattttcgctgccgactactcgcaaattgagttgcgcgtcctcgcccatattgcggaagatgacaatttaatggaagcgttccgccgcgatttggatatccatacgaaaacagcgatggacattttccaagtgagcgaggacgaagtgacgcccaacatgcgccgtcaggcgaaggcggtcaactttgggatcgtttacgggatcagtgattacggcttggcgcaaaacttaaatatttcacgcaaagaggccgctgaattcatcgagcgctacttcgaaagcttccctggcgtgaagcggtatatggaaaacattgtgcaagaagcaaaacagaaagggtatgtgacgacgctgctgcatcggcgccgctatttgccggatatcacgagccgcaacattaacgtccgcagctttgctgaacggatggcgatgaacacgccgattcaagggagcgccgctgacattattaaaaaggcgatgatcgatctgaacgctagactgaaggaagagcggctgcaagcgcgccttttgctacaggtgcatgacgagctcattttggaggcgccgaaagaagagatggagcggctgtgccggctcgttccggaagtgatggagcaagcggtcacacttcgcgtgccgctcaaagtcgattaccattatggctcgacgtggtatgacgcgaaataaaaaggatcc

SEQ ID NO: 2468 - DNA, 2712 bp, Artificial Sequence
  Description of Artificial Sequence: Synthetic DNA sequence of Bacillus caldolyticus EA1 DNA polymerase F805L
atgaaatacctgctgccgaccgctgctgctggtctgctgctcctcgctgcccagccggcgatggccatgggattgaaaaaaaagcttgttttaatcgacggcagcagcgtggcgtaccgcgcctttttcgccttgccgcttttgcataacgacaaaggcatccatacgaacgccgtctacgggtttacgatgatgttgaataaaattttggcggaagaagagccaactcatatgcttgtcgcgtttgacgccgggaaaacgacgttccggcatgaagcgtttcaagagtataaaggtgggcgccagcagacgccaccggagctgtcggagcagtttccgctgttgcgcgagctgctgagggcgtatcgcatccccgcctatgaactcgagaactacgaagcggacgatattatcggaacgcttgccgcccgcgctgagcaggaagggtttgaggtgaaagtcatttccggcgaccgcgatctgacccagctcgcctccccccatgtgacggtggacattacgaaaaaagggattaccgatatcgaaccgtacacgccggaggcggtccgcgaaaaatacggcttaactccggaacaaatcgttgatttgaaaggattgatgggcgacaaatcggacaacattcccggagtgccgggcatcggggaaaagacggcggtcaagctgctcaagcaattcggcacggtcgaaaacgtgcttgcctccattgacgagatcaaaggcgaaaagttgaaagaaacgctgcgccaacaccgggagatggcgctgttaagcaaaaagctcgccgccattcgccgcgacgccccggtcgagctctcgcttgatgacatcgtctatcaaggggaagaccgggagaaagtggtcgctttatttaaagagcttgggtttcaatcgtttttagagaaaatggaatcgccgtcatcagaagaggaaaaaccgcttgccaagatggcatttacgcttgctgaccgcgtgacggaggagatgcttgccgacaaggcggcgcttgtcgttgaagtggtcgaggaaaattatcatgatgcgccgatcgtcggcatcgctgtggtcaacgaacatggacggtttttcctgcgcccggagacggcgcttgccgatccgcagtttgtcgcctggcttggtgatgaaacgaagaaaaaaagcatgtttgactcaaagcgcgcggcagtcgccttgaaatggaaaggaattgagctatgcggcgtttcctttgatttattgctggccgcctatttgcttgatccggcgcaaggtgttgatgatgtggctgccgcagcaaaaatgaagcaatacgaagcggtgcgctcggatgaagcggtgtatggcaaaggggcgaagcgggccgtgccggatgagccagtgctcgccgagcatctcgtccgcaaggcggcggcgatttgggcgctcgaacgtccgtttttggatgagctgcgccgcaacgaacaagatcggttgctcgtcgagctcgagcagccgttgtcttcgattttggcggaaatggaatttgccggagtgaaagtggatacgaagcggctcgaacagatgggcgaagagctcgccgagcagctgcgcacggtcgagcagcgcatttatgagctcgccggccaagaattcaacatcaattcaccgaaacagctcggcgtcattttatttgaaaaactgcagctgcccgtcttgaaaaaaacgaaaaccggctactccacttcggcggatgtgcttgaaaaacttgcgccttatcacgagatcgtggaaaacattttgcattaccgccagcttggcaagttgcagtcgacgtatattgaaggattgctgaaagtcgtgcgacccgatacaaagaaggtgcatacgattttcaatcaggcgttgacgcaaaccggacggctcagctcgacggagccgaacttgcaaaacattccgattcggcttgaggaaggacggaaaatccgccaagcgttcgtgccgtcggagtctgattggctcattttcgctgccgactactcgcaaattgagttgcgcgtcctcgcccatattgcggaagatgacaatttaatggaagcgttccgccgcgatttggatatccatacgaaaacagcgatggacattttccaagtgagcgaggacgaagtgacgcccaacatgcgccgtcaggcgaaggcggtcaactttgggatcgtttacgggatcagtgattacggcttggcgcaaaacttaaatatttcacgcaaagaggccgctgaattcatcgagcgctacttcgaaagcttccctggcgtgaagcggtatatggaaaacattgtgcaagaagcaaaacagaaagggtatgtgacgacgctgctgcatcggcgccgctatttgccggatatcacgagccgcaacttaaacgtccgcagctttgctgaacggatggcgatgaacacgccgattcaagggagcgccgctgacattattaaaaaggcgatgatcgatctgaacgctagactgaaggaagagcggctgcaagcgcgccttttgctacaggtgcatgacgagctcattttggaggcgccgaaagaagagatggagcggctgtgccggctcgttccggaagtgatggagcaagcggtcacacttcgcgtgccgctcaaagtcgattaccattatggctcgacgtggtatgacgcgaaataaaaaggatcc

SEQ ID NO: 2469 - DNA, 2712 bp, Artificial Sequence
  Description of Artificial Sequence: Synthetic DNA sequence of Bacillus caldolyticus EA1 DNA polymerase F805K
atgaaatacctgctgccgaccgctgctgctggtctgctgctcctcgctgcccagccggcgatggccatgggattgaaaaaaaagcttgttttaatcgacggcagcagcgtggcgtaccgcgcctttttcgccttgccgcttttgcataacgacaaaggcatccatacgaacgccgtctacgggtttacgatgatgttgaataaaattttggcggaagaagagccaactcatatgcttgtcgcgtttgacgccgggaaaacgacgttccggcatgaagcgtttcaagagtataaaggtgggcgccagcagacgccaccggagctgtcggagcagtttccgctgttgcgcgagctgctgagggcgtatcgcatccccgcctatgaactcgagaactacgaagcggacgatattatcggaacgcttgccgcccgcgctgagcaggaagggtttgaggtgaaagtcatttccggcgaccgcgatctgacccagctcgcctccccccatgtgacggtggacattacgaaaaaagggattaccgatatcgaaccgtacacgccggaggcggtccgcgaaaaatacggcttaactccggaacaaatcgttgatttgaaaggattgatgggcgacaaatcggacaacattcccggagtgccgggcatcggggaaaagacggcggtcaagctgctcaagcaattcggcacggtcgaaaacgtgcttgcctccattgacgagatcaaaggcgaaaagttgaaagaaacgctgcgccaacaccgggagatggcgctgttaagcaaaaagctcgccgccattcgccgcgacgccccggtcgagctctcgcttgatgacatcgtctatcaaggggaagaccgggagaaagtggtcgctttatttaaagagcttgggtttcaatcgtttttagagaaaatggaatcgccgtcatcagaagaggaaaaaccgcttgccaagatggcatttacgcttgctgaccgcgtgacggaggagatgcttgccgacaaggcggcgcttgtcgttgaagtggtcgaggaaaattatcatgatgcgccgatcgtcggcatcgctgtggtcaacgaacatggacggtttttcctgcgcccggagacggcgcttgccgatccgcagtttgtcgcctggcttggtgatgaaacgaagaaaaaaagcatgtttgactcaaagcgcgcggcagtcgccttgaaatggaaaggaattgagctatgcggcgtttcctttgatttattgctggccgcctatttgcttgatccggcgcaaggtgttgatgatgtggctgccgcagcaaaaatgaagcaatacgaagcggtgcgctcggatgaagcggtgtatggcaaaggggcgaagcgggccgtgccggatgagccagtgctcgccgagcatctcgtccgcaaggcggcggcgatttgggcgctcgaacgtccgtttttggatgagctgcgccgcaacgaacaagatcggttgctcgtcgagctcgagcagccgttgtcttcgattttggcggaaatggaatttgccggagtgaaagtggatacgaagcggctcgaacagatgggcgaagagctcgccgagcagctgcgcacggtcgagcagcgcatttatgagctcgccggccaagaattcaacatcaattcaccgaaacagctcggcgtcattttatttgaaaaactgcagctgcccgtcttgaaaaaaacgaaaaccggctactccacttcggcggatgtgcttgaaaaacttgcgccttatcacgagatcgtggaaaacattttgcattaccgccagcttggcaagttgcagtcgacgtatattgaaggattgctgaaagtcgtgcgacccgatacaaagaaggtgcatacgattttcaatcaggcgttgacgcaaaccggacggctcagctcgacggagccgaacttgcaaaacattccgattcggcttgaggaaggacggaaaatccgccaagcgttcgtgccgtcggagtctgattggctcattttcgctgccgactactcgcaaattgagttgcgcgtcctcgcccatattgcggaagatgacaatttaatggaagcgttccgccgcgatttggatatccatacgaaaacagcgatggacattttccaagtgagcgaggacgaagtgacgcccaacatgcgccgtcaggcgaaggcggtcaactttgggatcgtttacgggatcagtgattacggcttggcgcaaaacttaaatatttcacgcaaagaggccgctgaattcatcgagcgctacttcgaaagcttccctggcgtgaagcggtatatggaaaacattgtgcaagaagcaaaacagaaagggtatgtgacgacgctgctgcatcggcgccgctatttgccggatatcacgagccgcaacaaaaacgtccgcagctttgctgaacggatggcgatgaacacgccgattcaagggagcgccgctgacattattaaaaaggcgatgatcgatctgaacgctagactgaaggaagagcggctgcaagcgcgccttttgctacaggtgcatgacgagctcattttggaggcgccgaaagaagagatggagcggctgtgccggctcgttccggaagtgatggagcaagcggtcacacttcgcgtgccgctcaaagtcgattaccattatggctcgacgtggtatgacgcgaaataaaaaggatcc

SEQ ID NO: 2470 - DNA, 2712 bp, Artificial Sequence
  Description of Artificial Sequence: Synthetic DNA sequence of Bacillus caldolyticus EA1 DNA polymerase F805E
atgaaatacctgctgccgaccgctgctgctggtctgctgctcctcgctgcccagccggcgatggccatgggattgaaaaaaaagcttgttttaatcgacggcagcagcgtggcgtaccgcgcctttttcgccttgccgcttttgcataacgacaaaggcatccatacgaacgccgtctacgggtttacgatgatgttgaataaaattttggcggaagaagagccaactcatatgcttgtcgcgtttgacgccgggaaaacgacgttccggcatgaagcgtttcaagagtataaaggtgggcgccagcagacgccaccggagctgtcggagcagtttccgctgttgcgcgagctgctgagggcgtatcgcatccccgcctatgaactcgagaactacgaagcggacgatattatcggaacgcttgccgcccgcgctgagcaggaagggtttgaggtgaaagtcatttccggcgaccgcgatctgacccagctcgcctccccccatgtgacggtggacattacgaaaaaagggattaccgatatcgaaccgtacacgccggaggcggtccgcgaaaaatacggcttaactccggaacaaatcgttgatttgaaaggattgatgggcgacaaatcggacaacattcccggagtgccgggcatcggggaaaagacggcggtcaagctgctcaagcaattcggcacggtcgaaaacgtgcttgcctccattgacgagatcaaaggcgaaaagttgaaagaaacgctgcgccaacaccgggagatggcgctgttaagcaaaaagctcgccgccattcgccgcgacgccccggtcgagctctcgcttgatgacatcgtctatcaaggggaagaccgggagaaagtggtcgctttatttaaagagcttgggtttcaatcgtttttagagaaaatggaatcgccgtcatcagaagaggaaaaaccgcttgccaagatggcatttacgcttgctgaccgcgtgacggaggagatgcttgccgacaaggcggcgcttgtcgttgaagtggtcgaggaaaattatcatgatgcgccgatcgtcggcatcgctgtggtcaacgaacatggacggtttttcctgcgcccggagacggcgcttgccgatccgcagtttgtcgcctggcttggtgatgaaacgaagaaaaaaagcatgtttgactcaaagcgcgcggcagtcgccttgaaatggaaaggaattgagctatgcggcgtttcctttgatttattgctggccgcctatttgcttgatccggcgcaaggtgttgatgatgtggctgccgcagcaaaaatgaagcaatacgaagcggtgcgctcggatgaagcggtgtatggcaaaggggcgaagcgggccgtgccggatgagccagtgctcgccgagcatctcgtccgcaaggcggcggcgatttgggcgctcgaacgtccgtttttggatgagctgcgccgcaacgaacaagatcggttgctcgtcgagctcgagcagccgttgtcttcgattttggcggaaatggaatttgccggagtgaaagtggatacgaagcggctcgaacagatgggcgaagagctcgccgagcagctgcgcacggtcgagcagcgcatttatgagctcgccggccaagaattcaacatcaattcaccgaaacagctcggcgtcattttatttgaaaaactgcagctgcccgtcttgaaaaaaacgaaaaccggctactccacttcggcggatgtgcttgaaaaacttgcgccttatcacgagatcgtggaaaacattttgcattaccgccagcttggcaagttgcagtcgacgtatattgaaggattgctgaaagtcgtgcgacccgatacaaagaaggtgcatacgattttcaatcaggcgttgacgcaaaccggacggctcagctcgacggagccgaacttgcaaaacattccgattcggcttgaggaaggacggaaaatccgccaagcgttcgtgccgtcggagtctgattggctcattttcgctgccgactactcgcaaattgagttgcgcgtcctcgcccatattgcggaagatgacaatttaatggaagcgttccgccgcgatttggatatccatacgaaaacagcgatggacattttccaagtgagcgaggacgaagtgacgcccaacatgcgccgtcaggcgaaggcggtcaactttgggatcgtttacgggatcagtgattacggcttggcgcaaaacttaaatatttcacgcaaagaggccgctgaattcatcgagcgctacttcgaaagcttccctggcgtgaagcggtatatggaaaacattgtgcaagaagcaaaacagaaagggtatgtgacgacgctgctgcatcggcgccgctatttgccggatatcacgagccgcaacgaaaacgtccgcagctttgctgaacggatggcgatgaacacgccgattcaagggagcgccgctgacattattaaaaaggcgatgatcgatctgaacgctagactgaaggaagagcggctgcaagcgcgccttttgctacaggtgcatgacgagctcattttggaggcgccgaaagaagagatggagcggctgtgccggctcgttccggaagtgatggagcaagcggtcacacttcgcgtgccgctcaaagtcgattaccattatggctcgacgtggtatgacgcgaaataaaaaggatcc

SEQ ID NO: 2471 - DNA, 2712 bp, Artificial Sequence
  Description of Artificial Sequence: Synthetic DNA sequence of Bacillus caldolyticus EA1 DNA polymerase F805D
atgaaatacctgctgccgaccgctgctgctggtctgctgctcctcgctgcccagccggcgatggccatgggattgaaaaaaaagcttgttttaatcgacggcagcagcgtggcgtaccgcgcctttttcgccttgccgcttttgcataacgacaaaggcatccatacgaacgccgtctacgggtttacgatgatgttgaataaaattttggcggaagaagagccaactcatatgcttgtcgcgtttgacgccgggaaaacgacgttccggcatgaagcgtttcaagagtataaaggtgggcgccagcagacgccaccggagctgtcggagcagtttccgctgttgcgcgagctgctgagggcgtatcgcatccccgcctatgaactcgagaactacgaagcggacgatattatcggaacgcttgccgcccgcgctgagcaggaagggtttgaggtgaaagtcatttccggcgaccgcgatctgacccagctcgcctccccccatgtgacggtggacattacgaaaaaagggattaccgatatcgaaccgtacacgccggaggcggtccgcgaaaaatacggcttaactccggaacaaatcgttgatttgaaaggattgatgggcgacaaatcggacaacattcccggagtgccgggcatcggggaaaagacggcggtcaagctgctcaagcaattcggcacggtcgaaaacgtgcttgcctccattgacgagatcaaaggcgaaaagttgaaagaaacgctgcgccaacaccgggagatggcgctgttaagcaaaaagctcgccgccattcgccgcgacgccccggtcgagctctcgcttgatgacatcgtctatcaaggggaagaccgggagaaagtggtcgctttatttaaagagcttgggtttcaatcgtttttagagaaaatggaatcgccgtcatcagaagaggaaaaaccgcttgccaagatggcatttacgcttgctgaccgcgtgacggaggagatgcttgccgacaaggcggcgcttgtcgttgaagtggtcgaggaaaattatcatgatgcgccgatcgtcggcatcgctgtggtcaacgaacatggacggtttttcctgcgcccggagacggcgcttgccgatccgcagtttgtcgcctggcttggtgatgaaacgaagaaaaaaagcatgtttgactcaaagcgcgcggcagtcgccttgaaatggaaaggaattgagctatgcggcgtttcctttgatttattgctggccgcctatttgcttgatccggcgcaaggtgttgatgatgtggctgccgcagcaaaaatgaagcaatacgaagcggtgcgctcggatgaagcggtgtatggcaaaggggcgaagcgggccgtgccggatgagccagtgctcgccgagcatctcgtccgcaaggcggcggcgatttgggcgctcgaacgtccgtttttggatgagctgcgccgcaacgaacaagatcggttgctcgtcgagctcgagcagccgttgtcttcgattttggcggaaatggaatttgccggagtgaaagtggatacgaagcggctcgaacagatgggcgaagagctcgccgagcagctgcgcacggtcgagcagcgcatttatgagctcgccggccaagaattcaacatcaattcaccgaaacagctcggcgtcattttatttgaaaaactgcagctgcccgtcttgaaaaaaacgaaaaccggctactccacttcggcggatgtgcttgaaaaacttgcgccttatcacgagatcgtggaaaacattttgcattaccgccagcttggcaagttgcagtcgacgtatattgaaggattgctgaaagtcgtgcgacccgatacaaagaaggtgcatacgattttcaatcaggcgttgacgcaaaccggacggctcagctcgacggagccgaacttgcaaaacattccgattcggcttgaggaaggacggaaaatccgccaagcgttcgtgccgtcggagtctgattggctcattttcgctgccgactactcgcaaattgagttgcgcgtcctcgcccatattgcggaagatgacaatttaatggaagcgttccgccgcgatttggatatccatacgaaaacagcgatggacattttccaagtgagcgaggacgaagtgacgcccaacatgcgccgtcaggcgaaggcggtcaactttgggatcgtttacgggatcagtgattacggcttggcgcaaaacttaaatatttcacgcaaagaggccgctgaattcatcgagcgctacttcgaaagcttccctggcgtgaagcggtatatggaaaacattgtgcaagaagcaaaacagaaagggtatgtgacgacgctgctgcatcggcgccgctatttgccggatatcacgagccgcaacgataacgtccgcagctttgctgaacggatggcgatgaacacgccgattcaagggagcgccgctgacattattaaaaaggcgatgatcgatctgaacgctagactgaaggaagagcggctgcaagcgcgccttttgctacaggtgcatgacgagctcattttggaggcgccgaaagaagagatggagcggctgtgccggctcgttccggaagtgatggagcaagcggtcacacttcgcgtgccgctcaaagtcgattaccattatggctcgacgtggtatgacgcgaaataaaaaggatcc

SEQ ID NO: 2472 - DNA, 2712 bp, Artificial Sequence
  Description of Artificial Sequence: Synthetic DNA sequence of Bacillus caldolyticus EA1 DNA polymerase F805S
atgaaatacctgctgccgaccgctgctgctggtctgctgctcctcgctgcccagccggcgatggccatgggattgaaaaaaaagcttgttttaatcgacggcagcagcgtggcgtaccgcgcctttttcgccttgccgcttttgcataacgacaaaggcatccatacgaacgccgtctacgggtttacgatgatgttgaataaaattttggcggaagaagagccaactcatatgcttgtcgcgtttgacgccgggaaaacgacgttccggcatgaagcgtttcaagagtataaaggtgggcgccagcagacgccaccggagctgtcggagcagtttccgctgttgcgcgagctgctgagggcgtatcgcatccccgcctatgaactcgagaactacgaagcggacgatattatcggaacgcttgccgcccgcgctgagcaggaagggtttgaggtgaaagtcatttccggcgaccgcgatctgacccagctcgcctccccccatgtgacggtggacattacgaaaaaagggattaccgatatcgaaccgtacacgccggaggcggtccgcgaaaaatacggcttaactccggaacaaatcgttgatttgaaaggattgatgggcgacaaatcggacaacattcccggagtgccgggcatcggggaaaagacggcggtcaagctgctcaagcaattcggcacggtcgaaaacgtgcttgcctccattgacgagatcaaaggcgaaaagttgaaagaaacgctgcgccaacaccgggagatggcgctgttaagcaaaaagctcgccgccattcgccgcgacgccccggtcgagctctcgcttgatgacatcgtctatcaaggggaagaccgggagaaagtggtcgctttatttaaagagcttgggtttcaatcgtttttagagaaaatggaatcgccgtcatcagaagaggaaaaaccgcttgccaagatggcatttacgcttgctgaccgcgtgacggaggagatgcttgccgacaaggcggcgcttgtcgttgaagtggtcgaggaaaattatcatgatgcgccgatcgtcggcatcgctgtggtcaacgaacatggacggtttttcctgcgcccggagacggcgcttgccgatccgcagtttgtcgcctggcttggtgatgaaacgaagaaaaaaagcatgtttgactcaaagcgcgcggcagtcgccttgaaatggaaaggaattgagctatgcggcgtttcctttgatttattgctggccgcctatttgcttgatccggcgcaaggtgttgatgatgtggctgccgcagcaaaaatgaagcaatacgaagcggtgcgctcggatgaagcggtgtatggcaaaggggcgaagcgggccgtgccggatgagccagtgctcgccgagcatctcgtccgcaaggcggcggcgatttgggcgctcgaacgtccgtttttggatgagctgcgccgcaacgaacaagatcggttgctcgtcgagctcgagcagccgttgtcttcgattttggcggaaatggaatttgccggagtgaaagtggatacgaagcggctcgaacagatgggcgaagagctcgccgagcagctgcgcacggtcgagcagcgcatttatgagctcgccggccaagaattcaacatcaattcaccgaaacagctcggcgtcattttatttgaaaaactgcagctgcccgtcttgaaaaaaacgaaaaccggctactccacttcggcggatgtgcttgaaaaacttgcgccttatcacgagatcgtggaaaacattttgcattaccgccagcttggcaagttgcagtcgacgtatattgaaggattgctgaaagtcgtgcgacccgatacaaagaaggtgcatacgattttcaatcaggcgttgacgcaaaccggacggctcagctcgacggagccgaacttgcaaaacattccgattcggcttgaggaaggacggaaaatccgccaagcgttcgtgccgtcggagtctgattggctcattttcgctgccgactactcgcaaattgagttgcgcgtcctcgcccatattgcggaagatgacaatttaatggaagcgttccgccgcgatttggatatccatacgaaaacagcgatggacattttccaagtgagcgaggacgaagtgacgcccaacatgcgccgtcaggcgaaggcggtcaactttgggatcgtttacgggatcagtgattacggcttggcgcaaaacttaaatatttcacgcaaagaggccgctgaattcatcgagcgctacttcgaaagcttccctggcgtgaagcggtatatggaaaacattgtgcaagaagcaaaacagaaagggtatgtgacgacgctgctgcatcggcgccgctatttgccggatatcacgagccgcaactctaacgtccgcagctttgctgaacggatggcgatgaacacgccgattcaagggagcgccgctgacattattaaaaaggcgatgatcgatctgaacgctagactgaaggaagagcggctgcaagcgcgccttttgctacaggtgcatgacgagctcattttggaggcgccgaaagaagagatggagcggctgtgccggctcgttccggaagtgatggagcaagcggtcacacttcgcgtgccgctcaaagtcgattaccattatggctcgacgtggtatgacgcgaaataaaaaggatcc

SEQ ID NO: 2473 - DNA, 2712 bp, Artificial Sequence
  Description of Artificial Sequence: Synthetic DNA sequence of Bacillus caldolyticus EA1 DNA polymerase F805Y
atgaaatacctgctgccgaccgctgctgctggtctgctgctcctcgctgcccagccggcgatggccatgggattgaaaaaaaagcttgttttaatcgacggcagcagcgtggcgtaccgcgcctttttcgccttgccgcttttgcataacgacaaaggcatccatacgaacgccgtctacgggtttacgatgatgttgaataaaattttggcggaagaagagccaactcatatgcttgtcgcgtttgacgccgggaaaacgacgttccggcatgaagcgtttcaagagtataaaggtgggcgccagcagacgccaccggagctgtcggagcagtttccgctgttgcgcgagctgctgagggcgtatcgcatccccgcctatgaactcgagaactacgaagcggacgatattatcggaacgcttgccgcccgcgctgagcaggaagggtttgaggtgaaagtcatttccggcgaccgcgatctgacccagctcgcctccccccatgtgacggtggacattacgaaaaaagggattaccgatatcgaaccgtacacgccggaggcggtccgcgaaaaatacggcttaactccggaacaaatcgttgatttgaaaggattgatgggcgacaaatcggacaacattcccggagtgccgggcatcggggaaaagacggcggtcaagctgctcaagcaattcggcacggtcgaaaacgtgcttgcctccattgacgagatcaaaggcgaaaagttgaaagaaacgctgcgccaacaccgggagatggcgctgttaagcaaaaagctcgccgccattcgccgcgacgccccggtcgagctctcgcttgatgacatcgtctatcaaggggaagaccgggagaaagtggtcgctttatttaaagagcttgggtttcaatcgtttttagagaaaatggaatcgccgtcatcagaagaggaaaaaccgcttgccaagatggcatttacgcttgctgaccgcgtgacggaggagatgcttgccgacaaggcggcgcttgtcgttgaagtggtcgaggaaaattatcatgatgcgccgatcgtcggcatcgctgtggtcaacgaacatggacggtttttcctgcgcccggagacggcgcttgccgatccgcagtttgtcgcctggcttggtgatgaaacgaagaaaaaaagcatgtttgactcaaagcgcgcggcagtcgccttgaaatggaaaggaattgagctatgcggcgtttcctttgatttattgctggccgcctatttgcttgatccggcgcaaggtgttgatgatgtggctgccgcagcaaaaatgaagcaatacgaagcggtgcgctcggatgaagcggtgtatggcaaaggggcgaagcgggccgtgccggatgagccagtgctcgccgagcatctcgtccgcaaggcggcggcgatttgggcgctcgaacgtccgtttttggatgagctgcgccgcaacgaacaagatcggttgctcgtcgagctcgagcagccgttgtcttcgattttggcggaaatggaatttgccggagtgaaagtggatacgaagcggctcgaacagatgggcgaagagctcgccgagcagctgcgcacggtcgagcagcgcatttatgagctcgccggccaagaattcaacatcaattcaccgaaacagctcggcgtcattttatttgaaaaactgcagctgcccgtcttgaaaaaaacgaaaaccggctactccacttcggcggatgtgcttgaaaaacttgcgccttatcacgagatcgtggaaaacattttgcattaccgccagcttggcaagttgcagtcgacgtatattgaaggattgctgaaagtcgtgcgacccgatacaaagaaggtgcatacgattttcaatcaggcgttgacgcaaaccggacggctcagctcgacggagccgaacttgcaaaacattccgattcggcttgaggaaggacggaaaatccgccaagcgttcgtgccgtcggagtctgattggctcattttcgctgccgactactcgcaaattgagttgcgcgtcctcgcccatattgcggaagatgacaatttaatggaagcgttccgccgcgatttggatatccatacgaaaacagcgatggacattttccaagtgagcgaggacgaagtgacgcccaacatgcgccgtcaggcgaaggcggtcaactttgggatcgtttacgggatcagtgattacggcttggcgcaaaacttaaatatttcacgcaaagaggccgctgaattcatcgagcgctacttcgaaagcttccctggcgtgaagcggtatatggaaaacattgtgcaagaagcaaaacagaaagggtatgtgacgacgctgctgcatcggcgccgctatttgccggatatcacgagccgcaactataacgtccgcagctttgctgaacggatggcgatgaacacgccgattcaagggagcgccgctgacattattaaaaaggcgatgatcgatctgaacgctagactgaaggaagagcggctgcaagcgcgccttttgctacaggtgcatgacgagctcattttggaggcgccgaaagaagagatggagcggctgtgccggctcgttccggaagtgatggagcaagcggtcacacttcgcgtgccgctcaaagtcgattaccattatggctcgacgtggtatgacgcgaaataaaaaggatcc

SEQ ID NO: 2474 - DNA, 2712 bp, Artificial Sequence
  Description of Artificial Sequence: Synthetic DNA sequence of Bacillus caldolyticus EA1 DNA polymerase F805W
atgaaatacctgctgccgaccgctgctgctggtctgctgctcctcgctgcccagccggcgatggccatgggattgaaaaaaaagcttgttttaatcgacggcagcagcgtggcgtaccgcgcctttttcgccttgccgcttttgcataacgacaaaggcatccatacgaacgccgtctacgggtttacgatgatgttgaataaaattttggcggaagaagagccaactcatatgcttgtcgcgtttgacgccgggaaaacgacgttccggcatgaagcgtttcaagagtataaaggtgggcgccagcagacgccaccggagctgtcggagcagtttccgctgttgcgcgagctgctgagggcgtatcgcatccccgcctatgaactcgagaactacgaagcggacgatattatcggaacgcttgccgcccgcgctgagcaggaagggtttgaggtgaaagtcatttccggcgaccgcgatctgacccagctcgcctccccccatgtgacggtggacattacgaaaaaagggattaccgatatcgaaccgtacacgccggaggcggtccgcgaaaaatacggcttaactccggaacaaatcgttgatttgaaaggattgatgggcgacaaatcggacaacattcccggagtgccgggcatcggggaaaagacggcggtcaagctgctcaagcaattcggcacggtcgaaaacgtgcttgcctccattgacgagatcaaaggcgaaaagttgaaagaaacgctgcgccaacaccgggagatggcgctgttaagcaaaaagctcgccgccattcgccgcgacgccccggtcgagctctcgcttgatgacatcgtctatcaaggggaagaccgggagaaagtggtcgctttatttaaagagcttgggtttcaatcgtttttagagaaaatggaatcgccgtcatcagaagaggaaaaaccgcttgccaagatggcatttacgcttgctgaccgcgtgacggaggagatgcttgccgacaaggcggcgcttgtcgttgaagtggtcgaggaaaattatcatgatgcgccgatcgtcggcatcgctgtggtcaacgaacatggacggtttttcctgcgcccggagacggcgcttgccgatccgcagtttgtcgcctggcttggtgatgaaacgaagaaaaaaagcatgtttgactcaaagcgcgcggcagtcgccttgaaatggaaaggaattgagctatgcggcgtttcctttgatttattgctggccgcctatttgcttgatccggcgcaaggtgttgatgatgtggctgccgcagcaaaaatgaagcaatacgaagcggtgcgctcggatgaagcggtgtatggcaaaggggcgaagcgggccgtgccggatgagccagtgctcgccgagcatctcgtccgcaaggcggcggcgatttgggcgctcgaacgtccgtttttggatgagctgcgccgcaacgaacaagatcggttgctcgtcgagctcgagcagccgttgtcttcgattttggcggaaatggaatttgccggagtgaaagtggatacgaagcggctcgaacagatgggcgaagagctcgccgagcagctgcgcacggtcgagcagcgcatttatgagctcgccggccaagaattcaacatcaattcaccgaaacagctcggcgtcattttatttgaaaaactgcagctgcccgtcttgaaaaaaacgaaaaccggctactccacttcggcggatgtgcttgaaaaacttgcgccttatcacgagatcgtggaaaacattttgcattaccgccagcttggcaagttgcagtcgacgtatattgaaggattgctgaaagtcgtgcgacccgatacaaagaaggtgcatacgattttcaatcaggcgttgacgcaaaccggacggctcagctcgacggagccgaacttgcaaaacattccgattcggcttgaggaaggacggaaaatccgccaagcgttcgtgccgtcggagtctgattggctcattttcgctgccgactactcgcaaattgagttgcgcgtcctcgcccatattgcggaagatgacaatttaatggaagcgttccgccgcgatttggatatccatacgaaaacagcgatggacattttccaagtgagcgaggacgaagtgacgcccaacatgcgccgtcaggcgaaggcggtcaactttgggatcgtttacgggatcagtgattacggcttggcgcaaaacttaaatatttcacgcaaagaggccgctgaattcatcgagcgctacttcgaaagcttccctggcgtgaagcggtatatggaaaacattgtgcaagaagcaaaacagaaagggtatgtgacgacgctgctgcatcggcgccgctatttgccggatatcacgagccgcaactggaacgtccgcagctttgctgaacggatggcgatgaacacgccgattcaagggagcgccgctgacattattaaaaaggcgatgatcgatctgaacgctagactgaaggaagagcggctgcaagcgcgccttttgctacaggtgcatgacgagctcattttggaggcgccgaaagaagagatggagcggctgtgccggctcgttccggaagtgatggagcaagcggtcacacttcgcgtgccgctcaaagtcgattaccattatggctcgacgtggtatgacgcgaaataaaaaggatcc

SEQ ID NO: 2475 - DNA, 2712 bp, Artificial Sequence
  Description of Artificial Sequence: Synthetic DNA sequence of Bacillus caldolyticus EA1 DNA polymerase F805P
atgaaatacctgctgccgaccgctgctgctggtctgctgctcctcgctgcccagccggcgatggccatgggattgaaaaaaaagcttgttttaatcgacggcagcagcgtggcgtaccgcgcctttttcgccttgccgcttttgcataacgacaaaggcatccatacgaacgccgtctacgggtttacgatgatgttgaataaaattttggcggaagaagagccaactcatatgcttgtcgcgtttgacgccgggaaaacgacgttccggcatgaagcgtttcaagagtataaaggtgggcgccagcagacgccaccggagctgtcggagcagtttccgctgttgcgcgagctgctgagggcgtatcgcatccccgcctatgaactcgagaactacgaagcggacgatattatcggaacgcttgccgcccgcgctgagcaggaagggtttgaggtgaaagtcatttccggcgaccgcgatctgacccagctcgcctccccccatgtgacggtggacattacgaaaaaagggattaccgatatcgaaccgtacacgccggaggcggtccgcgaaaaatacggcttaactccggaacaaatcgttgatttgaaaggattgatgggcgacaaatcggacaacattcccggagtgccgggcatcggggaaaagacggcggtcaagctgctcaagcaattcggcacggtcgaaaacgtgcttgcctccattgacgagatcaaaggcgaaaagttgaaagaaacgctgcgccaacaccgggagatggcgctgttaagcaaaaagctcgccgccattcgccgcgacgccccggtcgagctctcgcttgatgacatcgtctatcaaggggaagaccgggagaaagtggtcgctttatttaaagagcttgggtttcaatcgtttttagagaaaatggaatcgccgtcatcagaagaggaaaaaccgcttgccaagatggcatttacgcttgctgaccgcgtgacggaggagatgcttgccgacaaggcggcgcttgtcgttgaagtggtcgaggaaaattatcatgatgcgccgatcgtcggcatcgctgtggtcaacgaacatggacggtttttcctgcgcccggagacggcgcttgccgatccgcagtttgtcgcctggcttggtgatgaaacgaagaaaaaaagcatgtttgactcaaagcgcgcggcagtcgccttgaaatggaaaggaattgagctatgcggcgtttcctttgatttattgctggccgcctatttgcttgatccggcgcaaggtgttgatgatgtggctgccgcagcaaaaatgaagcaatacgaagcggtgcgctcggatgaagcggtgtatggcaaaggggcgaagcgggccgtgccggatgagccagtgctcgccgagcatctcgtccgcaaggcggcggcgatttgggcgctcgaacgtccgtttttggatgagctgcgccgcaacgaacaagatcggttgctcgtcgagctcgagcagccgttgtcttcgattttggcggaaatggaatttgccggagtgaaagtggatacgaagcggctcgaacagatgggcgaagagctcgccgagcagctgcgcacggtcgagcagcgcatttatgagctcgccggccaagaattcaacatcaattcaccgaaacagctcggcgtcattttatttgaaaaactgcagctgcccgtcttgaaaaaaacgaaaaccggctactccacttcggcggatgtgcttgaaaaacttgcgccttatcacgagatcgtggaaaacattttgcattaccgccagcttggcaagttgcagtcgacgtatattgaaggattgctgaaagtcgtgcgacccgatacaaagaaggtgcatacgattttcaatcaggcgttgacgcaaaccggacggctcagctcgacggagccgaacttgcaaaacattccgattcggcttgaggaaggacggaaaatccgccaagcgttcgtgccgtcggagtctgattggctcattttcgctgccgactactcgcaaattgagttgcgcgtcctcgcccatattgcggaagatgacaatttaatggaagcgttccgccgcgatttggatatccatacgaaaacagcgatggacattttccaagtgagcgaggacgaagtgacgcccaacatgcgccgtcaggcgaaggcggtcaactttgggatcgtttacgggatcagtgattacggcttggcgcaaaacttaaatatttcacgcaaagaggccgctgaattcatcgagcgctacttcgaaagcttccctggcgtgaagcggtatatggaaaacattgtgcaagaagcaaaacagaaagggtatgtgacgacgctgctgcatcggcgccgctatttgccggatatcacgagccgcaaccctaacgtccgcagctttgctgaacggatggcgatgaacacgccgattcaagggagcgccgctgacattattaaaaaggcgatgatcgatctgaacgctagactgaaggaagagcggctgcaagcgcgccttttgctacaggtgcatgacgagctcattttggaggcgccgaaagaagagatggagcggctgtgccggctcgttccggaagtgatggagcaagcggtcacacttcgcgtgccgctcaaagtcgattaccattatggctcgacgtggtatgacgcgaaataaaaaggatcc

SEQ ID NO: 2476 - DNA, 2712 bp, Artificial Sequence
  Description of Artificial Sequence: Synthetic DNA sequence of Bacillus caldolyticus EA1 DNA polymerase F805M
atgaaatacctgctgccgaccgctgctgctggtctgctgctcctcgctgcccagccggcgatggccatgggattgaaaaaaaagcttgttttaatcgacggcagcagcgtggcgtaccgcgcctttttcgccttgccgcttttgcataacgacaaaggcatccatacgaacgccgtctacgggtttacgatgatgttgaataaaattttggcggaagaagagccaactcatatgcttgtcgcgtttgacgccgggaaaacgacgttccggcatgaagcgtttcaagagtataaaggtgggcgccagcagacgccaccggagctgtcggagcagtttccgctgttgcgcgagctgctgagggcgtatcgcatccccgcctatgaactcgagaactacgaagcggacgatattatcggaacgcttgccgcccgcgctgagcaggaagggtttgaggtgaaagtcatttccggcgaccgcgatctgacccagctcgcctccccccatgtgacggtggacattacgaaaaaagggattaccgatatcgaaccgtacacgccggaggcggtccgcgaaaaatacggcttaactccggaacaaatcgttgatttgaaaggattgatgggcgacaaatcggacaacattcccggagtgccgggcatcggggaaaagacggcggtcaagctgctcaagcaattcggcacggtcgaaaacgtgcttgcctccattgacgagatcaaaggcgaaaagttgaaagaaacgctgcgccaacaccgggagatggcgctgttaagcaaaaagctcgccgccattcgccgcgacgccccggtcgagctctcgcttgatgacatcgtctatcaaggggaagaccgggagaaagtggtcgctttatttaaagagcttgggtttcaatcgtttttagagaaaatggaatcgccgtcatcagaagaggaaaaaccgcttgccaagatggcatttacgcttgctgaccgcgtgacggaggagatgcttgccgacaaggcggcgcttgtcgttgaagtggtcgaggaaaattatcatgatgcgccgatcgtcggcatcgctgtggtcaacgaacatggacggtttttcctgcgcccggagacggcgcttgccgatccgcagtttgtcgcctggcttggtgatgaaacgaagaaaaaaagcatgtttgactcaaagcgcgcggcagtcgccttgaaatggaaaggaattgagctatgcggcgtttcctttgatttattgctggccgcctatttgcttgatccggcgcaaggtgttgatgatgtggctgccgcagcaaaaatgaagcaatacgaagcggtgcgctcggatgaagcggtgtatggcaaaggggcgaagcgggccgtgccggatgagccagtgctcgccgagcatctcgtccgcaaggcggcggcgatttgggcgctcgaacgtccgtttttggatgagctgcgccgcaacgaacaagatcggttgctcgtcgagctcgagcagccgttgtcttcgattttggcggaaatggaatttgccggagtgaaagtggatacgaagcggctcgaacagatgggcgaagagctcgccgagcagctgcgcacggtcgagcagcgcatttatgagctcgccggccaagaattcaacatcaattcaccgaaacagctcggcgtcattttatttgaaaaactgcagctgcccgtcttgaaaaaaacgaaaaccggctactccacttcggcggatgtgcttgaaaaacttgcgccttatcacgagatcgtggaaaacattttgcattaccgccagcttggcaagttgcagtcgacgtatattgaaggattgctgaaagtcgtgcgacccgatacaaagaaggtgcatacgattttcaatcaggcgttgacgcaaaccggacggctcagctcgacggagccgaacttgcaaaacattccgattcggcttgaggaaggacggaaaatccgccaagcgttcgtgccgtcggagtctgattggctcattttcgctgccgactactcgcaaattgagttgcgcgtcctcgcccatattgcggaagatgacaatttaatggaagcgttccgccgcgatttggatatccatacgaaaacagcgatggacattttccaagtgagcgaggacgaagtgacgcccaacatgcgccgtcaggcgaaggcggtcaactttgggatcgtttacgggatcagtgattacggcttggcgcaaaacttaaatatttcacgcaaagaggccgctgaattcatcgagcgctacttcgaaagcttccctggcgtgaagcggtatatggaaaacattgtgcaagaagcaaaacagaaagggtatgtgacgacgctgctgcatcggcgccgctatttgccggatatcacgagccgcaacatgaacgtccgcagctttgctgaacggatggcgatgaacacgccgattcaagggagcgccgctgacattattaaaaaggcgatgatcgatctgaacgctagactgaaggaagagcggctgcaagcgcgccttttgctacaggtgcatgacgagctcattttggaggcgccgaaagaagagatggagcggctgtgccggctcgttccggaagtgatggagcaagcggtcacacttcgcgtgccgctcaaagtcgattaccattatggctcgacgtggtatgacgcgaaataaaaaggatcc

SEQ ID NO: 2477 - DNA, 2712 bp, Artificial Sequence
  Description of Artificial Sequence: Synthetic DNA sequence of Bacillus caldolyticus EA1 DNA polymerase F805T
atgaaatacctgctgccgaccgctgctgctggtctgctgctcctcgctgcccagccggcgatggccatgggattgaaaaaaaagcttgttttaatcgacggcagcagcgtggcgtaccgcgcctttttcgccttgccgcttttgcataacgacaaaggcatccatacgaacgccgtctacgggtttacgatgatgttgaataaaattttggcggaagaagagccaactcatatgcttgtcgcgtttgacgccgggaaaacgacgttccggcatgaagcgtttcaagagtataaaggtgggcgccagcagacgccaccggagctgtcggagcagtttccgctgttgcgcgagctgctgagggcgtatcgcatccccgcctatgaactcgagaactacgaagcggacgatattatcggaacgcttgccgcccgcgctgagcaggaagggtttgaggtgaaagtcatttccggcgaccgcgatctgacccagctcgcctccccccatgtgacggtggacattacgaaaaaagggattaccgatatcgaaccgtacacgccggaggcggtccgcgaaaaatacggcttaactccggaacaaatcgttgatttgaaaggattgatgggcgacaaatcggacaacattcccggagtgccgggcatcggggaaaagacggcggtcaagctgctcaagcaattcggcacggtcgaaaacgtgcttgcctccattgacgagatcaaaggcgaaaagttgaaagaaacgctgcgccaacaccgggagatggcgctgttaagcaaaaagctcgccgccattcgccgcgacgccccggtcgagctctcgcttgatgacatcgtctatcaaggggaagaccgggagaaagtggtcgctttatttaaagagcttgggtttcaatcgtttttagagaaaatggaatcgccgtcatcagaagaggaaaaaccgcttgccaagatggcatttacgcttgctgaccgcgtgacggaggagatgcttgccgacaaggcggcgcttgtcgttgaagtggtcgaggaaaattatcatgatgcgccgatcgtcggcatcgctgtggtcaacgaacatggacggtttttcctgcgcccggagacggcgcttgccgatccgcagtttgtcgcctggcttggtgatgaaacgaagaaaaaaagcatgtttgactcaaagcgcgcggcagtcgccttgaaatggaaaggaattgagctatgcggcgtttcctttgatttattgctggccgcctatttgcttgatccggcgcaaggtgttgatgatgtggctgccgcagcaaaaatgaagcaatacgaagcggtgcgctcggatgaagcggtgtatggcaaaggggcgaagcgggccgtgccggatgagccagtgctcgccgagcatctcgtccgcaaggcggcggcgatttgggcgctcgaacgtccgtttttggatgagctgcgccgcaacgaacaagatcggttgctcgtcgagctcgagcagccgttgtcttcgattttggcggaaatggaatttgccggagtgaaagtggatacgaagcggctcgaacagatgggcgaagagctcgccgagcagctgcgcacggtcgagcagcgcatttatgagctcgccggccaagaattcaacatcaattcaccgaaacagctcggcgtcattttatttgaaaaactgcagctgcccgtcttgaaaaaaacgaaaaccggctactccacttcggcggatgtgcttgaaaaacttgcgccttatcacgagatcgtggaaaacattttgcattaccgccagcttggcaagttgcagtcgacgtatattgaaggattgctgaaagtcgtgcgacccgatacaaagaaggtgcatacgattttcaatcaggcgttgacgcaaaccggacggctcagctcgacggagccgaacttgcaaaacattccgattcggcttgaggaaggacggaaaatccgccaagcgttcgtgccgtcggagtctgattggctcattttcgctgccgactactcgcaaattgagttgcgcgtcctcgcccatattgcggaagatgacaatttaatggaagcgttccgccgcgatttggatatccatacgaaaacagcgatggacattttccaagtgagcgaggacgaagtgacgcccaacatgcgccgtcaggcgaaggcggtcaactttgggatcgtttacgggatcagtgattacggcttggcgcaaaacttaaatatttcacgcaaagaggccgctgaattcatcgagcgctacttcgaaagcttccctggcgtgaagcggtatatggaaaacattgtgcaagaagcaaaacagaaagggtatgtgacgacgctgctgcatcggcgccgctatttgccggatatcacgagccgcaacactaacgtccgcagctttgctgaacggatggcgatgaacacgccgattcaagggagcgccgctgacattattaaaaaggcgatgatcgatctgaacgctagactgaaggaagagcggctgcaagcgcgccttttgctacaggtgcatgacgagctcattttggaggcgccgaaagaagagatggagcggctgtgccggctcgttccggaagtgatggagcaagcggtcacacttcgcgtgccgctcaaagtcgattaccattatggctcgacgtggtatgacgcgaaataaaaaggatcc

SEQ ID NO: 2478 - DNA, 2712 bp, Artificial Sequence
  Description of Artificial Sequence: Synthetic DNA sequence of Bacillus caldolyticus EA1 DNA polymerase F805N
atgaaatacctgctgccgaccgctgctgctggtctgctgctcctcgctgcccagccggcgatggccatgggattgaaaaaaaagcttgttttaatcgacggcagcagcgtggcgtaccgcgcctttttcgccttgccgcttttgcataacgacaaaggcatccatacgaacgccgtctacgggtttacgatgatgttgaataaaattttggcggaagaagagccaactcatatgcttgtcgcgtttgacgccgggaaaacgacgttccggcatgaagcgtttcaagagtataaaggtgggcgccagcagacgccaccggagctgtcggagcagtttccgctgttgcgcgagctgctgagggcgtatcgcatccccgcctatgaactcgagaactacgaagcggacgatattatcggaacgcttgccgcccgcgctgagcaggaagggtttgaggtgaaagtcatttccggcgaccgcgatctgacccagctcgcctccccccatgtgacggtggacattacgaaaaaagggattaccgatatcgaaccgtacacgccggaggcggtccgcgaaaaatacggcttaactccggaacaaatcgttgatttgaaaggattgatgggcgacaaatcggacaacattcccggagtgccgggcatcggggaaaagacggcggtcaagctgctcaagcaattcggcacggtcgaaaacgtgcttgcctccattgacgagatcaaaggcgaaaagttgaaagaaacgctgcgccaacaccgggagatggcgctgttaagcaaaaagctcgccgccattcgccgcgacgccccggtcgagctctcgcttgatgacatcgtctatcaaggggaagaccgggagaaagtggtcgctttatttaaagagcttgggtttcaatcgtttttagagaaaatggaatcgccgtcatcagaagaggaaaaaccgcttgccaagatggcatttacgcttgctgaccgcgtgacggaggagatgcttgccgacaaggcggcgcttgtcgttgaagtggtcgaggaaaattatcatgatgcgccgatcgtcggcatcgctgtggtcaacgaacatggacggtttttcctgcgcccggagacggcgcttgccgatccgcagtttgtcgcctggcttggtgatgaaacgaagaaaaaaagcatgtttgactcaaagcgcgcggcagtcgccttgaaatggaaaggaattgagctatgcggcgtttcctttgatttattgctggccgcctatttgcttgatccggcgcaaggtgttgatgatgtggctgccgcagcaaaaatgaagcaatacgaagcggtgcgctcggatgaagcggtgtatggcaaaggggcgaagcgggccgtgccggatgagccagtgctcgccgagcatctcgtccgcaaggcggcggcgatttgggcgctcgaacgtccgtttttggatgagctgcgccgcaacgaacaagatcggttgctcgtcgagctcgagcagccgttgtcttcgattttggcggaaatggaatttgccggagtgaaagtggatacgaagcggctcgaacagatgggcgaagagctcgccgagcagctgcgcacggtcgagcagcgcatttatgagctcgccggccaagaattcaacatcaattcaccgaaacagctcggcgtcattttatttgaaaaactgcagctgcccgtcttgaaaaaaacgaaaaccggctactccacttcggcggatgtgcttgaaaaacttgcgccttatcacgagatcgtggaaaacattttgcattaccgccagcttggcaagttgcagtcgacgtatattgaaggattgctgaaagtcgtgcgacccgatacaaagaaggtgcatacgattttcaatcaggcgttgacgcaaaccggacggctcagctcgacggagccgaacttgcaaaacattccgattcggcttgaggaaggacggaaaatccgccaagcgttcgtgccgtcggagtctgattggctcattttcgctgccgactactcgcaaattgagttgcgcgtcctcgcccatattgcggaagatgacaatttaatggaagcgttccgccgcgatttggatatccatacgaaaacagcgatggacattttccaagtgagcgaggacgaagtgacgcccaacatgcgccgtcaggcgaaggcggtcaactttgggatcgtttacgggatcagtgattacggcttggcgcaaaacttaaatatttcacgcaaagaggccgctgaattcatcgagcgctacttcgaaagcttccctggcgtgaagcggtatatggaaaacattgtgcaagaagcaaaacagaaagggtatgtgacgacgctgctgcatcggcgccgctatttgccggatatcacgagccgcaacaataacgtccgcagctttgctgaacggatggcgatgaacacgccgattcaagggagcgccgctgacattattaaaaaggcgatgatcgatctgaacgctagactgaaggaagagcggctgcaagcgcgccttttgctacaggtgcatgacgagctcattttggaggcgccgaaagaagagatggagcggctgtgccggctcgttccggaagtgatggagcaagcggtcacacttcgcgtgccgctcaaagtcgattaccattatggctcgacgtggtatgacgcgaaataaaaaggatcc

SEQ ID NO: 2479 - DNA, 2712 bp, Artificial Sequence
  Description of Artificial Sequence: Synthetic DNA sequence of Bacillus caldolyticus EA1 DNA polymerase F805V
atgaaatacctgctgccgaccgctgctgctggtctgctgctcctcgctgcccagccggcgatggccatgggattgaaaaaaaagcttgttttaatcgacggcagcagcgtggcgtaccgcgcctttttcgccttgccgcttttgcataacgacaaaggcatccatacgaacgccgtctacgggtttacgatgatgttgaataaaattttggcggaagaagagccaactcatatgcttgtcgcgtttgacgccgggaaaacgacgttccggcatgaagcgtttcaagagtataaaggtgggcgccagcagacgccaccggagctgtcggagcagtttccgctgttgcgcgagctgctgagggcgtatcgcatccccgcctatgaactcgagaactacgaagcggacgatattatcggaacgcttgccgcccgcgctgagcaggaagggtttgaggtgaaagtcatttccggcgaccgcgatctgacccagctcgcctccccccatgtgacggtggacattacgaaaaaagggattaccgatatcgaaccgtacacgccggaggcggtccgcgaaaaatacggcttaactccggaacaaatcgttgatttgaaaggattgatgggcgacaaatcggacaacattcccggagtgccgggcatcggggaaaagacggcggtcaagctgctcaagcaattcggcacggtcgaaaacgtgcttgcctccattgacgagatcaaaggcgaaaagttgaaagaaacgctgcgccaacaccgggagatggcgctgttaagcaaaaagctcgccgccattcgccgcgacgccccggtcgagctctcgcttgatgacatcgtctatcaaggggaagaccgggagaaagtggtcgctttatttaaagagcttgggtttcaatcgtttttagagaaaatggaatcgccgtcatcagaagaggaaaaaccgcttgccaagatggcatttacgcttgctgaccgcgtgacggaggagatgcttgccgacaaggcggcgcttgtcgttgaagtggtcgaggaaaattatcatgatgcgccgatcgtcggcatcgctgtggtcaacgaacatggacggtttttcctgcgcccggagacggcgcttgccgatccgcagtttgtcgcctggcttggtgatgaaacgaagaaaaaaagcatgtttgactcaaagcgcgcggcagtcgccttgaaatggaaaggaattgagctatgcggcgtttcctttgatttattgctggccgcctatttgcttgatccggcgcaaggtgttgatgatgtggctgccgcagcaaaaatgaagcaatacgaagcggtgcgctcggatgaagcggtgtatggcaaaggggcgaagcgggccgtgccggatgagccagtgctcgccgagcatctcgtccgcaaggcggcggcgatttgggcgctcgaacgtccgtttttggatgagctgcgccgcaacgaacaagatcggttgctcgtcgagctcgagcagccgttgtcttcgattttggcggaaatggaatttgccggagtgaaagtggatacgaagcggctcgaacagatgggcgaagagctcgccgagcagctgcgcacggtcgagcagcgcatttatgagctcgccggccaagaattcaacatcaattcaccgaaacagctcggcgtcattttatttgaaaaactgcagctgcccgtcttgaaaaaaacgaaaaccggctactccacttcggcggatgtgcttgaaaaacttgcgccttatcacgagatcgtggaaaacattttgcattaccgccagcttggcaagttgcagtcgacgtatattgaaggattgctgaaagtcgtgcgacccgatacaaagaaggtgcatacgattttcaatcaggcgttgacgcaaaccggacggctcagctcgacggagccgaacttgcaaaacattccgattcggcttgaggaaggacggaaaatccgccaagcgttcgtgccgtcggagtctgattggctcattttcgctgccgactactcgcaaattgagttgcgcgtcctcgcccatattgcggaagatgacaatttaatggaagcgttccgccgcgatttggatatccatacgaaaacagcgatggacattttccaagtgagcgaggacgaagtgacgcccaacatgcgccgtcaggcgaaggcggtcaactttgggatcgtttacgggatcagtgattacggcttggcgcaaaacttaaatatttcacgcaaagaggccgctgaattcatcgagcgctacttcgaaagcttccctggcgtgaagcggtatatggaaaacattgtgcaagaagcaaaacagaaagggtatgtgacgacgctgctgcatcggcgccgctatttgccggatatcacgagccgcaacgtcaacgtccgcagctttgctgaacggatggcgatgaacacgccgattcaagggagcgccgctgacattattaaaaaggcgatgatcgatctgaacgctagactgaaggaagagcggctgcaagcgcgccttttgctacaggtgcatgacgagctcattttggaggcgccgaaagaagagatggagcggctgtgccggctcgttccggaagtgatggagcaagcggtcacacttcgcgtgccgctcaaagtcgattaccattatggctcgacgtggtatgacgcgaaataaaaaggatcc

SEQ ID NO: 2480 - DNA, 2712 bp, Artificial Sequence
  Description of Artificial Sequence: Synthetic DNA sequence of Bacillus caldolyticus EA1 DNA polymerase N806A
atgaaatacctgctgccgaccgctgctgctggtctgctgctcctcgctgcccagccggcgatggccatgggattgaaaaaaaagcttgttttaatcgacggcagcagcgtggcgtaccgcgcctttttcgccttgccgcttttgcataacgacaaaggcatccatacgaacgccgtctacgggtttacgatgatgttgaataaaattttggcggaagaagagccaactcatatgcttgtcgcgtttgacgccgggaaaacgacgttccggcatgaagcgtttcaagagtataaaggtgggcgccagcagacgccaccggagctgtcggagcagtttccgctgttgcgcgagctgctgagggcgtatcgcatccccgcctatgaactcgagaactacgaagcggacgatattatcggaacgcttgccgcccgcgctgagcaggaagggtttgaggtgaaagtcatttccggcgaccgcgatctgacccagctcgcctccccccatgtgacggtggacattacgaaaaaagggattaccgatatcgaaccgtacacgccggaggcggtccgcgaaaaatacggcttaactccggaacaaatcgttgatttgaaaggattgatgggcgacaaatcggacaacattcccggagtgccgggcatcggggaaaagacggcggtcaagctgctcaagcaattcggcacggtcgaaaacgtgcttgcctccattgacgagatcaaaggcgaaaagttgaaagaaacgctgcgccaacaccgggagatggcgctgttaagcaaaaagctcgccgccattcgccgcgacgccccggtcgagctctcgcttgatgacatcgtctatcaaggggaagaccgggagaaagtggtcgctttatttaaagagcttgggtttcaatcgtttttagagaaaatggaatcgccgtcatcagaagaggaaaaaccgcttgccaagatggcatttacgcttgctgaccgcgtgacggaggagatgcttgccgacaaggcggcgcttgtcgttgaagtggtcgaggaaaattatcatgatgcgccgatcgtcggcatcgctgtggtcaacgaacatggacggtttttcctgcgcccggagacggcgcttgccgatccgcagtttgtcgcctggcttggtgatgaaacgaagaaaaaaagcatgtttgactcaaagcgcgcggcagtcgccttgaaatggaaaggaattgagctatgcggcgtttcctttgatttattgctggccgcctatttgcttgatccggcgcaaggtgttgatgatgtggctgccgcagcaaaaatgaagcaatacgaagcggtgcgctcggatgaagcggtgtatggcaaaggggcgaagcgggccgtgccggatgagccagtgctcgccgagcatctcgtccgcaaggcggcggcgatttgggcgctcgaacgtccgtttttggatgagctgcgccgcaacgaacaagatcggttgctcgtcgagctcgagcagccgttgtcttcgattttggcggaaatggaatttgccggagtgaaagtggatacgaagcggctcgaacagatgggcgaagagctcgccgagcagctgcgcacggtcgagcagcgcatttatgagctcgccggccaagaattcaacatcaattcaccgaaacagctcggcgtcattttatttgaaaaactgcagctgcccgtcttgaaaaaaacgaaaaccggctactccacttcggcggatgtgcttgaaaaacttgcgccttatcacgagatcgtggaaaacattttgcattaccgccagcttggcaagttgcagtcgacgtatattgaaggattgctgaaagtcgtgcgacccgatacaaagaaggtgcatacgattttcaatcaggcgttgacgcaaaccggacggctcagctcgacggagccgaacttgcaaaacattccgattcggcttgaggaaggacggaaaatccgccaagcgttcgtgccgtcggagtctgattggctcattttcgctgccgactactcgcaaattgagttgcgcgtcctcgcccatattgcggaagatgacaatttaatggaagcgttccgccgcgatttggatatccatacgaaaacagcgatggacattttccaagtgagcgaggacgaagtgacgcccaacatgcgccgtcaggcgaaggcggtcaactttgggatcgtttacgggatcagtgattacggcttggcgcaaaacttaaatatttcacgcaaagaggccgctgaattcatcgagcgctacttcgaaagcttccctggcgtgaagcggtatatggaaaacattgtgcaagaagcaaaacagaaagggtatgtgacgacgctgctgcatcggcgccgctatttgccggatatcacgagccgcaacttcgctgtccgcagctttgctgaacggatggcgatgaacacgccgattcaagggagcgccgctgacattattaaaaaggcgatgatcgatctgaacgctagactgaaggaagagcggctgcaagcgcgccttttgctacaggtgcatgacgagctcattttggaggcgccgaaagaagagatggagcggctgtgccggctcgttccggaagtgatggagcaagcggtcacacttcgcgtgccgctcaaagtcgattaccattatggctcgacgtggtatgacgcgaaataaaaaggatcc

SEQ ID NO: 2481 - DNA, 2712 bp, Artificial Sequence
  Description of Artificial Sequence: Synthetic DNA sequence of Bacillus caldolyticus EA1 DNA polymerase N806R
atgaaatacctgctgccgaccgctgctgctggtctgctgctcctcgctgcccagccggcgatggccatgggattgaaaaaaaagcttgttttaatcgacggcagcagcgtggcgtaccgcgcctttttcgccttgccgcttttgcataacgacaaaggcatccatacgaacgccgtctacgggtttacgatgatgttgaataaaattttggcggaagaagagccaactcatatgcttgtcgcgtttgacgccgggaaaacgacgttccggcatgaagcgtttcaagagtataaaggtgggcgccagcagacgccaccggagctgtcggagcagtttccgctgttgcgcgagctgctgagggcgtatcgcatccccgcctatgaactcgagaactacgaagcggacgatattatcggaacgcttgccgcccgcgctgagcaggaagggtttgaggtgaaagtcatttccggcgaccgcgatctgacccagctcgcctccccccatgtgacggtggacattacgaaaaaagggattaccgatatcgaaccgtacacgccggaggcggtccgcgaaaaatacggcttaactccggaacaaatcgttgatttgaaaggattgatgggcgacaaatcggacaacattcccggagtgccgggcatcggggaaaagacggcggtcaagctgctcaagcaattcggcacggtcgaaaacgtgcttgcctccattgacgagatcaaaggcgaaaagttgaaagaaacgctgcgccaacaccgggagatggcgctgttaagcaaaaagctcgccgccattcgccgcgacgccccggtcgagctctcgcttgatgacatcgtctatcaaggggaagaccgggagaaagtggtcgctttatttaaagagcttgggtttcaatcgtttttagagaaaatggaatcgccgtcatcagaagaggaaaaaccgcttgccaagatggcatttacgcttgctgaccgcgtgacggaggagatgcttgccgacaaggcggcgcttgtcgttgaagtggtcgaggaaaattatcatgatgcgccgatcgtcggcatcgctgtggtcaacgaacatggacggtttttcctgcgcccggagacggcgcttgccgatccgcagtttgtcgcctggcttggtgatgaaacgaagaaaaaaagcatgtttgactcaaagcgcgcggcagtcgccttgaaatggaaaggaattgagctatgcggcgtttcctttgatttattgctggccgcctatttgcttgatccggcgcaaggtgttgatgatgtggctgccgcagcaaaaatgaagcaatacgaagcggtgcgctcggatgaagcggtgtatggcaaaggggcgaagcgggccgtgccggatgagccagtgctcgccgagcatctcgtccgcaaggcggcggcgatttgggcgctcgaacgtccgtttttggatgagctgcgccgcaacgaacaagatcggttgctcgtcgagctcgagcagccgttgtcttcgattttggcggaaatggaatttgccggagtgaaagtggatacgaagcggctcgaacagatgggcgaagagctcgccgagcagctgcgcacggtcgagcagcgcatttatgagctcgccggccaagaattcaacatcaattcaccgaaacagctcggcgtcattttatttgaaaaactgcagctgcccgtcttgaaaaaaacgaaaaccggctactccacttcggcggatgtgcttgaaaaacttgcgccttatcacgagatcgtggaaaacattttgcattaccgccagcttggcaagttgcagtcgacgtatattgaaggattgctgaaagtcgtgcgacccgatacaaagaaggtgcatacgattttcaatcaggcgttgacgcaaaccggacggctcagctcgacggagccgaacttgcaaaacattccgattcggcttgaggaaggacggaaaatccgccaagcgttcgtgccgtcggagtctgattggctcattttcgctgccgactactcgcaaattgagttgcgcgtcctcgcccatattgcggaagatgacaatttaatggaagcgttccgccgcgatttggatatccatacgaaaacagcgatggacattttccaagtgagcgaggacgaagtgacgcccaacatgcgccgtcaggcgaaggcggtcaactttgggatcgtttacgggatcagtgattacggcttggcgcaaaacttaaatatttcacgcaaagaggccgctgaattcatcgagcgctacttcgaaagcttccctggcgtgaagcggtatatggaaaacattgtgcaagaagcaaaacagaaagggtatgtgacgacgctgctgcatcggcgccgctatttgccggatatcacgagccgcaacttccgagtccgcagctttgctgaacggatggcgatgaacacgccgattcaagggagcgccgctgacattattaaaaaggcgatgatcgatctgaacgctagactgaaggaagagcggctgcaagcgcgccttttgctacaggtgcatgacgagctcattttggaggcgccgaaagaagagatggagcggctgtgccggctcgttccggaagtgatggagcaagcggtcacacttcgcgtgccgctcaaagtcgattaccattatggctcgacgtggtatgacgcgaaataaaaaggatcc

SEQ ID NO: 2482 - DNA, 2712 bp, Artificial Sequence
  Description of Artificial Sequence: Synthetic DNA sequence of Bacillus caldolyticus EA1 DNA polymerase N806C
atgaaatacctgctgccgaccgctgctgctggtctgctgctcctcgctgcccagccggcgatggccatgggattgaaaaaaaagcttgttttaatcgacggcagcagcgtggcgtaccgcgcctttttcgccttgccgcttttgcataacgacaaaggcatccatacgaacgccgtctacgggtttacgatgatgttgaataaaattttggcggaagaagagccaactcatatgcttgtcgcgtttgacgccgggaaaacgacgttccggcatgaagcgtttcaagagtataaaggtgggcgccagcagacgccaccggagctgtcggagcagtttccgctgttgcgcgagctgctgagggcgtatcgcatccccgcctatgaactcgagaactacgaagcggacgatattatcggaacgcttgccgcccgcgctgagcaggaagggtttgaggtgaaagtcatttccggcgaccgcgatctgacccagctcgcctccccccatgtgacggtggacattacgaaaaaagggattaccgatatcgaaccgtacacgccggaggcggtccgcgaaaaatacggcttaactccggaacaaatcgttgatttgaaaggattgatgggcgacaaatcggacaacattcccggagtgccgggcatcggggaaaagacggcggtcaagctgctcaagcaattcggcacggtcgaaaacgtgcttgcctccattgacgagatcaaaggcgaaaagttgaaagaaacgctgcgccaacaccgggagatggcgctgttaagcaaaaagctcgccgccattcgccgcgacgccccggtcgagctctcgcttgatgacatcgtctatcaaggggaagaccgggagaaagtggtcgctttatttaaagagcttgggtttcaatcgtttttagagaaaatggaatcgccgtcatcagaagaggaaaaaccgcttgccaagatggcatttacgcttgctgaccgcgtgacggaggagatgcttgccgacaaggcggcgcttgtcgttgaagtggtcgaggaaaattatcatgatgcgccgatcgtcggcatcgctgtggtcaacgaacatggacggtttttcctgcgcccggagacggcgcttgccgatccgcagtttgtcgcctggcttggtgatgaaacgaagaaaaaaagcatgtttgactcaaagcgcgcggcagtcgccttgaaatggaaaggaattgagctatgcggcgtttcctttgatttattgctggccgcctatttgcttgatccggcgcaaggtgttgatgatgtggctgccgcagcaaaaatgaagcaatacgaagcggtgcgctcggatgaagcggtgtatggcaaaggggcgaagcgggccgtgccggatgagccagtgctcgccgagcatctcgtccgcaaggcggcggcgatttgggcgctcgaacgtccgtttttggatgagctgcgccgcaacgaacaagatcggttgctcgtcgagctcgagcagccgttgtcttcgattttggcggaaatggaatttgccggagtgaaagtggatacgaagcggctcgaacagatgggcgaagagctcgccgagcagctgcgcacggtcgagcagcgcatttatgagctcgccggccaagaattcaacatcaattcaccgaaacagctcggcgtcattttatttgaaaaactgcagctgcccgtcttgaaaaaaacgaaaaccggctactccacttcggcggatgtgcttgaaaaacttgcgccttatcacgagatcgtggaaaacattttgcattaccgccagcttggcaagttgcagtcgacgtatattgaaggattgctgaaagtcgtgcgacccgatacaaagaaggtgcatacgattttcaatcaggcgttgacgcaaaccggacggctcagctcgacggagccgaacttgcaaaacattccgattcggcttgaggaaggacggaaaatccgccaagcgttcgtgccgtcggagtctgattggctcattttcgctgccgactactcgcaaattgagttgcgcgtcctcgcccatattgcggaagatgacaatttaatggaagcgttccgccgcgatttggatatccatacgaaaacagcgatggacattttccaagtgagcgaggacgaagtgacgcccaacatgcgccgtcaggcgaaggcggtcaactttgggatcgtttacgggatcagtgattacggcttggcgcaaaacttaaatatttcacgcaaagaggccgctgaattcatcgagcgctacttcgaaagcttccctggcgtgaagcggtatatggaaaacattgtgcaagaagcaaaacagaaagggtatgtgacgacgctgctgcatcggcgccgctatttgccggatatcacgagccgcaacttctgtgtccgcagctttgctgaacggatggcgatgaacacgccgattcaagggagcgccgctgacattattaaaaaggcgatgatcgatctgaacgctagactgaaggaagagcggctgcaagcgcgccttttgctacaggtgcatgacgagctcattttggaggcgccgaaagaagagatggagcggctgtgccggctcgttccggaagtgatggagcaagcggtcacacttcgcgtgccgctcaaagtcgattaccattatggctcgacgtggtatgacgcgaaataaaaaggatcc

SEQ ID NO: 2483 - DNA, 2712 bp, Artificial Sequence
  Description of Artificial Sequence: Synthetic DNA sequence of Bacillus caldolyticus EA1 DNA polymerase N806G
atgaaatacctgctgccgaccgctgctgctggtctgctgctcctcgctgcccagccggcgatggccatgggattgaaaaaaaagcttgttttaatcgacggcagcagcgtggcgtaccgcgcctttttcgccttgccgcttttgcataacgacaaaggcatccatacgaacgccgtctacgggtttacgatgatgttgaataaaattttggcggaagaagagccaactcatatgcttgtcgcgtttgacgccgggaaaacgacgttccggcatgaagcgtttcaagagtataaaggtgggcgccagcagacgccaccggagctgtcggagcagtttccgctgttgcgcgagctgctgagggcgtatcgcatccccgcctatgaactcgagaactacgaagcggacgatattatcggaacgcttgccgcccgcgctgagcaggaagggtttgaggtgaaagtcatttccggcgaccgcgatctgacccagctcgcctccccccatgtgacggtggacattacgaaaaaagggattaccgatatcgaaccgtacacgccggaggcggtccgcgaaaaatacggcttaactccggaacaaatcgttgatttgaaaggattgatgggcgacaaatcggacaacattcccggagtgccgggcatcggggaaaagacggcggtcaagctgctcaagcaattcggcacggtcgaaaacgtgcttgcctccattgacgagatcaaaggcgaaaagttgaaagaaacgctgcgccaacaccgggagatggcgctgttaagcaaaaagctcgccgccattcgccgcgacgccccggtcgagctctcgcttgatgacatcgtctatcaaggggaagaccgggagaaagtggtcgctttatttaaagagcttgggtttcaatcgtttttagagaaaatggaatcgccgtcatcagaagaggaaaaaccgcttgccaagatggcatttacgcttgctgaccgcgtgacggaggagatgcttgccgacaaggcggcgcttgtcgttgaagtggtcgaggaaaattatcatgatgcgccgatcgtcggcatcgctgtggtcaacgaacatggacggtttttcctgcgcccggagacggcgcttgccgatccgcagtttgtcgcctggcttggtgatgaaacgaagaaaaaaagcatgtttgactcaaagcgcgcggcagtcgccttgaaatggaaaggaattgagctatgcggcgtttcctttgatttattgctggccgcctatttgcttgatccggcgcaaggtgttgatgatgtggctgccgcagcaaaaatgaagcaatacgaagcggtgcgctcggatgaagcggtgtatggcaaaggggcgaagcgggccgtgccggatgagccagtgctcgccgagcatctcgtccgcaaggcggcggcgatttgggcgctcgaacgtccgtttttggatgagctgcgccgcaacgaacaagatcggttgctcgtcgagctcgagcagccgttgtcttcgattttggcggaaatggaatttgccggagtgaaagtggatacgaagcggctcgaacagatgggcgaagagctcgccgagcagctgcgcacggtcgagcagcgcatttatgagctcgccggccaagaattcaacatcaattcaccgaaacagctcggcgtcattttatttgaaaaactgcagctgcccgtcttgaaaaaaacgaaaaccggctactccacttcggcggatgtgcttgaaaaacttgcgccttatcacgagatcgtggaaaacattttgcattaccgccagcttggcaagttgcagtcgacgtatattgaaggattgctgaaagtcgtgcgacccgatacaaagaaggtgcatacgattttcaatcaggcgttgacgcaaaccggacggctcagctcgacggagccgaacttgcaaaacattccgattcggcttgaggaaggacggaaaatccgccaagcgttcgtgccgtcggagtctgattggctcattttcgctgccgactactcgcaaattgagttgcgcgtcctcgcccatattgcggaagatgacaatttaatggaagcgttccgccgcgatttggatatccatacgaaaacagcgatggacattttccaagtgagcgaggacgaagtgacgcccaacatgcgccgtcaggcgaaggcggtcaactttgggatcgtttacgggatcagtgattacggcttggcgcaaaacttaaatatttcacgcaaagaggccgctgaattcatcgagcgctacttcgaaagcttccctggcgtgaagcggtatatggaaaacattgtgcaagaagcaaaacagaaagggtatgtgacgacgctgctgcatcggcgccgctatttgccggatatcacgagccgcaacttcggtgtccgcagctttgctgaacggatggcgatgaacacgccgattcaagggagcgccgctgacattattaaaaaggcgatgatcgatctgaacgctagactgaaggaagagcggctgcaagcgcgccttttgctacaggtgcatgacgagctcattttggaggcgccgaaagaagagatggagcggctgtgccggctcgttccggaagtgatggagcaagcggtcacacttcgcgtgccgctcaaagtcgattaccattatggctcgacgtggtatgacgcgaaataaaaaggatcc

SEQ ID NO: 2484 - DNA, 2712 bp, Artificial Sequence
  Description of Artificial Sequence: Synthetic DNA sequence of Bacillus caldolyticus EA1 DNA polymerase N806Q
atgaaatacctgctgccgaccgctgctgctggtctgctgctcctcgctgcccagccggcgatggccatgggattgaaaaaaaagcttgttttaatcgacggcagcagcgtggcgtaccgcgcctttttcgccttgccgcttttgcataacgacaaaggcatccatacgaacgccgtctacgggtttacgatgatgttgaataaaattttggcggaagaagagccaactcatatgcttgtcgcgtttgacgccgggaaaacgacgttccggcatgaagcgtttcaagagtataaaggtgggcgccagcagacgccaccggagctgtcggagcagtttccgctgttgcgcgagctgctgagggcgtatcgcatccccgcctatgaactcgagaactacgaagcggacgatattatcggaacgcttgccgcccgcgctgagcaggaagggtttgaggtgaaagtcatttccggcgaccgcgatctgacccagctcgcctccccccatgtgacggtggacattacgaaaaaagggattaccgatatcgaaccgtacacgccggaggcggtccgcgaaaaatacggcttaactccggaacaaatcgttgatttgaaaggattgatgggcgacaaatcggacaacattcccggagtgccgggcatcggggaaaagacggcggtcaagctgctcaagcaattcggcacggtcgaaaacgtgcttgcctccattgacgagatcaaaggcgaaaagttgaaagaaacgctgcgccaacaccgggagatggcgctgttaagcaaaaagctcgccgccattcgccgcgacgccccggtcgagctctcgcttgatgacatcgtctatcaaggggaagaccgggagaaagtggtcgctttatttaaagagcttgggtttcaatcgtttttagagaaaatggaatcgccgtcatcagaagaggaaaaaccgcttgccaagatggcatttacgcttgctgaccgcgtgacggaggagatgcttgccgacaaggcggcgcttgtcgttgaagtggtcgaggaaaattatcatgatgcgccgatcgtcggcatcgctgtggtcaacgaacatggacggtttttcctgcgcccggagacggcgcttgccgatccgcagtttgtcgcctggcttggtgatgaaacgaagaaaaaaagcatgtttgactcaaagcgcgcggcagtcgccttgaaatggaaaggaattgagctatgcggcgtttcctttgatttattgctggccgcctatttgcttgatccggcgcaaggtgttgatgatgtggctgccgcagcaaaaatgaagcaatacgaagcggtgcgctcggatgaagcggtgtatggcaaaggggcgaagcgggccgtgccggatgagccagtgctcgccgagcatctcgtccgcaaggcggcggcgatttgggcgctcgaacgtccgtttttggatgagctgcgccgcaacgaacaagatcggttgctcgtcgagctcgagcagccgttgtcttcgattttggcggaaatggaatttgccggagtgaaagtggatacgaagcggctcgaacagatgggcgaagagctcgccgagcagctgcgcacggtcgagcagcgcatttatgagctcgccggccaagaattcaacatcaattcaccgaaacagctcggcgtcattttatttgaaaaactgcagctgcccgtcttgaaaaaaacgaaaaccggctactccacttcggcggatgtgcttgaaaaacttgcgccttatcacgagatcgtggaaaacattttgcattaccgccagcttggcaagttgcagtcgacgtatattgaaggattgctgaaagtcgtgcgacccgatacaaagaaggtgcatacgattttcaatcaggcgttgacgcaaaccggacggctcagctcgacggagccgaacttgcaaaacattccgattcggcttgaggaaggacggaaaatccgccaagcgttcgtgccgtcggagtctgattggctcattttcgctgccgactactcgcaaattgagttgcgcgtcctcgcccatattgcggaagatgacaatttaatggaagcgttccgccgcgatttggatatccatacgaaaacagcgatggacattttccaagtgagcgaggacgaagtgacgcccaacatgcgccgtcaggcgaaggcggtcaactttgggatcgtttacgggatcagtgattacggcttggcgcaaaacttaaatatttcacgcaaagaggccgctgaattcatcgagcgctacttcgaaagcttccctggcgtgaagcggtatatggaaaacattgtgcaagaagcaaaacagaaagggtatgtgacgacgctgctgcatcggcgccgctatttgccggatatcacgagccgcaacttccaagtccgcagctttgctgaacggatggcgatgaacacgccgattcaagggagcgccgctgacattattaaaaaggcgatgatcgatctgaacgctagactgaaggaagagcggctgcaagcgcgccttttgctacaggtgcatgacgagctcattttggaggcgccgaaagaagagatggagcggctgtgccggctcgttccggaagtgatggagcaagcggtcacacttcgcgtgccgctcaaagtcgattaccattatggctcgacgtggtatgacgcgaaataaaaaggatcc

SEQ ID NO: 2485 - DNA, 2712 bp, Artificial Sequence
  Description of Artificial Sequence: Synthetic DNA sequence of Bacillus caldolyticus EA1 DNA polymerase N806H
atgaaatacctgctgccgaccgctgctgctggtctgctgctcctcgctgcccagccggcgatggccatgggattgaaaaaaaagcttgttttaatcgacggcagcagcgtggcgtaccgcgcctttttcgccttgccgcttttgcataacgacaaaggcatccatacgaacgccgtctacgggtttacgatgatgttgaataaaattttggcggaagaagagccaactcatatgcttgtcgcgtttgacgccgggaaaacgacgttccggcatgaagcgtttcaagagtataaaggtgggcgccagcagacgccaccggagctgtcggagcagtttccgctgttgcgcgagctgctgagggcgtatcgcatccccgcctatgaactcgagaactacgaagcggacgatattatcggaacgcttgccgcccgcgctgagcaggaagggtttgaggtgaaagtcatttccggcgaccgcgatctgacccagctcgcctccccccatgtgacggtggacattacgaaaaaagggattaccgatatcgaaccgtacacgccggaggcggtccgcgaaaaatacggcttaactccggaacaaatcgttgatttgaaaggattgatgggcgacaaatcggacaacattcccggagtgccgggcatcggggaaaagacggcggtcaagctgctcaagcaattcggcacggtcgaaaacgtgcttgcctccattgacgagatcaaaggcgaaaagttgaaagaaacgctgcgccaacaccgggagatggcgctgttaagcaaaaagctcgccgccattcgccgcgacgccccggtcgagctctcgcttgatgacatcgtctatcaaggggaagaccgggagaaagtggtcgctttatttaaagagcttgggtttcaatcgtttttagagaaaatggaatcgccgtcatcagaagaggaaaaaccgcttgccaagatggcatttacgcttgctgaccgcgtgacggaggagatgcttgccgacaaggcggcgcttgtcgttgaagtggtcgaggaaaattatcatgatgcgccgatcgtcggcatcgctgtggtcaacgaacatggacggtttttcctgcgcccggagacggcgcttgccgatccgcagtttgtcgcctggcttggtgatgaaacgaagaaaaaaagcatgtttgactcaaagcgcgcggcagtcgccttgaaatggaaaggaattgagctatgcggcgtttcctttgatttattgctggccgcctatttgcttgatccggcgcaaggtgttgatgatgtggctgccgcagcaaaaatgaagcaatacgaagcggtgcgctcggatgaagcggtgtatggcaaaggggcgaagcgggccgtgccggatgagccagtgctcgccgagcatctcgtccgcaaggcggcggcgatttgggcgctcgaacgtccgtttttggatgagctgcgccgcaacgaacaagatcggttgctcgtcgagctcgagcagccgttgtcttcgattttggcggaaatggaatttgccggagtgaaagtggatacgaagcggctcgaacagatgggcgaagagctcgccgagcagctgcgcacggtcgagcagcgcatttatgagctcgccggccaagaattcaacatcaattcaccgaaacagctcggcgtcattttatttgaaaaactgcagctgcccgtcttgaaaaaaacgaaaaccggctactccacttcggcggatgtgcttgaaaaacttgcgccttatcacgagatcgtggaaaacattttgcattaccgccagcttggcaagttgcagtcgacgtatattgaaggattgctgaaagtcgtgcgacccgatacaaagaaggtgcatacgattttcaatcaggcgttgacgcaaaccggacggctcagctcgacggagccgaacttgcaaaacattccgattcggcttgaggaaggacggaaaatccgccaagcgttcgtgccgtcggagtctgattggctcattttcgctgccgactactcgcaaattgagttgcgcgtcctcgcccatattgcggaagatgacaatttaatggaagcgttccgccgcgatttggatatccatacgaaaacagcgatggacattttccaagtgagcgaggacgaagtgacgcccaacatgcgccgtcaggcgaaggcggtcaactttgggatcgtttacgggatcagtgattacggcttggcgcaaaacttaaatatttcacgcaaagaggccgctgaattcatcgagcgctacttcgaaagcttccctggcgtgaagcggtatatggaaaacattgtgcaagaagcaaaacagaaagggtatgtgacgacgctgctgcatcggcgccgctatttgccggatatcacgagccgcaacttccatgtccgcagctttgctgaacggatggcgatgaacacgccgattcaagggagcgccgctgacattattaaaaaggcgatgatcgatctgaacgctagactgaaggaagagcggctgcaagcgcgccttttgctacaggtgcatgacgagctcattttggaggcgccgaaagaagagatggagcggctgtgccggctcgttccggaagtgatggagcaagcggtcacacttcgcgtgccgctcaaagtcgattaccattatggctcgacgtggtatgacgcgaaataaaaaggatcc

SEQ ID NO: 2486 - DNA, 2712 bp, Artificial Sequence
  Description of Artificial Sequence: Synthetic DNA sequence of Bacillus caldolyticus EA1 DNA polymerase N806I
atgaaatacctgctgccgaccgctgctgctggtctgctgctcctcgctgcccagccggcgatggccatgggattgaaaaaaaagcttgttttaatcgacggcagcagcgtggcgtaccgcgcctttttcgccttgccgcttttgcataacgacaaaggcatccatacgaacgccgtctacgggtttacgatgatgttgaataaaattttggcggaagaagagccaactcatatgcttgtcgcgtttgacgccgggaaaacgacgttccggcatgaagcgtttcaagagtataaaggtgggcgccagcagacgccaccggagctgtcggagcagtttccgctgttgcgcgagctgctgagggcgtatcgcatccccgcctatgaactcgagaactacgaagcggacgatattatcggaacgcttgccgcccgcgctgagcaggaagggtttgaggtgaaagtcatttccggcgaccgcgatctgacccagctcgcctccccccatgtgacggtggacattacgaaaaaagggattaccgatatcgaaccgtacacgccggaggcggtccgcgaaaaatacggcttaactccggaacaaatcgttgatttgaaaggattgatgggcgacaaatcggacaacattcccggagtgccgggcatcggggaaaagacggcggtcaagctgctcaagcaattcggcacggtcgaaaacgtgcttgcctccattgacgagatcaaaggcgaaaagttgaaagaaacgctgcgccaacaccgggagatggcgctgttaagcaaaaagctcgccgccattcgccgcgacgccccggtcgagctctcgcttgatgacatcgtctatcaaggggaagaccgggagaaagtggtcgctttatttaaagagcttgggtttcaatcgtttttagagaaaatggaatcgccgtcatcagaagaggaaaaaccgcttgccaagatggcatttacgcttgctgaccgcgtgacggaggagatgcttgccgacaaggcggcgcttgtcgttgaagtggtcgaggaaaattatcatgatgcgccgatcgtcggcatcgctgtggtcaacgaacatggacggtttttcctgcgcccggagacggcgcttgccgatccgcagtttgtcgcctggcttggtgatgaaacgaagaaaaaaagcatgtttgactcaaagcgcgcggcagtcgccttgaaatggaaaggaattgagctatgcggcgtttcctttgatttattgctggccgcctatttgcttgatccggcgcaaggtgttgatgatgtggctgccgcagcaaaaatgaagcaatacgaagcggtgcgctcggatgaagcggtgtatggcaaaggggcgaagcgggccgtgccggatgagccagtgctcgccgagcatctcgtccgcaaggcggcggcgatttgggcgctcgaacgtccgtttttggatgagctgcgccgcaacgaacaagatcggttgctcgtcgagctcgagcagccgttgtcttcgattttggcggaaatggaatttgccggagtgaaagtggatacgaagcggctcgaacagatgggcgaagagctcgccgagcagctgcgcacggtcgagcagcgcatttatgagctcgccggccaagaattcaacatcaattcaccgaaacagctcggcgtcattttatttgaaaaactgcagctgcccgtcttgaaaaaaacgaaaaccggctactccacttcggcggatgtgcttgaaaaacttgcgccttatcacgagatcgtggaaaacattttgcattaccgccagcttggcaagttgcagtcgacgtatattgaaggattgctgaaagtcgtgcgacccgatacaaagaaggtgcatacgattttcaatcaggcgttgacgcaaaccggacggctcagctcgacggagccgaacttgcaaaacattccgattcggcttgaggaaggacggaaaatccgccaagcgttcgtgccgtcggagtctgattggctcattttcgctgccgactactcgcaaattgagttgcgcgtcctcgcccatattgcggaagatgacaatttaatggaagcgttccgccgcgatttggatatccatacgaaaacagcgatggacattttccaagtgagcgaggacgaagtgacgcccaacatgcgccgtcaggcgaaggcggtcaactttgggatcgtttacgggatcagtgattacggcttggcgcaaaacttaaatatttcacgcaaagaggccgctgaattcatcgagcgctacttcgaaagcttccctggcgtgaagcggtatatggaaaacattgtgcaagaagcaaaacagaaagggtatgtgacgacgctgctgcatcggcgccgctatttgccggatatcacgagccgcaacttcattgtccgcagctttgctgaacggatggcgatgaacacgccgattcaagggagcgccgctgacattattaaaaaggcgatgatcgatctgaacgctagactgaaggaagagcggctgcaagcgcgccttttgctacaggtgcatgacgagctcattttggaggcgccgaaagaagagatggagcggctgtgccggctcgttccggaagtgatggagcaagcggtcacacttcgcgtgccgctcaaagtcgattaccattatggctcgacgtggtatgacgcgaaataaaaaggatcc

SEQ ID NO: 2487 - DNA, 2712 bp, Artificial Sequence
  Description of Artificial Sequence: Synthetic DNA sequence of Bacillus caldolyticus EA1 DNA polymerase N806L
atgaaatacctgctgccgaccgctgctgctggtctgctgctcctcgctgcccagccggcgatggccatgggattgaaaaaaaagcttgttttaatcgacggcagcagcgtggcgtaccgcgcctttttcgccttgccgcttttgcataacgacaaaggcatccatacgaacgccgtctacgggtttacgatgatgttgaataaaattttggcggaagaagagccaactcatatgcttgtcgcgtttgacgccgggaaaacgacgttccggcatgaagcgtttcaagagtataaaggtgggcgccagcagacgccaccggagctgtcggagcagtttccgctgttgcgcgagctgctgagggcgtatcgcatccccgcctatgaactcgagaactacgaagcggacgatattatcggaacgcttgccgcccgcgctgagcaggaagggtttgaggtgaaagtcatttccggcgaccgcgatctgacccagctcgcctccccccatgtgacggtggacattacgaaaaaagggattaccgatatcgaaccgtacacgccggaggcggtccgcgaaaaatacggcttaactccggaacaaatcgttgatttgaaaggattgatgggcgacaaatcggacaacattcccggagtgccgggcatcggggaaaagacggcggtcaagctgctcaagcaattcggcacggtcgaaaacgtgcttgcctccattgacgagatcaaaggcgaaaagttgaaagaaacgctgcgccaacaccgggagatggcgctgttaagcaaaaagctcgccgccattcgccgcgacgccccggtcgagctctcgcttgatgacatcgtctatcaaggggaagaccgggagaaagtggtcgctttatttaaagagcttgggtttcaatcgtttttagagaaaatggaatcgccgtcatcagaagaggaaaaaccgcttgccaagatggcatttacgcttgctgaccgcgtgacggaggagatgcttgccgacaaggcggcgcttgtcgttgaagtggtcgaggaaaattatcatgatgcgccgatcgtcggcatcgctgtggtcaacgaacatggacggtttttcctgcgcccggagacggcgcttgccgatccgcagtttgtcgcctggcttggtgatgaaacgaagaaaaaaagcatgtttgactcaaagcgcgcggcagtcgccttgaaatggaaaggaattgagctatgcggcgtttcctttgatttattgctggccgcctatttgcttgatccggcgcaaggtgttgatgatgtggctgccgcagcaaaaatgaagcaatacgaagcggtgcgctcggatgaagcggtgtatggcaaaggggcgaagcgggccgtgccggatgagccagtgctcgccgagcatctcgtccgcaaggcggcggcgatttgggcgctcgaacgtccgtttttggatgagctgcgccgcaacgaacaagatcggttgctcgtcgagctcgagcagccgttgtcttcgattttggcggaaatggaatttgccggagtgaaagtggatacgaagcggctcgaacagatgggcgaagagctcgccgagcagctgcgcacggtcgagcagcgcatttatgagctcgccggccaagaattcaacatcaattcaccgaaacagctcggcgtcattttatttgaaaaactgcagctgcccgtcttgaaaaaaacgaaaaccggctactccacttcggcggatgtgcttgaaaaacttgcgccttatcacgagatcgtggaaaacattttgcattaccgccagcttggcaagttgcagtcgacgtatattgaaggattgctgaaagtcgtgcgacccgatacaaagaaggtgcatacgattttcaatcaggcgttgacgcaaaccggacggctcagctcgacggagccgaacttgcaaaacattccgattcggcttgaggaaggacggaaaatccgccaagcgttcgtgccgtcggagtctgattggctcattttcgctgccgactactcgcaaattgagttgcgcgtcctcgcccatattgcggaagatgacaatttaatggaagcgttccgccgcgatttggatatccatacgaaaacagcgatggacattttccaagtgagcgaggacgaagtgacgcccaacatgcgccgtcaggcgaaggcggtcaactttgggatcgtttacgggatcagtgattacggcttggcgcaaaacttaaatatttcacgcaaagaggccgctgaattcatcgagcgctacttcgaaagcttccctggcgtgaagcggtatatggaaaacattgtgcaagaagcaaaacagaaagggtatgtgacgacgctgctgcatcggcgccgctatttgccggatatcacgagccgcaacttcttagtccgcagctttgctgaacggatggcgatgaacacgccgattcaagggagcgccgctgacattattaaaaaggcgatgatcgatctgaacgctagactgaaggaagagcggctgcaagcgcgccttttgctacaggtgcatgacgagctcattttggaggcgccgaaagaagagatggagcggctgtgccggctcgttccggaagtgatggagcaagcggtcacacttcgcgtgccgctcaaagtcgattaccattatggctcgacgtggtatgacgcgaaataaaaaggatcc

SEQ ID NO: 2488 - DNA, 2712 bp, Artificial Sequence
  Description of Artificial Sequence: Synthetic DNA sequence of Bacillus caldolyticus EA1 DNA polymerase N806K
atgaaatacctgctgccgaccgctgctgctggtctgctgctcctcgctgcccagccggcgatggccatgggattgaaaaaaaagcttgttttaatcgacggcagcagcgtggcgtaccgcgcctttttcgccttgccgcttttgcataacgacaaaggcatccatacgaacgccgtctacgggtttacgatgatgttgaataaaattttggcggaagaagagccaactcatatgcttgtcgcgtttgacgccgggaaaacgacgttccggcatgaagcgtttcaagagtataaaggtgggcgccagcagacgccaccggagctgtcggagcagtttccgctgttgcgcgagctgctgagggcgtatcgcatccccgcctatgaactcgagaactacgaagcggacgatattatcggaacgcttgccgcccgcgctgagcaggaagggtttgaggtgaaagtcatttccggcgaccgcgatctgacccagctcgcctccccccatgtgacggtggacattacgaaaaaagggattaccgatatcgaaccgtacacgccggaggcggtccgcgaaaaatacggcttaactccggaacaaatcgttgatttgaaaggattgatgggcgacaaatcggacaacattcccggagtgccgggcatcggggaaaagacggcggtcaagctgctcaagcaattcggcacggtcgaaaacgtgcttgcctccattgacgagatcaaaggcgaaaagttgaaagaaacgctgcgccaacaccgggagatggcgctgttaagcaaaaagctcgccgccattcgccgcgacgccccggtcgagctctcgcttgatgacatcgtctatcaaggggaagaccgggagaaagtggtcgctttatttaaagagcttgggtttcaatcgtttttagagaaaatggaatcgccgtcatcagaagaggaaaaaccgcttgccaagatggcatttacgcttgctgaccgcgtgacggaggagatgcttgccgacaaggcggcgcttgtcgttgaagtggtcgaggaaaattatcatgatgcgccgatcgtcggcatcgctgtggtcaacgaacatggacggtttttcctgcgcccggagacggcgcttgccgatccgcagtttgtcgcctggcttggtgatgaaacgaagaaaaaaagcatgtttgactcaaagcgcgcggcagtcgccttgaaatggaaaggaattgagctatgcggcgtttcctttgatttattgctggccgcctatttgcttgatccggcgcaaggtgttgatgatgtggctgccgcagcaaaaatgaagcaatacgaagcggtgcgctcggatgaagcggtgtatggcaaaggggcgaagcgggccgtgccggatgagccagtgctcgccgagcatctcgtccgcaaggcggcggcgatttgggcgctcgaacgtccgtttttggatgagctgcgccgcaacgaacaagatcggttgctcgtcgagctcgagcagccgttgtcttcgattttggcggaaatggaatttgccggagtgaaagtggatacgaagcggctcgaacagatgggcgaagagctcgccgagcagctgcgcacggtcgagcagcgcatttatgagctcgccggccaagaattcaacatcaattcaccgaaacagctcggcgtcattttatttgaaaaactgcagctgcccgtcttgaaaaaaacgaaaaccggctactccacttcggcggatgtgcttgaaaaacttgcgccttatcacgagatcgtggaaaacattttgcattaccgccagcttggcaagttgcagtcgacgtatattgaaggattgctgaaagtcgtgcgacccgatacaaagaaggtgcatacgattttcaatcaggcgttgacgcaaaccggacggctcagctcgacggagccgaacttgcaaaacattccgattcggcttgaggaaggacggaaaatccgccaagcgttcgtgccgtcggagtctgattggctcattttcgctgccgactactcgcaaattgagttgcgcgtcctcgcccatattgcggaagatgacaatttaatggaagcgttccgccgcgatttggatatccatacgaaaacagcgatggacattttccaagtgagcgaggacgaagtgacgcccaacatgcgccgtcaggcgaaggcggtcaactttgggatcgtttacgggatcagtgattacggcttggcgcaaaacttaaatatttcacgcaaagaggccgctgaattcatcgagcgctacttcgaaagcttccctggcgtgaagcggtatatggaaaacattgtgcaagaagcaaaacagaaagggtatgtgacgacgctgctgcatcggcgccgctatttgccggatatcacgagccgcaacttcaaagtccgcagctttgctgaacggatggcgatgaacacgccgattcaagggagcgccgctgacattattaaaaaggcgatgatcgatctgaacgctagactgaaggaagagcggctgcaagcgcgccttttgctacaggtgcatgacgagctcattttggaggcgccgaaagaagagatggagcggctgtgccggctcgttccggaagtgatggagcaagcggtcacacttcgcgtgccgctcaaagtcgattaccattatggctcgacgtggtatgacgcgaaataaaaaggatcc

SEQ ID NO: 2489 - DNA, 2712 bp, Artificial Sequence
  Description of Artificial Sequence: Synthetic DNA sequence of Bacillus caldolyticus EA1 DNA polymerase N806E
atgaaatacctgctgccgaccgctgctgctggtctgctgctcctcgctgcccagccggcgatggccatgggattgaaaaaaaagcttgttttaatcgacggcagcagcgtggcgtaccgcgcctttttcgccttgccgcttttgcataacgacaaaggcatccatacgaacgccgtctacgggtttacgatgatgttgaataaaattttggcggaagaagagccaactcatatgcttgtcgcgtttgacgccgggaaaacgacgttccggcatgaagcgtttcaagagtataaaggtgggcgccagcagacgccaccggagctgtcggagcagtttccgctgttgcgcgagctgctgagggcgtatcgcatccccgcctatgaactcgagaactacgaagcggacgatattatcggaacgcttgccgcccgcgctgagcaggaagggtttgaggtgaaagtcatttccggcgaccgcgatctgacccagctcgcctccccccatgtgacggtggacattacgaaaaaagggattaccgatatcgaaccgtacacgccggaggcggtccgcgaaaaatacggcttaactccggaacaaatcgttgatttgaaaggattgatgggcgacaaatcggacaacattcccggagtgccgggcatcggggaaaagacggcggtcaagctgctcaagcaattcggcacggtcgaaaacgtgcttgcctccattgacgagatcaaaggcgaaaagttgaaagaaacgctgcgccaacaccgggagatggcgctgttaagcaaaaagctcgccgccattcgccgcgacgccccggtcgagctctcgcttgatgacatcgtctatcaaggggaagaccgggagaaagtggtcgctttatttaaagagcttgggtttcaatcgtttttagagaaaatggaatcgccgtcatcagaagaggaaaaaccgcttgccaagatggcatttacgcttgctgaccgcgtgacggaggagatgcttgccgacaaggcggcgcttgtcgttgaagtggtcgaggaaaattatcatgatgcgccgatcgtcggcatcgctgtggtcaacgaacatggacggtttttcctgcgcccggagacggcgcttgccgatccgcagtttgtcgcctggcttggtgatgaaacgaagaaaaaaagcatgtttgactcaaagcgcgcggcagtcgccttgaaatggaaaggaattgagctatgcggcgtttcctttgatttattgctggccgcctatttgcttgatccggcgcaaggtgttgatgatgtggctgccgcagcaaaaatgaagcaatacgaagcggtgcgctcggatgaagcggtgtatggcaaaggggcgaagcgggccgtgccggatgagccagtgctcgccgagcatctcgtccgcaaggcggcggcgatttgggcgctcgaacgtccgtttttggatgagctgcgccgcaacgaacaagatcggttgctcgtcgagctcgagcagccgttgtcttcgattttggcggaaatggaatttgccggagtgaaagtggatacgaagcggctcgaacagatgggcgaagagctcgccgagcagctgcgcacggtcgagcagcgcatttatgagctcgccggccaagaattcaacatcaattcaccgaaacagctcggcgtcattttatttgaaaaactgcagctgcccgtcttgaaaaaaacgaaaaccggctactccacttcggcggatgtgcttgaaaaacttgcgccttatcacgagatcgtggaaaacattttgcattaccgccagcttggcaagttgcagtcgacgtatattgaaggattgctgaaagtcgtgcgacccgatacaaagaaggtgcatacgattttcaatcaggcgttgacgcaaaccggacggctcagctcgacggagccgaacttgcaaaacattccgattcggcttgaggaaggacggaaaatccgccaagcgttcgtgccgtcggagtctgattggctcattttcgctgccgactactcgcaaattgagttgcgcgtcctcgcccatattgcggaagatgacaatttaatggaagcgttccgccgcgatttggatatccatacgaaaacagcgatggacattttccaagtgagcgaggacgaagtgacgcccaacatgcgccgtcaggcgaaggcggtcaactttgggatcgtttacgggatcagtgattacggcttggcgcaaaacttaaatatttcacgcaaagaggccgctgaattcatcgagcgctacttcgaaagcttccctggcgtgaagcggtatatggaaaacattgtgcaagaagcaaaacagaaagggtatgtgacgacgctgctgcatcggcgccgctatttgccggatatcacgagccgcaacttcgaagtccgcagctttgctgaacggatggcgatgaacacgccgattcaagggagcgccgctgacattattaaaaaggcgatgatcgatctgaacgctagactgaaggaagagcggctgcaagcgcgccttttgctacaggtgcatgacgagctcattttggaggcgccgaaagaagagatggagcggctgtgccggctcgttccggaagtgatggagcaagcggtcacacttcgcgtgccgctcaaagtcgattaccattatggctcgacgtggtatgacgcgaaataaaaaggatcc

SEQ ID NO: 2490 - DNA, 2712 bp, Artificial Sequence
  Description of Artificial Sequence: Synthetic DNA sequence of Bacillus caldolyticus EA1 DNA polymerase N806D
atgaaatacctgctgccgaccgctgctgctggtctgctgctcctcgctgcccagccggcgatggccatgggattgaaaaaaaagcttgttttaatcgacggcagcagcgtggcgtaccgcgcctttttcgccttgccgcttttgcataacgacaaaggcatccatacgaacgccgtctacgggtttacgatgatgttgaataaaattttggcggaagaagagccaactcatatgcttgtcgcgtttgacgccgggaaaacgacgttccggcatgaagcgtttcaagagtataaaggtgggcgccagcagacgccaccggagctgtcggagcagtttccgctgttgcgcgagctgctgagggcgtatcgcatccccgcctatgaactcgagaactacgaagcggacgatattatcggaacgcttgccgcccgcgctgagcaggaagggtttgaggtgaaagtcatttccggcgaccgcgatctgacccagctcgcctccccccatgtgacggtggacattacgaaaaaagggattaccgatatcgaaccgtacacgccggaggcggtccgcgaaaaatacggcttaactccggaacaaatcgttgatttgaaaggattgatgggcgacaaatcggacaacattcccggagtgccgggcatcggggaaaagacggcggtcaagctgctcaagcaattcggcacggtcgaaaacgtgcttgcctccattgacgagatcaaaggcgaaaagttgaaagaaacgctgcgccaacaccgggagatggcgctgttaagcaaaaagctcgccgccattcgccgcgacgccccggtcgagctctcgcttgatgacatcgtctatcaaggggaagaccgggagaaagtggtcgctttatttaaagagcttgggtttcaatcgtttttagagaaaatggaatcgccgtcatcagaagaggaaaaaccgcttgccaagatggcatttacgcttgctgaccgcgtgacggaggagatgcttgccgacaaggcggcgcttgtcgttgaagtggtcgaggaaaattatcatgatgcgccgatcgtcggcatcgctgtggtcaacgaacatggacggtttttcctgcgcccggagacggcgcttgccgatccgcagtttgtcgcctggcttggtgatgaaacgaagaaaaaaagcatgtttgactcaaagcgcgcggcagtcgccttgaaatggaaaggaattgagctatgcggcgtttcctttgatttattgctggccgcctatttgcttgatccggcgcaaggtgttgatgatgtggctgccgcagcaaaaatgaagcaatacgaagcggtgcgctcggatgaagcggtgtatggcaaaggggcgaagcgggccgtgccggatgagccagtgctcgccgagcatctcgtccgcaaggcggcggcgatttgggcgctcgaacgtccgtttttggatgagctgcgccgcaacgaacaagatcggttgctcgtcgagctcgagcagccgttgtcttcgattttggcggaaatggaatttgccggagtgaaagtggatacgaagcggctcgaacagatgggcgaagagctcgccgagcagctgcgcacggtcgagcagcgcatttatgagctcgccggccaagaattcaacatcaattcaccgaaacagctcggcgtcattttatttgaaaaactgcagctgcccgtcttgaaaaaaacgaaaaccggctactccacttcggcggatgtgcttgaaaaacttgcgccttatcacgagatcgtggaaaacattttgcattaccgccagcttggcaagttgcagtcgacgtatattgaaggattgctgaaagtcgtgcgacccgatacaaagaaggtgcatacgattttcaatcaggcgttgacgcaaaccggacggctcagctcgacggagccgaacttgcaaaacattccgattcggcttgaggaaggacggaaaatccgccaagcgttcgtgccgtcggagtctgattggctcattttcgctgccgactactcgcaaattgagttgcgcgtcctcgcccatattgcggaagatgacaatttaatggaagcgttccgccgcgatttggatatccatacgaaaacagcgatggacattttccaagtgagcgaggacgaagtgacgcccaacatgcgccgtcaggcgaaggcggtcaactttgggatcgtttacgggatcagtgattacggcttggcgcaaaacttaaatatttcacgcaaagaggccgctgaattcatcgagcgctacttcgaaagcttccctggcgtgaagcggtatatggaaaacattgtgcaagaagcaaaacagaaagggtatgtgacgacgctgctgcatcggcgccgctatttgccggatatcacgagccgcaacttcgatgtccgcagctttgctgaacggatggcgatgaacacgccgattcaagggagcgccgctgacattattaaaaaggcgatgatcgatctgaacgctagactgaaggaagagcggctgcaagcgcgccttttgctacaggtgcatgacgagctcattttggaggcgccgaaagaagagatggagcggctgtgccggctcgttccggaagtgatggagcaagcggtcacacttcgcgtgccgctcaaagtcgattaccattatggctcgacgtggtatgacgcgaaataaaaaggatcc

SEQ ID NO: 2491 - DNA, 2712 bp, Artificial Sequence
  Description of Artificial Sequence: Synthetic DNA sequence of Bacillus caldolyticus EA1 DNA polymerase N806F
atgaaatacctgctgccgaccgctgctgctggtctgctgctcctcgctgcccagccggcgatggccatgggattgaaaaaaaagcttgttttaatcgacggcagcagcgtggcgtaccgcgcctttttcgccttgccgcttttgcataacgacaaaggcatccatacgaacgccgtctacgggtttacgatgatgttgaataaaattttggcggaagaagagccaactcatatgcttgtcgcgtttgacgccgggaaaacgacgttccggcatgaagcgtttcaagagtataaaggtgggcgccagcagacgccaccggagctgtcggagcagtttccgctgttgcgcgagctgctgagggcgtatcgcatccccgcctatgaactcgagaactacgaagcggacgatattatcggaacgcttgccgcccgcgctgagcaggaagggtttgaggtgaaagtcatttccggcgaccgcgatctgacccagctcgcctccccccatgtgacggtggacattacgaaaaaagggattaccgatatcgaaccgtacacgccggaggcggtccgcgaaaaatacggcttaactccggaacaaatcgttgatttgaaaggattgatgggcgacaaatcggacaacattcccggagtgccgggcatcggggaaaagacggcggtcaagctgctcaagcaattcggcacggtcgaaaacgtgcttgcctccattgacgagatcaaaggcgaaaagttgaaagaaacgctgcgccaacaccgggagatggcgctgttaagcaaaaagctcgccgccattcgccgcgacgccccggtcgagctctcgcttgatgacatcgtctatcaaggggaagaccgggagaaagtggtcgctttatttaaagagcttgggtttcaatcgtttttagagaaaatggaatcgccgtcatcagaagaggaaaaaccgcttgccaagatggcatttacgcttgctgaccgcgtgacggaggagatgcttgccgacaaggcggcgcttgtcgttgaagtggtcgaggaaaattatcatgatgcgccgatcgtcggcatcgctgtggtcaacgaacatggacggtttttcctgcgcccggagacggcgcttgccgatccgcagtttgtcgcctggcttggtgatgaaacgaagaaaaaaagcatgtttgactcaaagcgcgcggcagtcgccttgaaatggaaaggaattgagctatgcggcgtttcctttgatttattgctggccgcctatttgcttgatccggcgcaaggtgttgatgatgtggctgccgcagcaaaaatgaagcaatacgaagcggtgcgctcggatgaagcggtgtatggcaaaggggcgaagcgggccgtgccggatgagccagtgctcgccgagcatctcgtccgcaaggcggcggcgatttgggcgctcgaacgtccgtttttggatgagctgcgccgcaacgaacaagatcggttgctcgtcgagctcgagcagccgttgtcttcgattttggcggaaatggaatttgccggagtgaaagtggatacgaagcggctcgaacagatgggcgaagagctcgccgagcagctgcgcacggtcgagcagcgcatttatgagctcgccggccaagaattcaacatcaattcaccgaaacagctcggcgtcattttatttgaaaaactgcagctgcccgtcttgaaaaaaacgaaaaccggctactccacttcggcggatgtgcttgaaaaacttgcgccttatcacgagatcgtggaaaacattttgcattaccgccagcttggcaagttgcagtcgacgtatattgaaggattgctgaaagtcgtgcgacccgatacaaagaaggtgcatacgattttcaatcaggcgttgacgcaaaccggacggctcagctcgacggagccgaacttgcaaaacattccgattcggcttgaggaaggacggaaaatccgccaagcgttcgtgccgtcggagtctgattggctcattttcgctgccgactactcgcaaattgagttgcgcgtcctcgcccatattgcggaagatgacaatttaatggaagcgttccgccgcgatttggatatccatacgaaaacagcgatggacattttccaagtgagcgaggacgaagtgacgcccaacatgcgccgtcaggcgaaggcggtcaactttgggatcgtttacgggatcagtgattacggcttggcgcaaaacttaaatatttcacgcaaagaggccgctgaattcatcgagcgctacttcgaaagcttccctggcgtgaagcggtatatggaaaacattgtgcaagaagcaaaacagaaagggtatgtgacgacgctgctgcatcggcgccgctatttgccggatatcacgagccgcaacttctttgtccgcagctttgctgaacggatggcgatgaacacgccgattcaagggagcgccgctgacattattaaaaaggcgatgatcgatctgaacgctagactgaaggaagagcggctgcaagcgcgccttttgctacaggtgcatgacgagctcattttggaggcgccgaaagaagagatggagcggctgtgccggctcgttccggaagtgatggagcaagcggtcacacttcgcgtgccgctcaaagtcgattaccattatggctcgacgtggtatgacgcgaaataaaaaggatcc

SEQ ID NO: 2492 - DNA, 2712 bp, Artificial Sequence
  Description of Artificial Sequence: Synthetic DNA sequence of Bacillus caldolyticus EA1 DNA polymerase N806S
atgaaatacctgctgccgaccgctgctgctggtctgctgctcctcgctgcccagccggcgatggccatgggattgaaaaaaaagcttgttttaatcgacggcagcagcgtggcgtaccgcgcctttttcgccttgccgcttttgcataacgacaaaggcatccatacgaacgccgtctacgggtttacgatgatgttgaataaaattttggcggaagaagagccaactcatatgcttgtcgcgtttgacgccgggaaaacgacgttccggcatgaagcgtttcaagagtataaaggtgggcgccagcagacgccaccggagctgtcggagcagtttccgctgttgcgcgagctgctgagggcgtatcgcatccccgcctatgaactcgagaactacgaagcggacgatattatcggaacgcttgccgcccgcgctgagcaggaagggtttgaggtgaaagtcatttccggcgaccgcgatctgacccagctcgcctccccccatgtgacggtggacattacgaaaaaagggattaccgatatcgaaccgtacacgccggaggcggtccgcgaaaaatacggcttaactccggaacaaatcgttgatttgaaaggattgatgggcgacaaatcggacaacattcccggagtgccgggcatcggggaaaagacggcggtcaagctgctcaagcaattcggcacggtcgaaaacgtgcttgcctccattgacgagatcaaaggcgaaaagttgaaagaaacgctgcgccaacaccgggagatggcgctgttaagcaaaaagctcgccgccattcgccgcgacgccccggtcgagctctcgcttgatgacatcgtctatcaaggggaagaccgggagaaagtggtcgctttatttaaagagcttgggtttcaatcgtttttagagaaaatggaatcgccgtcatcagaagaggaaaaaccgcttgccaagatggcatttacgcttgctgaccgcgtgacggaggagatgcttgccgacaaggcggcgcttgtcgttgaagtggtcgaggaaaattatcatgatgcgccgatcgtcggcatcgctgtggtcaacgaacatggacggtttttcctgcgcccggagacggcgcttgccgatccgcagtttgtcgcctggcttggtgatgaaacgaagaaaaaaagcatgtttgactcaaagcgcgcggcagtcgccttgaaatggaaaggaattgagctatgcggcgtttcctttgatttattgctggccgcctatttgcttgatccggcgcaaggtgttgatgatgtggctgccgcagcaaaaatgaagcaatacgaagcggtgcgctcggatgaagcggtgtatggcaaaggggcgaagcgggccgtgccggatgagccagtgctcgccgagcatctcgtccgcaaggcggcggcgatttgggcgctcgaacgtccgtttttggatgagctgcgccgcaacgaacaagatcggttgctcgtcgagctcgagcagccgttgtcttcgattttggcggaaatggaatttgccggagtgaaagtggatacgaagcggctcgaacagatgggcgaagagctcgccgagcagctgcgcacggtcgagcagcgcatttatgagctcgccggccaagaattcaacatcaattcaccgaaacagctcggcgtcattttatttgaaaaactgcagctgcccgtcttgaaaaaaacgaaaaccggctactccacttcggcggatgtgcttgaaaaacttgcgccttatcacgagatcgtggaaaacattttgcattaccgccagcttggcaagttgcagtcgacgtatattgaaggattgctgaaagtcgtgcgacccgatacaaagaaggtgcatacgattttcaatcaggcgttgacgcaaaccggacggctcagctcgacggagccgaacttgcaaaacattccgattcggcttgaggaaggacggaaaatccgccaagcgttcgtgccgtcggagtctgattggctcattttcgctgccgactactcgcaaattgagttgcgcgtcctcgcccatattgcggaagatgacaatttaatggaagcgttccgccgcgatttggatatccatacgaaaacagcgatggacattttccaagtgagcgaggacgaagtgacgcccaacatgcgccgtcaggcgaaggcggtcaactttgggatcgtttacgggatcagtgattacggcttggcgcaaaacttaaatatttcacgcaaagaggccgctgaattcatcgagcgctacttcgaaagcttccctggcgtgaagcggtatatggaaaacattgtgcaagaagcaaaacagaaagggtatgtgacgacgctgctgcatcggcgccgctatttgccggatatcacgagccgcaacttctctgtccgcagctttgctgaacggatggcgatgaacacgccgattcaagggagcgccgctgacattattaaaaaggcgatgatcgatctgaacgctagactgaaggaagagcggctgcaagcgcgccttttgctacaggtgcatgacgagctcattttggaggcgccgaaagaagagatggagcggctgtgccggctcgttccggaagtgatggagcaagcggtcacacttcgcgtgccgctcaaagtcgattaccattatggctcgacgtggtatgacgcgaaataaaaaggatcc

SEQ ID NO: 2493 - DNA, 2712 bp, Artificial Sequence
  Description of Artificial Sequence: Synthetic DNA sequence of Bacillus caldolyticus EA1 DNA polymerase N806Y
atgaaatacctgctgccgaccgctgctgctggtctgctgctcctcgctgcccagccggcgatggccatgggattgaaaaaaaagcttgttttaatcgacggcagcagcgtggcgtaccgcgcctttttcgccttgccgcttttgcataacgacaaaggcatccatacgaacgccgtctacgggtttacgatgatgttgaataaaattttggcggaagaagagccaactcatatgcttgtcgcgtttgacgccgggaaaacgacgttccggcatgaagcgtttcaagagtataaaggtgggcgccagcagacgccaccggagctgtcggagcagtttccgctgttgcgcgagctgctgagggcgtatcgcatccccgcctatgaactcgagaactacgaagcggacgatattatcggaacgcttgccgcccgcgctgagcaggaagggtttgaggtgaaagtcatttccggcgaccgcgatctgacccagctcgcctccccccatgtgacggtggacattacgaaaaaagggattaccgatatcgaaccgtacacgccggaggcggtccgcgaaaaatacggcttaactccggaacaaatcgttgatttgaaaggattgatgggcgacaaatcggacaacattcccggagtgccgggcatcggggaaaagacggcggtcaagctgctcaagcaattcggcacggtcgaaaacgtgcttgcctccattgacgagatcaaaggcgaaaagttgaaagaaacgctgcgccaacaccgggagatggcgctgttaagcaaaaagctcgccgccattcgccgcgacgccccggtcgagctctcgcttgatgacatcgtctatcaaggggaagaccgggagaaagtggtcgctttatttaaagagcttgggtttcaatcgtttttagagaaaatggaatcgccgtcatcagaagaggaaaaaccgcttgccaagatggcatttacgcttgctgaccgcgtgacggaggagatgcttgccgacaaggcggcgcttgtcgttgaagtggtcgaggaaaattatcatgatgcgccgatcgtcggcatcgctgtggtcaacgaacatggacggtttttcctgcgcccggagacggcgcttgccgatccgcagtttgtcgcctggcttggtgatgaaacgaagaaaaaaagcatgtttgactcaaagcgcgcggcagtcgccttgaaatggaaaggaattgagctatgcggcgtttcctttgatttattgctggccgcctatttgcttgatccggcgcaaggtgttgatgatgtggctgccgcagcaaaaatgaagcaatacgaagcggtgcgctcggatgaagcggtgtatggcaaaggggcgaagcgggccgtgccggatgagccagtgctcgccgagcatctcgtccgcaaggcggcggcgatttgggcgctcgaacgtccgtttttggatgagctgcgccgcaacgaacaagatcggttgctcgtcgagctcgagcagccgttgtcttcgattttggcggaaatggaatttgccggagtgaaagtggatacgaagcggctcgaacagatgggcgaagagctcgccgagcagctgcgcacggtcgagcagcgcatttatgagctcgccggccaagaattcaacatcaattcaccgaaacagctcggcgtcattttatttgaaaaactgcagctgcccgtcttgaaaaaaacgaaaaccggctactccacttcggcggatgtgcttgaaaaacttgcgccttatcacgagatcgtggaaaacattttgcattaccgccagcttggcaagttgcagtcgacgtatattgaaggattgctgaaagtcgtgcgacccgatacaaagaaggtgcatacgattttcaatcaggcgttgacgcaaaccggacggctcagctcgacggagccgaacttgcaaaacattccgattcggcttgaggaaggacggaaaatccgccaagcgttcgtgccgtcggagtctgattggctcattttcgctgccgactactcgcaaattgagttgcgcgtcctcgcccatattgcggaagatgacaatttaatggaagcgttccgccgcgatttggatatccatacgaaaacagcgatggacattttccaagtgagcgaggacgaagtgacgcccaacatgcgccgtcaggcgaaggcggtcaactttgggatcgtttacgggatcagtgattacggcttggcgcaaaacttaaatatttcacgcaaagaggccgctgaattcatcgagcgctacttcgaaagcttccctggcgtgaagcggtatatggaaaacattgtgcaagaagcaaaacagaaagggtatgtgacgacgctgctgcatcggcgccgctatttgccggatatcacgagccgcaacttctatgtccgcagctttgctgaacggatggcgatgaacacgccgattcaagggagcgccgctgacattattaaaaaggcgatgatcgatctgaacgctagactgaaggaagagcggctgcaagcgcgccttttgctacaggtgcatgacgagctcattttggaggcgccgaaagaagagatggagcggctgtgccggctcgttccggaagtgatggagcaagcggtcacacttcgcgtgccgctcaaagtcgattaccattatggctcgacgtggtatgacgcgaaataaaaaggatcc

SEQ ID NO: 2494 - DNA, 2712 bp, Artificial Sequence
  Description of Artificial Sequence: Synthetic DNA sequence of Bacillus caldolyticus EA1 DNA polymerase N806W
atgaaatacctgctgccgaccgctgctgctggtctgctgctcctcgctgcccagccggcgatggccatgggattgaaaaaaaagcttgttttaatcgacggcagcagcgtggcgtaccgcgcctttttcgccttgccgcttttgcataacgacaaaggcatccatacgaacgccgtctacgggtttacgatgatgttgaataaaattttggcggaagaagagccaactcatatgcttgtcgcgtttgacgccgggaaaacgacgttccggcatgaagcgtttcaagagtataaaggtgggcgccagcagacgccaccggagctgtcggagcagtttccgctgttgcgcgagctgctgagggcgtatcgcatccccgcctatgaactcgagaactacgaagcggacgatattatcggaacgcttgccgcccgcgctgagcaggaagggtttgaggtgaaagtcatttccggcgaccgcgatctgacccagctcgcctccccccatgtgacggtggacattacgaaaaaagggattaccgatatcgaaccgtacacgccggaggcggtccgcgaaaaatacggcttaactccggaacaaatcgttgatttgaaaggattgatgggcgacaaatcggacaacattcccggagtgccgggcatcggggaaaagacggcggtcaagctgctcaagcaattcggcacggtcgaaaacgtgcttgcctccattgacgagatcaaaggcgaaaagttgaaagaaacgctgcgccaacaccgggagatggcgctgttaagcaaaaagctcgccgccattcgccgcgacgccccggtcgagctctcgcttgatgacatcgtctatcaaggggaagaccgggagaaagtggtcgctttatttaaagagcttgggtttcaatcgtttttagagaaaatggaatcgccgtcatcagaagaggaaaaaccgcttgccaagatggcatttacgcttgctgaccgcgtgacggaggagatgcttgccgacaaggcggcgcttgtcgttgaagtggtcgaggaaaattatcatgatgcgccgatcgtcggcatcgctgtggtcaacgaacatggacggtttttcctgcgcccggagacggcgcttgccgatccgcagtttgtcgcctggcttggtgatgaaacgaagaaaaaaagcatgtttgactcaaagcgcgcggcagtcgccttgaaatggaaaggaattgagctatgcggcgtttcctttgatttattgctggccgcctatttgcttgatccggcgcaaggtgttgatgatgtggctgccgcagcaaaaatgaagcaatacgaagcggtgcgctcggatgaagcggtgtatggcaaaggggcgaagcgggccgtgccggatgagccagtgctcgccgagcatctcgtccgcaaggcggcggcgatttgggcgctcgaacgtccgtttttggatgagctgcgccgcaacgaacaagatcggttgctcgtcgagctcgagcagccgttgtcttcgattttggcggaaatggaatttgccggagtgaaagtggatacgaagcggctcgaacagatgggcgaagagctcgccgagcagctgcgcacggtcgagcagcgcatttatgagctcgccggccaagaattcaacatcaattcaccgaaacagctcggcgtcattttatttgaaaaactgcagctgcccgtcttgaaaaaaacgaaaaccggctactccacttcggcggatgtgcttgaaaaacttgcgccttatcacgagatcgtggaaaacattttgcattaccgccagcttggcaagttgcagtcgacgtatattgaaggattgctgaaagtcgtgcgacccgatacaaagaaggtgcatacgattttcaatcaggcgttgacgcaaaccggacggctcagctcgacggagccgaacttgcaaaacattccgattcggcttgaggaaggacggaaaatccgccaagcgttcgtgccgtcggagtctgattggctcattttcgctgccgactactcgcaaattgagttgcgcgtcctcgcccatattgcggaagatgacaatttaatggaagcgttccgccgcgatttggatatccatacgaaaacagcgatggacattttccaagtgagcgaggacgaagtgacgcccaacatgcgccgtcaggcgaaggcggtcaactttgggatcgtttacgggatcagtgattacggcttggcgcaaaacttaaatatttcacgcaaagaggccgctgaattcatcgagcgctacttcgaaagcttccctggcgtgaagcggtatatggaaaacattgtgcaagaagcaaaacagaaagggtatgtgacgacgctgctgcatcggcgccgctatttgccggatatcacgagccgcaacttctgggtccgcagctttgctgaacggatggcgatgaacacgccgattcaagggagcgccgctgacattattaaaaaggcgatgatcgatctgaacgctagactgaaggaagagcggctgcaagcgcgccttttgctacaggtgcatgacgagctcattttggaggcgccgaaagaagagatggagcggctgtgccggctcgttccggaagtgatggagcaagcggtcacacttcgcgtgccgctcaaagtcgattaccattatggctcgacgtggtatgacgcgaaataaaaaggatcc

SEQ ID NO: 2495 - DNA, 2712 bp, Artificial Sequence
  Description of Artificial Sequence: Synthetic DNA sequence of Bacillus caldolyticus EA1 DNA polymerase N806P
atgaaatacctgctgccgaccgctgctgctggtctgctgctcctcgctgcccagccggcgatggccatgggattgaaaaaaaagcttgttttaatcgacggcagcagcgtggcgtaccgcgcctttttcgccttgccgcttttgcataacgacaaaggcatccatacgaacgccgtctacgggtttacgatgatgttgaataaaattttggcggaagaagagccaactcatatgcttgtcgcgtttgacgccgggaaaacgacgttccggcatgaagcgtttcaagagtataaaggtgggcgccagcagacgccaccggagctgtcggagcagtttccgctgttgcgcgagctgctgagggcgtatcgcatccccgcctatgaactcgagaactacgaagcggacgatattatcggaacgcttgccgcccgcgctgagcaggaagggtttgaggtgaaagtcatttccggcgaccgcgatctgacccagctcgcctccccccatgtgacggtggacattacgaaaaaagggattaccgatatcgaaccgtacacgccggaggcggtccgcgaaaaatacggcttaactccggaacaaatcgttgatttgaaaggattgatgggcgacaaatcggacaacattcccggagtgccgggcatcggggaaaagacggcggtcaagctgctcaagcaattcggcacggtcgaaaacgtgcttgcctccattgacgagatcaaaggcgaaaagttgaaagaaacgctgcgccaacaccgggagatggcgctgttaagcaaaaagctcgccgccattcgccgcgacgccccggtcgagctctcgcttgatgacatcgtctatcaaggggaagaccgggagaaagtggtcgctttatttaaagagcttgggtttcaatcgtttttagagaaaatggaatcgccgtcatcagaagaggaaaaaccgcttgccaagatggcatttacgcttgctgaccgcgtgacggaggagatgcttgccgacaaggcggcgcttgtcgttgaagtggtcgaggaaaattatcatgatgcgccgatcgtcggcatcgctgtggtcaacgaacatggacggtttttcctgcgcccggagacggcgcttgccgatccgcagtttgtcgcctggcttggtgatgaaacgaagaaaaaaagcatgtttgactcaaagcgcgcggcagtcgccttgaaatggaaaggaattgagctatgcggcgtttcctttgatttattgctggccgcctatttgcttgatccggcgcaaggtgttgatgatgtggctgccgcagcaaaaatgaagcaatacgaagcggtgcgctcggatgaagcggtgtatggcaaaggggcgaagcgggccgtgccggatgagccagtgctcgccgagcatctcgtccgcaaggcggcggcgatttgggcgctcgaacgtccgtttttggatgagctgcgccgcaacgaacaagatcggttgctcgtcgagctcgagcagccgttgtcttcgattttggcggaaatggaatttgccggagtgaaagtggatacgaagcggctcgaacagatgggcgaagagctcgccgagcagctgcgcacggtcgagcagcgcatttatgagctcgccggccaagaattcaacatcaattcaccgaaacagctcggcgtcattttatttgaaaaactgcagctgcccgtcttgaaaaaaacgaaaaccggctactccacttcggcggatgtgcttgaaaaacttgcgccttatcacgagatcgtggaaaacattttgcattaccgccagcttggcaagttgcagtcgacgtatattgaaggattgctgaaagtcgtgcgacccgatacaaagaaggtgcatacgattttcaatcaggcgttgacgcaaaccggacggctcagctcgacggagccgaacttgcaaaacattccgattcggcttgaggaaggacggaaaatccgccaagcgttcgtgccgtcggagtctgattggctcattttcgctgccgactactcgcaaattgagttgcgcgtcctcgcccatattgcggaagatgacaatttaatggaagcgttccgccgcgatttggatatccatacgaaaacagcgatggacattttccaagtgagcgaggacgaagtgacgcccaacatgcgccgtcaggcgaaggcggtcaactttgggatcgtttacgggatcagtgattacggcttggcgcaaaacttaaatatttcacgcaaagaggccgctgaattcatcgagcgctacttcgaaagcttccctggcgtgaagcggtatatggaaaacattgtgcaagaagcaaaacagaaagggtatgtgacgacgctgctgcatcggcgccgctatttgccggatatcacgagccgcaacttccctgtccgcagctttgctgaacggatggcgatgaacacgccgattcaagggagcgccgctgacattattaaaaaggcgatgatcgatctgaacgctagactgaaggaagagcggctgcaagcgcgccttttgctacaggtgcatgacgagctcattttggaggcgccgaaagaagagatggagcggctgtgccggctcgttccggaagtgatggagcaagcggtcacacttcgcgtgccgctcaaagtcgattaccattatggctcgacgtggtatgacgcgaaataaaaaggatcc

SEQ ID NO: 2496 - DNA, 2712 bp, Artificial Sequence
  Description of Artificial Sequence: Synthetic DNA sequence of Bacillus caldolyticus EA1 DNA polymerase N806M
atgaaatacctgctgccgaccgctgctgctggtctgctgctcctcgctgcccagccggcgatggccatgggattgaaaaaaaagcttgttttaatcgacggcagcagcgtggcgtaccgcgcctttttcgccttgccgcttttgcataacgacaaaggcatccatacgaacgccgtctacgggtttacgatgatgttgaataaaattttggcggaagaagagccaactcatatgcttgtcgcgtttgacgccgggaaaacgacgttccggcatgaagcgtttcaagagtataaaggtgggcgccagcagacgccaccggagctgtcggagcagtttccgctgttgcgcgagctgctgagggcgtatcgcatccccgcctatgaactcgagaactacgaagcggacgatattatcggaacgcttgccgcccgcgctgagcaggaagggtttgaggtgaaagtcatttccggcgaccgcgatctgacccagctcgcctccccccatgtgacggtggacattacgaaaaaagggattaccgatatcgaaccgtacacgccggaggcggtccgcgaaaaatacggcttaactccggaacaaatcgttgatttgaaaggattgatgggcgacaaatcggacaacattcccggagtgccgggcatcggggaaaagacggcggtcaagctgctcaagcaattcggcacggtcgaaaacgtgcttgcctccattgacgagatcaaaggcgaaaagttgaaagaaacgctgcgccaacaccgggagatggcgctgttaagcaaaaagctcgccgccattcgccgcgacgccccggtcgagctctcgcttgatgacatcgtctatcaaggggaagaccgggagaaagtggtcgctttatttaaagagcttgggtttcaatcgtttttagagaaaatggaatcgccgtcatcagaagaggaaaaaccgcttgccaagatggcatttacgcttgctgaccgcgtgacggaggagatgcttgccgacaaggcggcgcttgtcgttgaagtggtcgaggaaaattatcatgatgcgccgatcgtcggcatcgctgtggtcaacgaacatggacggtttttcctgcgcccggagacggcgcttgccgatccgcagtttgtcgcctggcttggtgatgaaacgaagaaaaaaagcatgtttgactcaaagcgcgcggcagtcgccttgaaatggaaaggaattgagctatgcggcgtttcctttgatttattgctggccgcctatttgcttgatccggcgcaaggtgttgatgatgtggctgccgcagcaaaaatgaagcaatacgaagcggtgcgctcggatgaagcggtgtatggcaaaggggcgaagcgggccgtgccggatgagccagtgctcgccgagcatctcgtccgcaaggcggcggcgatttgggcgctcgaacgtccgtttttggatgagctgcgccgcaacgaacaagatcggttgctcgtcgagctcgagcagccgttgtcttcgattttggcggaaatggaatttgccggagtgaaagtggatacgaagcggctcgaacagatgggcgaagagctcgccgagcagctgcgcacggtcgagcagcgcatttatgagctcgccggccaagaattcaacatcaattcaccgaaacagctcggcgtcattttatttgaaaaactgcagctgcccgtcttgaaaaaaacgaaaaccggctactccacttcggcggatgtgcttgaaaaacttgcgccttatcacgagatcgtggaaaacattttgcattaccgccagcttggcaagttgcagtcgacgtatattgaaggattgctgaaagtcgtgcgacccgatacaaagaaggtgcatacgattttcaatcaggcgttgacgcaaaccggacggctcagctcgacggagccgaacttgcaaaacattccgattcggcttgaggaaggacggaaaatccgccaagcgttcgtgccgtcggagtctgattggctcattttcgctgccgactactcgcaaattgagttgcgcgtcctcgcccatattgcggaagatgacaatttaatggaagcgttccgccgcgatttggatatccatacgaaaacagcgatggacattttccaagtgagcgaggacgaagtgacgcccaacatgcgccgtcaggcgaaggcggtcaactttgggatcgtttacgggatcagtgattacggcttggcgcaaaacttaaatatttcacgcaaagaggccgctgaattcatcgagcgctacttcgaaagcttccctggcgtgaagcggtatatggaaaacattgtgcaagaagcaaaacagaaagggtatgtgacgacgctgctgcatcggcgccgctatttgccggatatcacgagccgcaacttcatggtccgcagctttgctgaacggatggcgatgaacacgccgattcaagggagcgccgctgacattattaaaaaggcgatgatcgatctgaacgctagactgaaggaagagcggctgcaagcgcgccttttgctacaggtgcatgacgagctcattttggaggcgccgaaagaagagatggagcggctgtgccggctcgttccggaagtgatggagcaagcggtcacacttcgcgtgccgctcaaagtcgattaccattatggctcgacgtggtatgacgcgaaataaaaaggatcc

SEQ ID NO: 2497 - DNA, 2712 bp, Artificial Sequence
  Description of Artificial Sequence: Synthetic DNA sequence of Bacillus caldolyticus EA1 DNA polymerase N806T
atgaaatacctgctgccgaccgctgctgctggtctgctgctcctcgctgcccagccggcgatggccatgggattgaaaaaaaagcttgttttaatcgacggcagcagcgtggcgtaccgcgcctttttcgccttgccgcttttgcataacgacaaaggcatccatacgaacgccgtctacgggtttacgatgatgttgaataaaattttggcggaagaagagccaactcatatgcttgtcgcgtttgacgccgggaaaacgacgttccggcatgaagcgtttcaagagtataaaggtgggcgccagcagacgccaccggagctgtcggagcagtttccgctgttgcgcgagctgctgagggcgtatcgcatccccgcctatgaactcgagaactacgaagcggacgatattatcggaacgcttgccgcccgcgctgagcaggaagggtttgaggtgaaagtcatttccggcgaccgcgatctgacccagctcgcctccccccatgtgacggtggacattacgaaaaaagggattaccgatatcgaaccgtacacgccggaggcggtccgcgaaaaatacggcttaactccggaacaaatcgttgatttgaaaggattgatgggcgacaaatcggacaacattcccggagtgccgggcatcggggaaaagacggcggtcaagctgctcaagcaattcggcacggtcgaaaacgtgcttgcctccattgacgagatcaaaggcgaaaagttgaaagaaacgctgcgccaacaccgggagatggcgctgttaagcaaaaagctcgccgccattcgccgcgacgccccggtcgagctctcgcttgatgacatcgtctatcaaggggaagaccgggagaaagtggtcgctttatttaaagagcttgggtttcaatcgtttttagagaaaatggaatcgccgtcatcagaagaggaaaaaccgcttgccaagatggcatttacgcttgctgaccgcgtgacggaggagatgcttgccgacaaggcggcgcttgtcgttgaagtggtcgaggaaaattatcatgatgcgccgatcgtcggcatcgctgtggtcaacgaacatggacggtttttcctgcgcccggagacggcgcttgccgatccgcagtttgtcgcctggcttggtgatgaaacgaagaaaaaaagcatgtttgactcaaagcgcgcggcagtcgccttgaaatggaaaggaattgagctatgcggcgtttcctttgatttattgctggccgcctatttgcttgatccggcgcaaggtgttgatgatgtggctgccgcagcaaaaatgaagcaatacgaagcggtgcgctcggatgaagcggtgtatggcaaaggggcgaagcgggccgtgccggatgagccagtgctcgccgagcatctcgtccgcaaggcggcggcgatttgggcgctcgaacgtccgtttttggatgagctgcgccgcaacgaacaagatcggttgctcgtcgagctcgagcagccgttgtcttcgattttggcggaaatggaatttgccggagtgaaagtggatacgaagcggctcgaacagatgggcgaagagctcgccgagcagctgcgcacggtcgagcagcgcatttatgagctcgccggccaagaattcaacatcaattcaccgaaacagctcggcgtcattttatttgaaaaactgcagctgcccgtcttgaaaaaaacgaaaaccggctactccacttcggcggatgtgcttgaaaaacttgcgccttatcacgagatcgtggaaaacattttgcattaccgccagcttggcaagttgcagtcgacgtatattgaaggattgctgaaagtcgtgcgacccgatacaaagaaggtgcatacgattttcaatcaggcgttgacgcaaaccggacggctcagctcgacggagccgaacttgcaaaacattccgattcggcttgaggaaggacggaaaatccgccaagcgttcgtgccgtcggagtctgattggctcattttcgctgccgactactcgcaaattgagttgcgcgtcctcgcccatattgcggaagatgacaatttaatggaagcgttccgccgcgatttggatatccatacgaaaacagcgatggacattttccaagtgagcgaggacgaagtgacgcccaacatgcgccgtcaggcgaaggcggtcaactttgggatcgtttacgggatcagtgattacggcttggcgcaaaacttaaatatttcacgcaaagaggccgctgaattcatcgagcgctacttcgaaagcttccctggcgtgaagcggtatatggaaaacattgtgcaagaagcaaaacagaaagggtatgtgacgacgctgctgcatcggcgccgctatttgccggatatcacgagccgcaacttcactgtccgcagctttgctgaacggatggcgatgaacacgccgattcaagggagcgccgctgacattattaaaaaggcgatgatcgatctgaacgctagactgaaggaagagcggctgcaagcgcgccttttgctacaggtgcatgacgagctcattttggaggcgccgaaagaagagatggagcggctgtgccggctcgttccggaagtgatggagcaagcggtcacacttcgcgtgccgctcaaagtcgattaccattatggctcgacgtggtatgacgcgaaataaaaaggatcc

SEQ ID NO: 2498 - DNA, 2712 bp, Artificial Sequence
  Description of Artificial Sequence: Synthetic DNA sequence of Bacillus caldolyticus EA1 DNA polymerase N806V
atgaaatacctgctgccgaccgctgctgctggtctgctgctcctcgctgcccagccggcgatggccatgggattgaaaaaaaagcttgttttaatcgacggcagcagcgtggcgtaccgcgcctttttcgccttgccgcttttgcataacgacaaaggcatccatacgaacgccgtctacgggtttacgatgatgttgaataaaattttggcggaagaagagccaactcatatgcttgtcgcgtttgacgccgggaaaacgacgttccggcatgaagcgtttcaagagtataaaggtgggcgccagcagacgccaccggagctgtcggagcagtttccgctgttgcgcgagctgctgagggcgtatcgcatccccgcctatgaactcgagaactacgaagcggacgatattatcggaacgcttgccgcccgcgctgagcaggaagggtttgaggtgaaagtcatttccggcgaccgcgatctgacccagctcgcctccccccatgtgacggtggacattacgaaaaaagggattaccgatatcgaaccgtacacgccggaggcggtccgcgaaaaatacggcttaactccggaacaaatcgttgatttgaaaggattgatgggcgacaaatcggacaacattcccggagtgccgggcatcggggaaaagacggcggtcaagctgctcaagcaattcggcacggtcgaaaacgtgcttgcctccattgacgagatcaaaggcgaaaagttgaaagaaacgctgcgccaacaccgggagatggcgctgttaagcaaaaagctcgccgccattcgccgcgacgccccggtcgagctctcgcttgatgacatcgtctatcaaggggaagaccgggagaaagtggtcgctttatttaaagagcttgggtttcaatcgtttttagagaaaatggaatcgccgtcatcagaagaggaaaaaccgcttgccaagatggcatttacgcttgctgaccgcgtgacggaggagatgcttgccgacaaggcggcgcttgtcgttgaagtggtcgaggaaaattatcatgatgcgccgatcgtcggcatcgctgtggtcaacgaacatggacggtttttcctgcgcccggagacggcgcttgccgatccgcagtttgtcgcctggcttggtgatgaaacgaagaaaaaaagcatgtttgactcaaagcgcgcggcagtcgccttgaaatggaaaggaattgagctatgcggcgtttcctttgatttattgctggccgcctatttgcttgatccggcgcaaggtgttgatgatgtggctgccgcagcaaaaatgaagcaatacgaagcggtgcgctcggatgaagcggtgtatggcaaaggggcgaagcgggccgtgccggatgagccagtgctcgccgagcatctcgtccgcaaggcggcggcgatttgggcgctcgaacgtccgtttttggatgagctgcgccgcaacgaacaagatcggttgctcgtcgagctcgagcagccgttgtcttcgattttggcggaaatggaatttgccggagtgaaagtggatacgaagcggctcgaacagatgggcgaagagctcgccgagcagctgcgcacggtcgagcagcgcatttatgagctcgccggccaagaattcaacatcaattcaccgaaacagctcggcgtcattttatttgaaaaactgcagctgcccgtcttgaaaaaaacgaaaaccggctactccacttcggcggatgtgcttgaaaaacttgcgccttatcacgagatcgtggaaaacattttgcattaccgccagcttggcaagttgcagtcgacgtatattgaaggattgctgaaagtcgtgcgacccgatacaaagaaggtgcatacgattttcaatcaggcgttgacgcaaaccggacggctcagctcgacggagccgaacttgcaaaacattccgattcggcttgaggaaggacggaaaatccgccaagcgttcgtgccgtcggagtctgattggctcattttcgctgccgactactcgcaaattgagttgcgcgtcctcgcccatattgcggaagatgacaatttaatggaagcgttccgccgcgatttggatatccatacgaaaacagcgatggacattttccaagtgagcgaggacgaagtgacgcccaacatgcgccgtcaggcgaaggcggtcaactttgggatcgtttacgggatcagtgattacggcttggcgcaaaacttaaatatttcacgcaaagaggccgctgaattcatcgagcgctacttcgaaagcttccctggcgtgaagcggtatatggaaaacattgtgcaagaagcaaaacagaaagggtatgtgacgacgctgctgcatcggcgccgctatttgccggatatcacgagccgcaacttcgtcgtccgcagctttgctgaacggatggcgatgaacacgccgattcaagggagcgccgctgacattattaaaaaggcgatgatcgatctgaacgctagactgaaggaagagcggctgcaagcgcgccttttgctacaggtgcatgacgagctcattttggaggcgccgaaagaagagatggagcggctgtgccggctcgttccggaagtgatggagcaagcggtcacacttcgcgtgccgctcaaagtcgattaccattatggctcgacgtggtatgacgcgaaataaaaaggatcc

SEQ ID NO: 2499 - DNA, 2712 bp, Artificial Sequence
  Description of Artificial Sequence: Synthetic DNA sequence of Bacillus caldolyticus EA1 DNA polymerase V807A
atgaaatacctgctgccgaccgctgctgctggtctgctgctcctcgctgcccagccggcgatggccatgggattgaaaaaaaagcttgttttaatcgacggcagcagcgtggcgtaccgcgcctttttcgccttgccgcttttgcataacgacaaaggcatccatacgaacgccgtctacgggtttacgatgatgttgaataaaattttggcggaagaagagccaactcatatgcttgtcgcgtttgacgccgggaaaacgacgttccggcatgaagcgtttcaagagtataaaggtgggcgccagcagacgccaccggagctgtcggagcagtttccgctgttgcgcgagctgctgagggcgtatcgcatccccgcctatgaactcgagaactacgaagcggacgatattatcggaacgcttgccgcccgcgctgagcaggaagggtttgaggtgaaagtcatttccggcgaccgcgatctgacccagctcgcctccccccatgtgacggtggacattacgaaaaaagggattaccgatatcgaaccgtacacgccggaggcggtccgcgaaaaatacggcttaactccggaacaaatcgttgatttgaaaggattgatgggcgacaaatcggacaacattcccggagtgccgggcatcggggaaaagacggcggtcaagctgctcaagcaattcggcacggtcgaaaacgtgcttgcctccattgacgagatcaaaggcgaaaagttgaaagaaacgctgcgccaacaccgggagatggcgctgttaagcaaaaagctcgccgccattcgccgcgacgccccggtcgagctctcgcttgatgacatcgtctatcaaggggaagaccgggagaaagtggtcgctttatttaaagagcttgggtttcaatcgtttttagagaaaatggaatcgccgtcatcagaagaggaaaaaccgcttgccaagatggcatttacgcttgctgaccgcgtgacggaggagatgcttgccgacaaggcggcgcttgtcgttgaagtggtcgaggaaaattatcatgatgcgccgatcgtcggcatcgctgtggtcaacgaacatggacggtttttcctgcgcccggagacggcgcttgccgatccgcagtttgtcgcctggcttggtgatgaaacgaagaaaaaaagcatgtttgactcaaagcgcgcggcagtcgccttgaaatggaaaggaattgagctatgcggcgtttcctttgatttattgctggccgcctatttgcttgatccggcgcaaggtgttgatgatgtggctgccgcagcaaaaatgaagcaatacgaagcggtgcgctcggatgaagcggtgtatggcaaaggggcgaagcgggccgtgccggatgagccagtgctcgccgagcatctcgtccgcaaggcggcggcgatttgggcgctcgaacgtccgtttttggatgagctgcgccgcaacgaacaagatcggttgctcgtcgagctcgagcagccgttgtcttcgattttggcggaaatggaatttgccggagtgaaagtggatacgaagcggctcgaacagatgggcgaagagctcgccgagcagctgcgcacggtcgagcagcgcatttatgagctcgccggccaagaattcaacatcaattcaccgaaacagctcggcgtcattttatttgaaaaactgcagctgcccgtcttgaaaaaaacgaaaaccggctactccacttcggcggatgtgcttgaaaaacttgcgccttatcacgagatcgtggaaaacattttgcattaccgccagcttggcaagttgcagtcgacgtatattgaaggattgctgaaagtcgtgcgacccgatacaaagaaggtgcatacgattttcaatcaggcgttgacgcaaaccggacggctcagctcgacggagccgaacttgcaaaacattccgattcggcttgaggaaggacggaaaatccgccaagcgttcgtgccgtcggagtctgattggctcattttcgctgccgactactcgcaaattgagttgcgcgtcctcgcccatattgcggaagatgacaatttaatggaagcgttccgccgcgatttggatatccatacgaaaacagcgatggacattttccaagtgagcgaggacgaagtgacgcccaacatgcgccgtcaggcgaaggcggtcaactttgggatcgtttacgggatcagtgattacggcttggcgcaaaacttaaatatttcacgcaaagaggccgctgaattcatcgagcgctacttcgaaagcttccctggcgtgaagcggtatatggaaaacattgtgcaagaagcaaaacagaaagggtatgtgacgacgctgctgcatcggcgccgctatttgccggatatcacgagccgcaacttcaacgctcgcagctttgctgaacggatggcgatgaacacgccgattcaagggagcgccgctgacattattaaaaaggcgatgatcgatctgaacgctagactgaaggaagagcggctgcaagcgcgccttttgctacaggtgcatgacgagctcattttggaggcgccgaaagaagagatggagcggctgtgccggctcgttccggaagtgatggagcaagcggtcacacttcgcgtgccgctcaaagtcgattaccattatggctcgacgtggtatgacgcgaaataaaaaggatcc

SEQ ID NO: 2500 - DNA, 2712 bp, Artificial Sequence
  Description of Artificial Sequence: Synthetic DNA sequence of Bacillus caldolyticus EA1 DNA polymerase V807R
atgaaatacctgctgccgaccgctgctgctggtctgctgctcctcgctgcccagccggcgatggccatgggattgaaaaaaaagcttgttttaatcgacggcagcagcgtggcgtaccgcgcctttttcgccttgccgcttttgcataacgacaaaggcatccatacgaacgccgtctacgggtttacgatgatgttgaataaaattttggcggaagaagagccaactcatatgcttgtcgcgtttgacgccgggaaaacgacgttccggcatgaagcgtttcaagagtataaaggtgggcgccagcagacgccaccggagctgtcggagcagtttccgctgttgcgcgagctgctgagggcgtatcgcatccccgcctatgaactcgagaactacgaagcggacgatattatcggaacgcttgccgcccgcgctgagcaggaagggtttgaggtgaaagtcatttccggcgaccgcgatctgacccagctcgcctccccccatgtgacggtggacattacgaaaaaagggattaccgatatcgaaccgtacacgccggaggcggtccgcgaaaaatacggcttaactccggaacaaatcgttgatttgaaaggattgatgggcgacaaatcggacaacattcccggagtgccgggcatcggggaaaagacggcggtcaagctgctcaagcaattcggcacggtcgaaaacgtgcttgcctccattgacgagatcaaaggcgaaaagttgaaagaaacgctgcgccaacaccgggagatggcgctgttaagcaaaaagctcgccgccattcgccgcgacgccccggtcgagctctcgcttgatgacatcgtctatcaaggggaagaccgggagaaagtggtcgctttatttaaagagcttgggtttcaatcgtttttagagaaaatggaatcgccgtcatcagaagaggaaaaaccgcttgccaagatggcatttacgcttgctgaccgcgtgacggaggagatgcttgccgacaaggcggcgcttgtcgttgaagtggtcgaggaaaattatcatgatgcgccgatcgtcggcatcgctgtggtcaacgaacatggacggtttttcctgcgcccggagacggcgcttgccgatccgcagtttgtcgcctggcttggtgatgaaacgaagaaaaaaagcatgtttgactcaaagcgcgcggcagtcgccttgaaatggaaaggaattgagctatgcggcgtttcctttgatttattgctggccgcctatttgcttgatccggcgcaaggtgttgatgatgtggctgccgcagcaaaaatgaagcaatacgaagcggtgcgctcggatgaagcggtgtatggcaaaggggcgaagcgggccgtgccggatgagccagtgctcgccgagcatctcgtccgcaaggcggcggcgatttgggcgctcgaacgtccgtttttggatgagctgcgccgcaacgaacaagatcggttgctcgtcgagctcgagcagccgttgtcttcgattttggcggaaatggaatttgccggagtgaaagtggatacgaagcggctcgaacagatgggcgaagagctcgccgagcagctgcgcacggtcgagcagcgcatttatgagctcgccggccaagaattcaacatcaattcaccgaaacagctcggcgtcattttatttgaaaaactgcagctgcccgtcttgaaaaaaacgaaaaccggctactccacttcggcggatgtgcttgaaaaacttgcgccttatcacgagatcgtggaaaacattttgcattaccgccagcttggcaagttgcagtcgacgtatattgaaggattgctgaaagtcgtgcgacccgatacaaagaaggtgcatacgattttcaatcaggcgttgacgcaaaccggacggctcagctcgacggagccgaacttgcaaaacattccgattcggcttgaggaaggacggaaaatccgccaagcgttcgtgccgtcggagtctgattggctcattttcgctgccgactactcgcaaattgagttgcgcgtcctcgcccatattgcggaagatgacaatttaatggaagcgttccgccgcgatttggatatccatacgaaaacagcgatggacattttccaagtgagcgaggacgaagtgacgcccaacatgcgccgtcaggcgaaggcggtcaactttgggatcgtttacgggatcagtgattacggcttggcgcaaaacttaaatatttcacgcaaagaggccgctgaattcatcgagcgctacttcgaaagcttccctggcgtgaagcggtatatggaaaacattgtgcaagaagcaaaacagaaagggtatgtgacgacgctgctgcatcggcgccgctatttgccggatatcacgagccgcaacttcaaccgacgcagctttgctgaacggatggcgatgaacacgccgattcaagggagcgccgctgacattattaaaaaggcgatgatcgatctgaacgctagactgaaggaagagcggctgcaagcgcgccttttgctacaggtgcatgacgagctcattttggaggcgccgaaagaagagatggagcggctgtgccggctcgttccggaagtgatggagcaagcggtcacacttcgcgtgccgctcaaagtcgattaccattatggctcgacgtggtatgacgcgaaataaaaaggatcc

SEQ ID NO: 2501 - DNA, 2712 bp, Artificial Sequence
  Description of Artificial Sequence: Synthetic DNA sequence of Bacillus caldolyticus EA1 DNA polymerase V807C
atgaaatacctgctgccgaccgctgctgctggtctgctgctcctcgctgcccagccggcgatggccatgggattgaaaaaaaagcttgttttaatcgacggcagcagcgtggcgtaccgcgcctttttcgccttgccgcttttgcataacgacaaaggcatccatacgaacgccgtctacgggtttacgatgatgttgaataaaattttggcggaagaagagccaactcatatgcttgtcgcgtttgacgccgggaaaacgacgttccggcatgaagcgtttcaagagtataaaggtgggcgccagcagacgccaccggagctgtcggagcagtttccgctgttgcgcgagctgctgagggcgtatcgcatccccgcctatgaactcgagaactacgaagcggacgatattatcggaacgcttgccgcccgcgctgagcaggaagggtttgaggtgaaagtcatttccggcgaccgcgatctgacccagctcgcctccccccatgtgacggtggacattacgaaaaaagggattaccgatatcgaaccgtacacgccggaggcggtccgcgaaaaatacggcttaactccggaacaaatcgttgatttgaaaggattgatgggcgacaaatcggacaacattcccggagtgccgggcatcggggaaaagacggcggtcaagctgctcaagcaattcggcacggtcgaaaacgtgcttgcctccattgacgagatcaaaggcgaaaagttgaaagaaacgctgcgccaacaccgggagatggcgctgttaagcaaaaagctcgccgccattcgccgcgacgccccggtcgagctctcgcttgatgacatcgtctatcaaggggaagaccgggagaaagtggtcgctttatttaaagagcttgggtttcaatcgtttttagagaaaatggaatcgccgtcatcagaagaggaaaaaccgcttgccaagatggcatttacgcttgctgaccgcgtgacggaggagatgcttgccgacaaggcggcgcttgtcgttgaagtggtcgaggaaaattatcatgatgcgccgatcgtcggcatcgctgtggtcaacgaacatggacggtttttcctgcgcccggagacggcgcttgccgatccgcagtttgtcgcctggcttggtgatgaaacgaagaaaaaaagcatgtttgactcaaagcgcgcggcagtcgccttgaaatggaaaggaattgagctatgcggcgtttcctttgatttattgctggccgcctatttgcttgatccggcgcaaggtgttgatgatgtggctgccgcagcaaaaatgaagcaatacgaagcggtgcgctcggatgaagcggtgtatggcaaaggggcgaagcgggccgtgccggatgagccagtgctcgccgagcatctcgtccgcaaggcggcggcgatttgggcgctcgaacgtccgtttttggatgagctgcgccgcaacgaacaagatcggttgctcgtcgagctcgagcagccgttgtcttcgattttggcggaaatggaatttgccggagtgaaagtggatacgaagcggctcgaacagatgggcgaagagctcgccgagcagctgcgcacggtcgagcagcgcatttatgagctcgccggccaagaattcaacatcaattcaccgaaacagctcggcgtcattttatttgaaaaactgcagctgcccgtcttgaaaaaaacgaaaaccggctactccacttcggcggatgtgcttgaaaaacttgcgccttatcacgagatcgtggaaaacattttgcattaccgccagcttggcaagttgcagtcgacgtatattgaaggattgctgaaagtcgtgcgacccgatacaaagaaggtgcatacgattttcaatcaggcgttgacgcaaaccggacggctcagctcgacggagccgaacttgcaaaacattccgattcggcttgaggaaggacggaaaatccgccaagcgttcgtgccgtcggagtctgattggctcattttcgctgccgactactcgcaaattgagttgcgcgtcctcgcccatattgcggaagatgacaatttaatggaagcgttccgccgcgatttggatatccatacgaaaacagcgatggacattttccaagtgagcgaggacgaagtgacgcccaacatgcgccgtcaggcgaaggcggtcaactttgggatcgtttacgggatcagtgattacggcttggcgcaaaacttaaatatttcacgcaaagaggccgctgaattcatcgagcgctacttcgaaagcttccctggcgtgaagcggtatatggaaaacattgtgcaagaagcaaaacagaaagggtatgtgacgacgctgctgcatcggcgccgctatttgccggatatcacgagccgcaacttcaactgtcgcagctttgctgaacggatggcgatgaacacgccgattcaagggagcgccgctgacattattaaaaaggcgatgatcgatctgaacgctagactgaaggaagagcggctgcaagcgcgccttttgctacaggtgcatgacgagctcattttggaggcgccgaaagaagagatggagcggctgtgccggctcgttccggaagtgatggagcaagcggtcacacttcgcgtgccgctcaaagtcgattaccattatggctcgacgtggtatgacgcgaaataaaaaggatcc

SEQ ID NO: 2502 - DNA, 2712 bp, Artificial Sequence
  Description of Artificial Sequence: Synthetic DNA sequence of Bacillus caldolyticus EA1 DNA polymerase V807G
atgaaatacctgctgccgaccgctgctgctggtctgctgctcctcgctgcccagccggcgatggccatgggattgaaaaaaaagcttgttttaatcgacggcagcagcgtggcgtaccgcgcctttttcgccttgccgcttttgcataacgacaaaggcatccatacgaacgccgtctacgggtttacgatgatgttgaataaaattttggcggaagaagagccaactcatatgcttgtcgcgtttgacgccgggaaaacgacgttccggcatgaagcgtttcaagagtataaaggtgggcgccagcagacgccaccggagctgtcggagcagtttccgctgttgcgcgagctgctgagggcgtatcgcatccccgcctatgaactcgagaactacgaagcggacgatattatcggaacgcttgccgcccgcgctgagcaggaagggtttgaggtgaaagtcatttccggcgaccgcgatctgacccagctcgcctccccccatgtgacggtggacattacgaaaaaagggattaccgatatcgaaccgtacacgccggaggcggtccgcgaaaaatacggcttaactccggaacaaatcgttgatttgaaaggattgatgggcgacaaatcggacaacattcccggagtgccgggcatcggggaaaagacggcggtcaagctgctcaagcaattcggcacggtcgaaaacgtgcttgcctccattgacgagatcaaaggcgaaaagttgaaagaaacgctgcgccaacaccgggagatggcgctgttaagcaaaaagctcgccgccattcgccgcgacgccccggtcgagctctcgcttgatgacatcgtctatcaaggggaagaccgggagaaagtggtcgctttatttaaagagcttgggtttcaatcgtttttagagaaaatggaatcgccgtcatcagaagaggaaaaaccgcttgccaagatggcatttacgcttgctgaccgcgtgacggaggagatgcttgccgacaaggcggcgcttgtcgttgaagtggtcgaggaaaattatcatgatgcgccgatcgtcggcatcgctgtggtcaacgaacatggacggtttttcctgcgcccggagacggcgcttgccgatccgcagtttgtcgcctggcttggtgatgaaacgaagaaaaaaagcatgtttgactcaaagcgcgcggcagtcgccttgaaatggaaaggaattgagctatgcggcgtttcctttgatttattgctggccgcctatttgcttgatccggcgcaaggtgttgatgatgtggctgccgcagcaaaaatgaagcaatacgaagcggtgcgctcggatgaagcggtgtatggcaaaggggcgaagcgggccgtgccggatgagccagtgctcgccgagcatctcgtccgcaaggcggcggcgatttgggcgctcgaacgtccgtttttggatgagctgcgccgcaacgaacaagatcggttgctcgtcgagctcgagcagccgttgtcttcgattttggcggaaatggaatttgccggagtgaaagtggatacgaagcggctcgaacagatgggcgaagagctcgccgagcagctgcgcacggtcgagcagcgcatttatgagctcgccggccaagaattcaacatcaattcaccgaaacagctcggcgtcattttatttgaaaaactgcagctgcccgtcttgaaaaaaacgaaaaccggctactccacttcggcggatgtgcttgaaaaacttgcgccttatcacgagatcgtggaaaacattttgcattaccgccagcttggcaagttgcagtcgacgtatattgaaggattgctgaaagtcgtgcgacccgatacaaagaaggtgcatacgattttcaatcaggcgttgacgcaaaccggacggctcagctcgacggagccgaacttgcaaaacattccgattcggcttgaggaaggacggaaaatccgccaagcgttcgtgccgtcggagtctgattggctcattttcgctgccgactactcgcaaattgagttgcgcgtcctcgcccatattgcggaagatgacaatttaatggaagcgttccgccgcgatttggatatccatacgaaaacagcgatggacattttccaagtgagcgaggacgaagtgacgcccaacatgcgccgtcaggcgaaggcggtcaactttgggatcgtttacgggatcagtgattacggcttggcgcaaaacttaaatatttcacgcaaagaggccgctgaattcatcgagcgctacttcgaaagcttccctggcgtgaagcggtatatggaaaacattgtgcaagaagcaaaacagaaagggtatgtgacgacgctgctgcatcggcgccgctatttgccggatatcacgagccgcaacttcaacggtcgcagctttgctgaacggatggcgatgaacacgccgattcaagggagcgccgctgacattattaaaaaggcgatgatcgatctgaacgctagactgaaggaagagcggctgcaagcgcgccttttgctacaggtgcatgacgagctcattttggaggcgccgaaagaagagatggagcggctgtgccggctcgttccggaagtgatggagcaagcggtcacacttcgcgtgccgctcaaagtcgattaccattatggctcgacgtggtatgacgcgaaataaaaaggatcc

SEQ ID NO: 2503 - DNA, 2712 bp, Artificial Sequence
  Description of Artificial Sequence: Synthetic DNA sequence of Bacillus caldolyticus EA1 DNA polymerase V807Q
atgaaatacctgctgccgaccgctgctgctggtctgctgctcctcgctgcccagccggcgatggccatgggattgaaaaaaaagcttgttttaatcgacggcagcagcgtggcgtaccgcgcctttttcgccttgccgcttttgcataacgacaaaggcatccatacgaacgccgtctacgggtttacgatgatgttgaataaaattttggcggaagaagagccaactcatatgcttgtcgcgtttgacgccgggaaaacgacgttccggcatgaagcgtttcaagagtataaaggtgggcgccagcagacgccaccggagctgtcggagcagtttccgctgttgcgcgagctgctgagggcgtatcgcatccccgcctatgaactcgagaactacgaagcggacgatattatcggaacgcttgccgcccgcgctgagcaggaagggtttgaggtgaaagtcatttccggcgaccgcgatctgacccagctcgcctccccccatgtgacggtggacattacgaaaaaagggattaccgatatcgaaccgtacacgccggaggcggtccgcgaaaaatacggcttaactccggaacaaatcgttgatttgaaaggattgatgggcgacaaatcggacaacattcccggagtgccgggcatcggggaaaagacggcggtcaagctgctcaagcaattcggcacggtcgaaaacgtgcttgcctccattgacgagatcaaaggcgaaaagttgaaagaaacgctgcgccaacaccgggagatggcgctgttaagcaaaaagctcgccgccattcgccgcgacgccccggtcgagctctcgcttgatgacatcgtctatcaaggggaagaccgggagaaagtggtcgctttatttaaagagcttgggtttcaatcgtttttagagaaaatggaatcgccgtcatcagaagaggaaaaaccgcttgccaagatggcatttacgcttgctgaccgcgtgacggaggagatgcttgccgacaaggcggcgcttgtcgttgaagtggtcgaggaaaattatcatgatgcgccgatcgtcggcatcgctgtggtcaacgaacatggacggtttttcctgcgcccggagacggcgcttgccgatccgcagtttgtcgcctggcttggtgatgaaacgaagaaaaaaagcatgtttgactcaaagcgcgcggcagtcgccttgaaatggaaaggaattgagctatgcggcgtttcctttgatttattgctggccgcctatttgcttgatccggcgcaaggtgttgatgatgtggctgccgcagcaaaaatgaagcaatacgaagcggtgcgctcggatgaagcggtgtatggcaaaggggcgaagcgggccgtgccggatgagccagtgctcgccgagcatctcgtccgcaaggcggcggcgatttgggcgctcgaacgtccgtttttggatgagctgcgccgcaacgaacaagatcggttgctcgtcgagctcgagcagccgttgtcttcgattttggcggaaatggaatttgccggagtgaaagtggatacgaagcggctcgaacagatgggcgaagagctcgccgagcagctgcgcacggtcgagcagcgcatttatgagctcgccggccaagaattcaacatcaattcaccgaaacagctcggcgtcattttatttgaaaaactgcagctgcccgtcttgaaaaaaacgaaaaccggctactccacttcggcggatgtgcttgaaaaacttgcgccttatcacgagatcgtggaaaacattttgcattaccgccagcttggcaagttgcagtcgacgtatattgaaggattgctgaaagtcgtgcgacccgatacaaagaaggtgcatacgattttcaatcaggcgttgacgcaaaccggacggctcagctcgacggagccgaacttgcaaaacattccgattcggcttgaggaaggacggaaaatccgccaagcgttcgtgccgtcggagtctgattggctcattttcgctgccgactactcgcaaattgagttgcgcgtcctcgcccatattgcggaagatgacaatttaatggaagcgttccgccgcgatttggatatccatacgaaaacagcgatggacattttccaagtgagcgaggacgaagtgacgcccaacatgcgccgtcaggcgaaggcggtcaactttgggatcgtttacgggatcagtgattacggcttggcgcaaaacttaaatatttcacgcaaagaggccgctgaattcatcgagcgctacttcgaaagcttccctggcgtgaagcggtatatggaaaacattgtgcaagaagcaaaacagaaagggtatgtgacgacgctgctgcatcggcgccgctatttgccggatatcacgagccgcaacttcaaccaacgcagctttgctgaacggatggcgatgaacacgccgattcaagggagcgccgctgacattattaaaaaggcgatgatcgatctgaacgctagactgaaggaagagcggctgcaagcgcgccttttgctacaggtgcatgacgagctcattttggaggcgccgaaagaagagatggagcggctgtgccggctcgttccggaagtgatggagcaagcggtcacacttcgcgtgccgctcaaagtcgattaccattatggctcgacgtggtatgacgcgaaataaaaaggatcc

SEQ ID NO: 2504 - DNA, 2712 bp, Artificial Sequence
  Description of Artificial Sequence: Synthetic DNA sequence of Bacillus caldolyticus EA1 DNA polymerase V807H
atgaaatacctgctgccgaccgctgctgctggtctgctgctcctcgctgcccagccggcgatggccatgggattgaaaaaaaagcttgttttaatcgacggcagcagcgtggcgtaccgcgcctttttcgccttgccgcttttgcataacgacaaaggcatccatacgaacgccgtctacgggtttacgatgatgttgaataaaattttggcggaagaagagccaactcatatgcttgtcgcgtttgacgccgggaaaacgacgttccggcatgaagcgtttcaagagtataaaggtgggcgccagcagacgccaccggagctgtcggagcagtttccgctgttgcgcgagctgctgagggcgtatcgcatccccgcctatgaactcgagaactacgaagcggacgatattatcggaacgcttgccgcccgcgctgagcaggaagggtttgaggtgaaagtcatttccggcgaccgcgatctgacccagctcgcctccccccatgtgacggtggacattacgaaaaaagggattaccgatatcgaaccgtacacgccggaggcggtccgcgaaaaatacggcttaactccggaacaaatcgttgatttgaaaggattgatgggcgacaaatcggacaacattcccggagtgccgggcatcggggaaaagacggcggtcaagctgctcaagcaattcggcacggtcgaaaacgtgcttgcctccattgacgagatcaaaggcgaaaagttgaaagaaacgctgcgccaacaccgggagatggcgctgttaagcaaaaagctcgccgccattcgccgcgacgccccggtcgagctctcgcttgatgacatcgtctatcaaggggaagaccgggagaaagtggtcgctttatttaaagagcttgggtttcaatcgtttttagagaaaatggaatcgccgtcatcagaagaggaaaaaccgcttgccaagatggcatttacgcttgctgaccgcgtgacggaggagatgcttgccgacaaggcggcgcttgtcgttgaagtggtcgaggaaaattatcatgatgcgccgatcgtcggcatcgctgtggtcaacgaacatggacggtttttcctgcgcccggagacggcgcttgccgatccgcagtttgtcgcctggcttggtgatgaaacgaagaaaaaaagcatgtttgactcaaagcgcgcggcagtcgccttgaaatggaaaggaattgagctatgcggcgtttcctttgatttattgctggccgcctatttgcttgatccggcgcaaggtgttgatgatgtggctgccgcagcaaaaatgaagcaatacgaagcggtgcgctcggatgaagcggtgtatggcaaaggggcgaagcgggccgtgccggatgagccagtgctcgccgagcatctcgtccgcaaggcggcggcgatttgggcgctcgaacgtccgtttttggatgagctgcgccgcaacgaacaagatcggttgctcgtcgagctcgagcagccgttgtcttcgattttggcggaaatggaatttgccggagtgaaagtggatacgaagcggctcgaacagatgggcgaagagctcgccgagcagctgcgcacggtcgagcagcgcatttatgagctcgccggccaagaattcaacatcaattcaccgaaacagctcggcgtcattttatttgaaaaactgcagctgcccgtcttgaaaaaaacgaaaaccggctactccacttcggcggatgtgcttgaaaaacttgcgccttatcacgagatcgtggaaaacattttgcattaccgccagcttggcaagttgcagtcgacgtatattgaaggattgctgaaagtcgtgcgacccgatacaaagaaggtgcatacgattttcaatcaggcgttgacgcaaaccggacggctcagctcgacggagccgaacttgcaaaacattccgattcggcttgaggaaggacggaaaatccgccaagcgttcgtgccgtcggagtctgattggctcattttcgctgccgactactcgcaaattgagttgcgcgtcctcgcccatattgcggaagatgacaatttaatggaagcgttccgccgcgatttggatatccatacgaaaacagcgatggacattttccaagtgagcgaggacgaagtgacgcccaacatgcgccgtcaggcgaaggcggtcaactttgggatcgtttacgggatcagtgattacggcttggcgcaaaacttaaatatttcacgcaaagaggccgctgaattcatcgagcgctacttcgaaagcttccctggcgtgaagcggtatatggaaaacattgtgcaagaagcaaaacagaaagggtatgtgacgacgctgctgcatcggcgccgctatttgccggatatcacgagccgcaacttcaaccatcgcagctttgctgaacggatggcgatgaacacgccgattcaagggagcgccgctgacattattaaaaaggcgatgatcgatctgaacgctagactgaaggaagagcggctgcaagcgcgccttttgctacaggtgcatgacgagctcattttggaggcgccgaaagaagagatggagcggctgtgccggctcgttccggaagtgatggagcaagcggtcacacttcgcgtgccgctcaaagtcgattaccattatggctcgacgtggtatgacgcgaaataaaaaggatcc

SEQ ID NO: 2505 - DNA, 2712 bp, Artificial Sequence
  Description of Artificial Sequence: Synthetic DNA sequence of Bacillus caldolyticus EA1 DNA polymerase V807I
atgaaatacctgctgccgaccgctgctgctggtctgctgctcctcgctgcccagccggcgatggccatgggattgaaaaaaaagcttgttttaatcgacggcagcagcgtggcgtaccgcgcctttttcgccttgccgcttttgcataacgacaaaggcatccatacgaacgccgtctacgggtttacgatgatgttgaataaaattttggcggaagaagagccaactcatatgcttgtcgcgtttgacgccgggaaaacgacgttccggcatgaagcgtttcaagagtataaaggtgggcgccagcagacgccaccggagctgtcggagcagtttccgctgttgcgcgagctgctgagggcgtatcgcatccccgcctatgaactcgagaactacgaagcggacgatattatcggaacgcttgccgcccgcgctgagcaggaagggtttgaggtgaaagtcatttccggcgaccgcgatctgacccagctcgcctccccccatgtgacggtggacattacgaaaaaagggattaccgatatcgaaccgtacacgccggaggcggtccgcgaaaaatacggcttaactccggaacaaatcgttgatttgaaaggattgatgggcgacaaatcggacaacattcccggagtgccgggcatcggggaaaagacggcggtcaagctgctcaagcaattcggcacggtcgaaaacgtgcttgcctccattgacgagatcaaaggcgaaaagttgaaagaaacgctgcgccaacaccgggagatggcgctgttaagcaaaaagctcgccgccattcgccgcgacgccccggtcgagctctcgcttgatgacatcgtctatcaaggggaagaccgggagaaagtggtcgctttatttaaagagcttgggtttcaatcgtttttagagaaaatggaatcgccgtcatcagaagaggaaaaaccgcttgccaagatggcatttacgcttgctgaccgcgtgacggaggagatgcttgccgacaaggcggcgcttgtcgttgaagtggtcgaggaaaattatcatgatgcgccgatcgtcggcatcgctgtggtcaacgaacatggacggtttttcctgcgcccggagacggcgcttgccgatccgcagtttgtcgcctggcttggtgatgaaacgaagaaaaaaagcatgtttgactcaaagcgcgcggcagtcgccttgaaatggaaaggaattgagctatgcggcgtttcctttgatttattgctggccgcctatttgcttgatccggcgcaaggtgttgatgatgtggctgccgcagcaaaaatgaagcaatacgaagcggtgcgctcggatgaagcggtgtatggcaaaggggcgaagcgggccgtgccggatgagccagtgctcgccgagcatctcgtccgcaaggcggcggcgatttgggcgctcgaacgtccgtttttggatgagctgcgccgcaacgaacaagatcggttgctcgtcgagctcgagcagccgttgtcttcgattttggcggaaatggaatttgccggagtgaaagtggatacgaagcggctcgaacagatgggcgaagagctcgccgagcagctgcgcacggtcgagcagcgcatttatgagctcgccggccaagaattcaacatcaattcaccgaaacagctcggcgtcattttatttgaaaaactgcagctgcccgtcttgaaaaaaacgaaaaccggctactccacttcggcggatgtgcttgaaaaacttgcgccttatcacgagatcgtggaaaacattttgcattaccgccagcttggcaagttgcagtcgacgtatattgaaggattgctgaaagtcgtgcgacccgatacaaagaaggtgcatacgattttcaatcaggcgttgacgcaaaccggacggctcagctcgacggagccgaacttgcaaaacattccgattcggcttgaggaaggacggaaaatccgccaagcgttcgtgccgtcggagtctgattggctcattttcgctgccgactactcgcaaattgagttgcgcgtcctcgcccatattgcggaagatgacaatttaatggaagcgttccgccgcgatttggatatccatacgaaaacagcgatggacattttccaagtgagcgaggacgaagtgacgcccaacatgcgccgtcaggcgaaggcggtcaactttgggatcgtttacgggatcagtgattacggcttggcgcaaaacttaaatatttcacgcaaagaggccgctgaattcatcgagcgctacttcgaaagcttccctggcgtgaagcggtatatggaaaacattgtgcaagaagcaaaacagaaagggtatgtgacgacgctgctgcatcggcgccgctatttgccggatatcacgagccgcaacttcaacattcgcagctttgctgaacggatggcgatgaacacgccgattcaagggagcgccgctgacattattaaaaaggcgatgatcgatctgaacgctagactgaaggaagagcggctgcaagcgcgccttttgctacaggtgcatgacgagctcattttggaggcgccgaaagaagagatggagcggctgtgccggctcgttccggaagtgatggagcaagcggtcacacttcgcgtgccgctcaaagtcgattaccattatggctcgacgtggtatgacgcgaaataaaaaggatcc

SEQ ID NO: 2506 - DNA, 2712 bp, Artificial Sequence
  Description of Artificial Sequence: Synthetic DNA sequence of Bacillus caldolyticus EA1 DNA polymerase V807L
atgaaatacctgctgccgaccgctgctgctggtctgctgctcctcgctgcccagccggcgatggccatgggattgaaaaaaaagcttgttttaatcgacggcagcagcgtggcgtaccgcgcctttttcgccttgccgcttttgcataacgacaaaggcatccatacgaacgccgtctacgggtttacgatgatgttgaataaaattttggcggaagaagagccaactcatatgcttgtcgcgtttgacgccgggaaaacgacgttccggcatgaagcgtttcaagagtataaaggtgggcgccagcagacgccaccggagctgtcggagcagtttccgctgttgcgcgagctgctgagggcgtatcgcatccccgcctatgaactcgagaactacgaagcggacgatattatcggaacgcttgccgcccgcgctgagcaggaagggtttgaggtgaaagtcatttccggcgaccgcgatctgacccagctcgcctccccccatgtgacggtggacattacgaaaaaagggattaccgatatcgaaccgtacacgccggaggcggtccgcgaaaaatacggcttaactccggaacaaatcgttgatttgaaaggattgatgggcgacaaatcggacaacattcccggagtgccgggcatcggggaaaagacggcggtcaagctgctcaagcaattcggcacggtcgaaaacgtgcttgcctccattgacgagatcaaaggcgaaaagttgaaagaaacgctgcgccaacaccgggagatggcgctgttaagcaaaaagctcgccgccattcgccgcgacgccccggtcgagctctcgcttgatgacatcgtctatcaaggggaagaccgggagaaagtggtcgctttatttaaagagcttgggtttcaatcgtttttagagaaaatggaatcgccgtcatcagaagaggaaaaaccgcttgccaagatggcatttacgcttgctgaccgcgtgacggaggagatgcttgccgacaaggcggcgcttgtcgttgaagtggtcgaggaaaattatcatgatgcgccgatcgtcggcatcgctgtggtcaacgaacatggacggtttttcctgcgcccggagacggcgcttgccgatccgcagtttgtcgcctggcttggtgatgaaacgaagaaaaaaagcatgtttgactcaaagcgcgcggcagtcgccttgaaatggaaaggaattgagctatgcggcgtttcctttgatttattgctggccgcctatttgcttgatccggcgcaaggtgttgatgatgtggctgccgcagcaaaaatgaagcaatacgaagcggtgcgctcggatgaagcggtgtatggcaaaggggcgaagcgggccgtgccggatgagccagtgctcgccgagcatctcgtccgcaaggcggcggcgatttgggcgctcgaacgtccgtttttggatgagctgcgccgcaacgaacaagatcggttgctcgtcgagctcgagcagccgttgtcttcgattttggcggaaatggaatttgccggagtgaaagtggatacgaagcggctcgaacagatgggcgaagagctcgccgagcagctgcgcacggtcgagcagcgcatttatgagctcgccggccaagaattcaacatcaattcaccgaaacagctcggcgtcattttatttgaaaaactgcagctgcccgtcttgaaaaaaacgaaaaccggctactccacttcggcggatgtgcttgaaaaacttgcgccttatcacgagatcgtggaaaacattttgcattaccgccagcttggcaagttgcagtcgacgtatattgaaggattgctgaaagtcgtgcgacccgatacaaagaaggtgcatacgattttcaatcaggcgttgacgcaaaccggacggctcagctcgacggagccgaacttgcaaaacattccgattcggcttgaggaaggacggaaaatccgccaagcgttcgtgccgtcggagtctgattggctcattttcgctgccgactactcgcaaattgagttgcgcgtcctcgcccatattgcggaagatgacaatttaatggaagcgttccgccgcgatttggatatccatacgaaaacagcgatggacattttccaagtgagcgaggacgaagtgacgcccaacatgcgccgtcaggcgaaggcggtcaactttgggatcgtttacgggatcagtgattacggcttggcgcaaaacttaaatatttcacgcaaagaggccgctgaattcatcgagcgctacttcgaaagcttccctggcgtgaagcggtatatggaaaacattgtgcaagaagcaaaacagaaagggtatgtgacgacgctgctgcatcggcgccgctatttgccggatatcacgagccgcaacttcaacttacgcagctttgctgaacggatggcgatgaacacgccgattcaagggagcgccgctgacattattaaaaaggcgatgatcgatctgaacgctagactgaaggaagagcggctgcaagcgcgccttttgctacaggtgcatgacgagctcattttggaggcgccgaaagaagagatggagcggctgtgccggctcgttccggaagtgatggagcaagcggtcacacttcgcgtgccgctcaaagtcgattaccattatggctcgacgtggtatgacgcgaaataaaaaggatcc

SEQ ID NO: 2507 - DNA, 2712 bp, Artificial Sequence
  Description of Artificial Sequence: Synthetic DNA sequence of Bacillus caldolyticus EA1 DNA polymerase V807K
atgaaatacctgctgccgaccgctgctgctggtctgctgctcctcgctgcccagccggcgatggccatgggattgaaaaaaaagcttgttttaatcgacggcagcagcgtggcgtaccgcgcctttttcgccttgccgcttttgcataacgacaaaggcatccatacgaacgccgtctacgggtttacgatgatgttgaataaaattttggcggaagaagagccaactcatatgcttgtcgcgtttgacgccgggaaaacgacgttccggcatgaagcgtttcaagagtataaaggtgggcgccagcagacgccaccggagctgtcggagcagtttccgctgttgcgcgagctgctgagggcgtatcgcatccccgcctatgaactcgagaactacgaagcggacgatattatcggaacgcttgccgcccgcgctgagcaggaagggtttgaggtgaaagtcatttccggcgaccgcgatctgacccagctcgcctccccccatgtgacggtggacattacgaaaaaagggattaccgatatcgaaccgtacacgccggaggcggtccgcgaaaaatacggcttaactccggaacaaatcgttgatttgaaaggattgatgggcgacaaatcggacaacattcccggagtgccgggcatcggggaaaagacggcggtcaagctgctcaagcaattcggcacggtcgaaaacgtgcttgcctccattgacgagatcaaaggcgaaaagttgaaagaaacgctgcgccaacaccgggagatggcgctgttaagcaaaaagctcgccgccattcgccgcgacgccccggtcgagctctcgcttgatgacatcgtctatcaaggggaagaccgggagaaagtggtcgctttatttaaagagcttgggtttcaatcgtttttagagaaaatggaatcgccgtcatcagaagaggaaaaaccgcttgccaagatggcatttacgcttgctgaccgcgtgacggaggagatgcttgccgacaaggcggcgcttgtcgttgaagtggtcgaggaaaattatcatgatgcgccgatcgtcggcatcgctgtggtcaacgaacatggacggtttttcctgcgcccggagacggcgcttgccgatccgcagtttgtcgcctggcttggtgatgaaacgaagaaaaaaagcatgtttgactcaaagcgcgcggcagtcgccttgaaatggaaaggaattgagctatgcggcgtttcctttgatttattgctggccgcctatttgcttgatccggcgcaaggtgttgatgatgtggctgccgcagcaaaaatgaagcaatacgaagcggtgcgctcggatgaagcggtgtatggcaaaggggcgaagcgggccgtgccggatgagccagtgctcgccgagcatctcgtccgcaaggcggcggcgatttgggcgctcgaacgtccgtttttggatgagctgcgccgcaacgaacaagatcggttgctcgtcgagctcgagcagccgttgtcttcgattttggcggaaatggaatttgccggagtgaaagtggatacgaagcggctcgaacagatgggcgaagagctcgccgagcagctgcgcacggtcgagcagcgcatttatgagctcgccggccaagaattcaacatcaattcaccgaaacagctcggcgtcattttatttgaaaaactgcagctgcccgtcttgaaaaaaacgaaaaccggctactccacttcggcggatgtgcttgaaaaacttgcgccttatcacgagatcgtggaaaacattttgcattaccgccagcttggcaagttgcagtcgacgtatattgaaggattgctgaaagtcgtgcgacccgatacaaagaaggtgcatacgattttcaatcaggcgttgacgcaaaccggacggctcagctcgacggagccgaacttgcaaaacattccgattcggcttgaggaaggacggaaaatccgccaagcgttcgtgccgtcggagtctgattggctcattttcgctgccgactactcgcaaattgagttgcgcgtcctcgcccatattgcggaagatgacaatttaatggaagcgttccgccgcgatttggatatccatacgaaaacagcgatggacattttccaagtgagcgaggacgaagtgacgcccaacatgcgccgtcaggcgaaggcggtcaactttgggatcgtttacgggatcagtgattacggcttggcgcaaaacttaaatatttcacgcaaagaggccgctgaattcatcgagcgctacttcgaaagcttccctggcgtgaagcggtatatggaaaacattgtgcaagaagcaaaacagaaagggtatgtgacgacgctgctgcatcggcgccgctatttgccggatatcacgagccgcaacttcaacaaacgcagctttgctgaacggatggcgatgaacacgccgattcaagggagcgccgctgacattattaaaaaggcgatgatcgatctgaacgctagactgaaggaagagcggctgcaagcgcgccttttgctacaggtgcatgacgagctcattttggaggcgccgaaagaagagatggagcggctgtgccggctcgttccggaagtgatggagcaagcggtcacacttcgcgtgccgctcaaagtcgattaccattatggctcgacgtggtatgacgcgaaataaaaaggatcc

SEQ ID NO: 2508 - DNA, 2712 bp, Artificial Sequence
  Description of Artificial Sequence: Synthetic DNA sequence of Bacillus caldolyticus EA1 DNA polymerase V807E
atgaaatacctgctgccgaccgctgctgctggtctgctgctcctcgctgcccagccggcgatggccatgggattgaaaaaaaagcttgttttaatcgacggcagcagcgtggcgtaccgcgcctttttcgccttgccgcttttgcataacgacaaaggcatccatacgaacgccgtctacgggtttacgatgatgttgaataaaattttggcggaagaagagccaactcatatgcttgtcgcgtttgacgccgggaaaacgacgttccggcatgaagcgtttcaagagtataaaggtgggcgccagcagacgccaccggagctgtcggagcagtttccgctgttgcgcgagctgctgagggcgtatcgcatccccgcctatgaactcgagaactacgaagcggacgatattatcggaacgcttgccgcccgcgctgagcaggaagggtttgaggtgaaagtcatttccggcgaccgcgatctgacccagctcgcctccccccatgtgacggtggacattacgaaaaaagggattaccgatatcgaaccgtacacgccggaggcggtccgcgaaaaatacggcttaactccggaacaaatcgttgatttgaaaggattgatgggcgacaaatcggacaacattcccggagtgccgggcatcggggaaaagacggcggtcaagctgctcaagcaattcggcacggtcgaaaacgtgcttgcctccattgacgagatcaaaggcgaaaagttgaaagaaacgctgcgccaacaccgggagatggcgctgttaagcaaaaagctcgccgccattcgccgcgacgccccggtcgagctctcgcttgatgacatcgtctatcaaggggaagaccgggagaaagtggtcgctttatttaaagagcttgggtttcaatcgtttttagagaaaatggaatcgccgtcatcagaagaggaaaaaccgcttgccaagatggcatttacgcttgctgaccgcgtgacggaggagatgcttgccgacaaggcggcgcttgtcgttgaagtggtcgaggaaaattatcatgatgcgccgatcgtcggcatcgctgtggtcaacgaacatggacggtttttcctgcgcccggagacggcgcttgccgatccgcagtttgtcgcctggcttggtgatgaaacgaagaaaaaaagcatgtttgactcaaagcgcgcggcagtcgccttgaaatggaaaggaattgagctatgcggcgtttcctttgatttattgctggccgcctatttgcttgatccggcgcaaggtgttgatgatgtggctgccgcagcaaaaatgaagcaatacgaagcggtgcgctcggatgaagcggtgtatggcaaaggggcgaagcgggccgtgccggatgagccagtgctcgccgagcatctcgtccgcaaggcggcggcgatttgggcgctcgaacgtccgtttttggatgagctgcgccgcaacgaacaagatcggttgctcgtcgagctcgagcagccgttgtcttcgattttggcggaaatggaatttgccggagtgaaagtggatacgaagcggctcgaacagatgggcgaagagctcgccgagcagctgcgcacggtcgagcagcgcatttatgagctcgccggccaagaattcaacatcaattcaccgaaacagctcggcgtcattttatttgaaaaactgcagctgcccgtcttgaaaaaaacgaaaaccggctactccacttcggcggatgtgcttgaaaaacttgcgccttatcacgagatcgtggaaaacattttgcattaccgccagcttggcaagttgcagtcgacgtatattgaaggattgctgaaagtcgtgcgacccgatacaaagaaggtgcatacgattttcaatcaggcgttgacgcaaaccggacggctcagctcgacggagccgaacttgcaaaacattccgattcggcttgaggaaggacggaaaatccgccaagcgttcgtgccgtcggagtctgattggctcattttcgctgccgactactcgcaaattgagttgcgcgtcctcgcccatattgcggaagatgacaatttaatggaagcgttccgccgcgatttggatatccatacgaaaacagcgatggacattttccaagtgagcgaggacgaagtgacgcccaacatgcgccgtcaggcgaaggcggtcaactttgggatcgtttacgggatcagtgattacggcttggcgcaaaacttaaatatttcacgcaaagaggccgctgaattcatcgagcgctacttcgaaagcttccctggcgtgaagcggtatatggaaaacattgtgcaagaagcaaaacagaaagggtatgtgacgacgctgctgcatcggcgccgctatttgccggatatcacgagccgcaacttcaacgaacgcagctttgctgaacggatggcgatgaacacgccgattcaagggagcgccgctgacattattaaaaaggcgatgatcgatctgaacgctagactgaaggaagagcggctgcaagcgcgccttttgctacaggtgcatgacgagctcattttggaggcgccgaaagaagagatggagcggctgtgccggctcgttccggaagtgatggagcaagcggtcacacttcgcgtgccgctcaaagtcgattaccattatggctcgacgtggtatgacgcgaaataaaaaggatcc

SEQ ID NO: 2509 - DNA, 2712 bp, Artificial Sequence
  Description of Artificial Sequence: Synthetic DNA sequence of Bacillus caldolyticus EA1 DNA polymerase V807D
atgaaatacctgctgccgaccgctgctgctggtctgctgctcctcgctgcccagccggcgatggccatgggattgaaaaaaaagcttgttttaatcgacggcagcagcgtggcgtaccgcgcctttttcgccttgccgcttttgcataacgacaaaggcatccatacgaacgccgtctacgggtttacgatgatgttgaataaaattttggcggaagaagagccaactcatatgcttgtcgcgtttgacgccgggaaaacgacgttccggcatgaagcgtttcaagagtataaaggtgggcgccagcagacgccaccggagctgtcggagcagtttccgctgttgcgcgagctgctgagggcgtatcgcatccccgcctatgaactcgagaactacgaagcggacgatattatcggaacgcttgccgcccgcgctgagcaggaagggtttgaggtgaaagtcatttccggcgaccgcgatctgacccagctcgcctccccccatgtgacggtggacattacgaaaaaagggattaccgatatcgaaccgtacacgccggaggcggtccgcgaaaaatacggcttaactccggaacaaatcgttgatttgaaaggattgatgggcgacaaatcggacaacattcccggagtgccgggcatcggggaaaagacggcggtcaagctgctcaagcaattcggcacggtcgaaaacgtgcttgcctccattgacgagatcaaaggcgaaaagttgaaagaaacgctgcgccaacaccgggagatggcgctgttaagcaaaaagctcgccgccattcgccgcgacgccccggtcgagctctcgcttgatgacatcgtctatcaaggggaagaccgggagaaagtggtcgctttatttaaagagcttgggtttcaatcgtttttagagaaaatggaatcgccgtcatcagaagaggaaaaaccgcttgccaagatggcatttacgcttgctgaccgcgtgacggaggagatgcttgccgacaaggcggcgcttgtcgttgaagtggtcgaggaaaattatcatgatgcgccgatcgtcggcatcgctgtggtcaacgaacatggacggtttttcctgcgcccggagacggcgcttgccgatccgcagtttgtcgcctggcttggtgatgaaacgaagaaaaaaagcatgtttgactcaaagcgcgcggcagtcgccttgaaatggaaaggaattgagctatgcggcgtttcctttgatttattgctggccgcctatttgcttgatccggcgcaaggtgttgatgatgtggctgccgcagcaaaaatgaagcaatacgaagcggtgcgctcggatgaagcggtgtatggcaaaggggcgaagcgggccgtgccggatgagccagtgctcgccgagcatctcgtccgcaaggcggcggcgatttgggcgctcgaacgtccgtttttggatgagctgcgccgcaacgaacaagatcggttgctcgtcgagctcgagcagccgttgtcttcgattttggcggaaatggaatttgccggagtgaaagtggatacgaagcggctcgaacagatgggcgaagagctcgccgagcagctgcgcacggtcgagcagcgcatttatgagctcgccggccaagaattcaacatcaattcaccgaaacagctcggcgtcattttatttgaaaaactgcagctgcccgtcttgaaaaaaacgaaaaccggctactccacttcggcggatgtgcttgaaaaacttgcgccttatcacgagatcgtggaaaacattttgcattaccgccagcttggcaagttgcagtcgacgtatattgaaggattgctgaaagtcgtgcgacccgatacaaagaaggtgcatacgattttcaatcaggcgttgacgcaaaccggacggctcagctcgacggagccgaacttgcaaaacattccgattcggcttgaggaaggacggaaaatccgccaagcgttcgtgccgtcggagtctgattggctcattttcgctgccgactactcgcaaattgagttgcgcgtcctcgcccatattgcggaagatgacaatttaatggaagcgttccgccgcgatttggatatccatacgaaaacagcgatggacattttccaagtgagcgaggacgaagtgacgcccaacatgcgccgtcaggcgaaggcggtcaactttgggatcgtttacgggatcagtgattacggcttggcgcaaaacttaaatatttcacgcaaagaggccgctgaattcatcgagcgctacttcgaaagcttccctggcgtgaagcggtatatggaaaacattgtgcaagaagcaaaacagaaagggtatgtgacgacgctgctgcatcggcgccgctatttgccggatatcacgagccgcaacttcaacgatcgcagctttgctgaacggatggcgatgaacacgccgattcaagggagcgccgctgacattattaaaaaggcgatgatcgatctgaacgctagactgaaggaagagcggctgcaagcgcgccttttgctacaggtgcatgacgagctcattttggaggcgccgaaagaagagatggagcggctgtgccggctcgttccggaagtgatggagcaagcggtcacacttcgcgtgccgctcaaagtcgattaccattatggctcgacgtggtatgacgcgaaataaaaaggatcc

SEQ ID NO: 2510 - DNA, 2712 bp, Artificial Sequence
  Description of Artificial Sequence: Synthetic DNA sequence of Bacillus caldolyticus EA1 DNA polymerase V807F
atgaaatacctgctgccgaccgctgctgctggtctgctgctcctcgctgcccagccggcgatggccatgggattgaaaaaaaagcttgttttaatcgacggcagcagcgtggcgtaccgcgcctttttcgccttgccgcttttgcataacgacaaaggcatccatacgaacgccgtctacgggtttacgatgatgttgaataaaattttggcggaagaagagccaactcatatgcttgtcgcgtttgacgccgggaaaacgacgttccggcatgaagcgtttcaagagtataaaggtgggcgccagcagacgccaccggagctgtcggagcagtttccgctgttgcgcgagctgctgagggcgtatcgcatccccgcctatgaactcgagaactacgaagcggacgatattatcggaacgcttgccgcccgcgctgagcaggaagggtttgaggtgaaagtcatttccggcgaccgcgatctgacccagctcgcctccccccatgtgacggtggacattacgaaaaaagggattaccgatatcgaaccgtacacgccggaggcggtccgcgaaaaatacggcttaactccggaacaaatcgttgatttgaaaggattgatgggcgacaaatcggacaacattcccggagtgccgggcatcggggaaaagacggcggtcaagctgctcaagcaattcggcacggtcgaaaacgtgcttgcctccattgacgagatcaaaggcgaaaagttgaaagaaacgctgcgccaacaccgggagatggcgctgttaagcaaaaagctcgccgccattcgccgcgacgccccggtcgagctctcgcttgatgacatcgtctatcaaggggaagaccgggagaaagtggtcgctttatttaaagagcttgggtttcaatcgtttttagagaaaatggaatcgccgtcatcagaagaggaaaaaccgcttgccaagatggcatttacgcttgctgaccgcgtgacggaggagatgcttgccgacaaggcggcgcttgtcgttgaagtggtcgaggaaaattatcatgatgcgccgatcgtcggcatcgctgtggtcaacgaacatggacggtttttcctgcgcccggagacggcgcttgccgatccgcagtttgtcgcctggcttggtgatgaaacgaagaaaaaaagcatgtttgactcaaagcgcgcggcagtcgccttgaaatggaaaggaattgagctatgcggcgtttcctttgatttattgctggccgcctatttgcttgatccggcgcaaggtgttgatgatgtggctgccgcagcaaaaatgaagcaatacgaagcggtgcgctcggatgaagcggtgtatggcaaaggggcgaagcgggccgtgccggatgagccagtgctcgccgagcatctcgtccgcaaggcggcggcgatttgggcgctcgaacgtccgtttttggatgagctgcgccgcaacgaacaagatcggttgctcgtcgagctcgagcagccgttgtcttcgattttggcggaaatggaatttgccggagtgaaagtggatacgaagcggctcgaacagatgggcgaagagctcgccgagcagctgcgcacggtcgagcagcgcatttatgagctcgccggccaagaattcaacatcaattcaccgaaacagctcggcgtcattttatttgaaaaactgcagctgcccgtcttgaaaaaaacgaaaaccggctactccacttcggcggatgtgcttgaaaaacttgcgccttatcacgagatcgtggaaaacattttgcattaccgccagcttggcaagttgcagtcgacgtatattgaaggattgctgaaagtcgtgcgacccgatacaaagaaggtgcatacgattttcaatcaggcgttgacgcaaaccggacggctcagctcgacggagccgaacttgcaaaacattccgattcggcttgaggaaggacggaaaatccgccaagcgttcgtgccgtcggagtctgattggctcattttcgctgccgactactcgcaaattgagttgcgcgtcctcgcccatattgcggaagatgacaatttaatggaagcgttccgccgcgatttggatatccatacgaaaacagcgatggacattttccaagtgagcgaggacgaagtgacgcccaacatgcgccgtcaggcgaaggcggtcaactttgggatcgtttacgggatcagtgattacggcttggcgcaaaacttaaatatttcacgcaaagaggccgctgaattcatcgagcgctacttcgaaagcttccctggcgtgaagcggtatatggaaaacattgtgcaagaagcaaaacagaaagggtatgtgacgacgctgctgcatcggcgccgctatttgccggatatcacgagccgcaacttcaactttcgcagctttgctgaacggatggcgatgaacacgccgattcaagggagcgccgctgacattattaaaaaggcgatgatcgatctgaacgctagactgaaggaagagcggctgcaagcgcgccttttgctacaggtgcatgacgagctcattttggaggcgccgaaagaagagatggagcggctgtgccggctcgttccggaagtgatggagcaagcggtcacacttcgcgtgccgctcaaagtcgattaccattatggctcgacgtggtatgacgcgaaataaaaaggatcc

SEQ ID NO: 2511 - DNA, 2712 bp, Artificial Sequence
  Description of Artificial Sequence: Synthetic DNA sequence of Bacillus caldolyticus EA1 DNA polymerase V807S
atgaaatacctgctgccgaccgctgctgctggtctgctgctcctcgctgcccagccggcgatggccatgggattgaaaaaaaagcttgttttaatcgacggcagcagcgtggcgtaccgcgcctttttcgccttgccgcttttgcataacgacaaaggcatccatacgaacgccgtctacgggtttacgatgatgttgaataaaattttggcggaagaagagccaactcatatgcttgtcgcgtttgacgccgggaaaacgacgttccggcatgaagcgtttcaagagtataaaggtgggcgccagcagacgccaccggagctgtcggagcagtttccgctgttgcgcgagctgctgagggcgtatcgcatccccgcctatgaactcgagaactacgaagcggacgatattatcggaacgcttgccgcccgcgctgagcaggaagggtttgaggtgaaagtcatttccggcgaccgcgatctgacccagctcgcctccccccatgtgacggtggacattacgaaaaaagggattaccgatatcgaaccgtacacgccggaggcggtccgcgaaaaatacggcttaactccggaacaaatcgttgatttgaaaggattgatgggcgacaaatcggacaacattcccggagtgccgggcatcggggaaaagacggcggtcaagctgctcaagcaattcggcacggtcgaaaacgtgcttgcctccattgacgagatcaaaggcgaaaagttgaaagaaacgctgcgccaacaccgggagatggcgctgttaagcaaaaagctcgccgccattcgccgcgacgccccggtcgagctctcgcttgatgacatcgtctatcaaggggaagaccgggagaaagtggtcgctttatttaaagagcttgggtttcaatcgtttttagagaaaatggaatcgccgtcatcagaagaggaaaaaccgcttgccaagatggcatttacgcttgctgaccgcgtgacggaggagatgcttgccgacaaggcggcgcttgtcgttgaagtggtcgaggaaaattatcatgatgcgccgatcgtcggcatcgctgtggtcaacgaacatggacggtttttcctgcgcccggagacggcgcttgccgatccgcagtttgtcgcctggcttggtgatgaaacgaagaaaaaaagcatgtttgactcaaagcgcgcggcagtcgccttgaaatggaaaggaattgagctatgcggcgtttcctttgatttattgctggccgcctatttgcttgatccggcgcaaggtgttgatgatgtggctgccgcagcaaaaatgaagcaatacgaagcggtgcgctcggatgaagcggtgtatggcaaaggggcgaagcgggccgtgccggatgagccagtgctcgccgagcatctcgtccgcaaggcggcggcgatttgggcgctcgaacgtccgtttttggatgagctgcgccgcaacgaacaagatcggttgctcgtcgagctcgagcagccgttgtcttcgattttggcggaaatggaatttgccggagtgaaagtggatacgaagcggctcgaacagatgggcgaagagctcgccgagcagctgcgcacggtcgagcagcgcatttatgagctcgccggccaagaattcaacatcaattcaccgaaacagctcggcgtcattttatttgaaaaactgcagctgcccgtcttgaaaaaaacgaaaaccggctactccacttcggcggatgtgcttgaaaaacttgcgccttatcacgagatcgtggaaaacattttgcattaccgccagcttggcaagttgcagtcgacgtatattgaaggattgctgaaagtcgtgcgacccgatacaaagaaggtgcatacgattttcaatcaggcgttgacgcaaaccggacggctcagctcgacggagccgaacttgcaaaacattccgattcggcttgaggaaggacggaaaatccgccaagcgttcgtgccgtcggagtctgattggctcattttcgctgccgactactcgcaaattgagttgcgcgtcctcgcccatattgcggaagatgacaatttaatggaagcgttccgccgcgatttggatatccatacgaaaacagcgatggacattttccaagtgagcgaggacgaagtgacgcccaacatgcgccgtcaggcgaaggcggtcaactttgggatcgtttacgggatcagtgattacggcttggcgcaaaacttaaatatttcacgcaaagaggccgctgaattcatcgagcgctacttcgaaagcttccctggcgtgaagcggtatatggaaaacattgtgcaagaagcaaaacagaaagggtatgtgacgacgctgctgcatcggcgccgctatttgccggatatcacgagccgcaacttcaactctcgcagctttgctgaacggatggcgatgaacacgccgattcaagggagcgccgctgacattattaaaaaggcgatgatcgatctgaacgctagactgaaggaagagcggctgcaagcgcgccttttgctacaggtgcatgacgagctcattttggaggcgccgaaagaagagatggagcggctgtgccggctcgttccggaagtgatggagcaagcggtcacacttcgcgtgccgctcaaagtcgattaccattatggctcgacgtggtatgacgcgaaataaaaaggatcc

SEQ ID NO: 2512 - DNA, 2712 bp, Artificial Sequence
  Description of Artificial Sequence: Synthetic DNA sequence of Bacillus caldolyticus EA1 DNA polymerase V807Y
atgaaatacctgctgccgaccgctgctgctggtctgctgctcctcgctgcccagccggcgatggccatgggattgaaaaaaaagcttgttttaatcgacggcagcagcgtggcgtaccgcgcctttttcgccttgccgcttttgcataacgacaaaggcatccatacgaacgccgtctacgggtttacgatgatgttgaataaaattttggcggaagaagagccaactcatatgcttgtcgcgtttgacgccgggaaaacgacgttccggcatgaagcgtttcaagagtataaaggtgggcgccagcagacgccaccggagctgtcggagcagtttccgctgttgcgcgagctgctgagggcgtatcgcatccccgcctatgaactcgagaactacgaagcggacgatattatcggaacgcttgccgcccgcgctgagcaggaagggtttgaggtgaaagtcatttccggcgaccgcgatctgacccagctcgcctccccccatgtgacggtggacattacgaaaaaagggattaccgatatcgaaccgtacacgccggaggcggtccgcgaaaaatacggcttaactccggaacaaatcgttgatttgaaaggattgatgggcgacaaatcggacaacattcccggagtgccgggcatcggggaaaagacggcggtcaagctgctcaagcaattcggcacggtcgaaaacgtgcttgcctccattgacgagatcaaaggcgaaaagttgaaagaaacgctgcgccaacaccgggagatggcgctgttaagcaaaaagctcgccgccattcgccgcgacgccccggtcgagctctcgcttgatgacatcgtctatcaaggggaagaccgggagaaagtggtcgctttatttaaagagcttgggtttcaatcgtttttagagaaaatggaatcgccgtcatcagaagaggaaaaaccgcttgccaagatggcatttacgcttgctgaccgcgtgacggaggagatgcttgccgacaaggcggcgcttgtcgttgaagtggtcgaggaaaattatcatgatgcgccgatcgtcggcatcgctgtggtcaacgaacatggacggtttttcctgcgcccggagacggcgcttgccgatccgcagtttgtcgcctggcttggtgatgaaacgaagaaaaaaagcatgtttgactcaaagcgcgcggcagtcgccttgaaatggaaaggaattgagctatgcggcgtttcctttgatttattgctggccgcctatttgcttgatccggcgcaaggtgttgatgatgtggctgccgcagcaaaaatgaagcaatacgaagcggtgcgctcggatgaagcggtgtatggcaaaggggcgaagcgggccgtgccggatgagccagtgctcgccgagcatctcgtccgcaaggcggcggcgatttgggcgctcgaacgtccgtttttggatgagctgcgccgcaacgaacaagatcggttgctcgtcgagctcgagcagccgttgtcttcgattttggcggaaatggaatttgccggagtgaaagtggatacgaagcggctcgaacagatgggcgaagagctcgccgagcagctgcgcacggtcgagcagcgcatttatgagctcgccggccaagaattcaacatcaattcaccgaaacagctcggcgtcattttatttgaaaaactgcagctgcccgtcttgaaaaaaacgaaaaccggctactccacttcggcggatgtgcttgaaaaacttgcgccttatcacgagatcgtggaaaacattttgcattaccgccagcttggcaagttgcagtcgacgtatattgaaggattgctgaaagtcgtgcgacccgatacaaagaaggtgcatacgattttcaatcaggcgttgacgcaaaccggacggctcagctcgacggagccgaacttgcaaaacattccgattcggcttgaggaaggacggaaaatccgccaagcgttcgtgccgtcggagtctgattggctcattttcgctgccgactactcgcaaattgagttgcgcgtcctcgcccatattgcggaagatgacaatttaatggaagcgttccgccgcgatttggatatccatacgaaaacagcgatggacattttccaagtgagcgaggacgaagtgacgcccaacatgcgccgtcaggcgaaggcggtcaactttgggatcgtttacgggatcagtgattacggcttggcgcaaaacttaaatatttcacgcaaagaggccgctgaattcatcgagcgctacttcgaaagcttccctggcgtgaagcggtatatggaaaacattgtgcaagaagcaaaacagaaagggtatgtgacgacgctgctgcatcggcgccgctatttgccggatatcacgagccgcaacttcaactatcgcagctttgctgaacggatggcgatgaacacgccgattcaagggagcgccgctgacattattaaaaaggcgatgatcgatctgaacgctagactgaaggaagagcggctgcaagcgcgccttttgctacaggtgcatgacgagctcattttggaggcgccgaaagaagagatggagcggctgtgccggctcgttccggaagtgatggagcaagcggtcacacttcgcgtgccgctcaaagtcgattaccattatggctcgacgtggtatgacgcgaaataaaaaggatcc

SEQ ID NO: 2513 - DNA, 2712 bp, Artificial Sequence
  Description of Artificial Sequence: Synthetic DNA sequence of Bacillus caldolyticus EA1 DNA polymerase V807W
atgaaatacctgctgccgaccgctgctgctggtctgctgctcctcgctgcccagccggcgatggccatgggattgaaaaaaaagcttgttttaatcgacggcagcagcgtggcgtaccgcgcctttttcgccttgccgcttttgcataacgacaaaggcatccatacgaacgccgtctacgggtttacgatgatgttgaataaaattttggcggaagaagagccaactcatatgcttgtcgcgtttgacgccgggaaaacgacgttccggcatgaagcgtttcaagagtataaaggtgggcgccagcagacgccaccggagctgtcggagcagtttccgctgttgcgcgagctgctgagggcgtatcgcatccccgcctatgaactcgagaactacgaagcggacgatattatcggaacgcttgccgcccgcgctgagcaggaagggtttgaggtgaaagtcatttccggcgaccgcgatctgacccagctcgcctccccccatgtgacggtggacattacgaaaaaagggattaccgatatcgaaccgtacacgccggaggcggtccgcgaaaaatacggcttaactccggaacaaatcgttgatttgaaaggattgatgggcgacaaatcggacaacattcccggagtgccgggcatcggggaaaagacggcggtcaagctgctcaagcaattcggcacggtcgaaaacgtgcttgcctccattgacgagatcaaaggcgaaaagttgaaagaaacgctgcgccaacaccgggagatggcgctgttaagcaaaaagctcgccgccattcgccgcgacgccccggtcgagctctcgcttgatgacatcgtctatcaaggggaagaccgggagaaagtggtcgctttatttaaagagcttgggtttcaatcgtttttagagaaaatggaatcgccgtcatcagaagaggaaaaaccgcttgccaagatggcatttacgcttgctgaccgcgtgacggaggagatgcttgccgacaaggcggcgcttgtcgttgaagtggtcgaggaaaattatcatgatgcgccgatcgtcggcatcgctgtggtcaacgaacatggacggtttttcctgcgcccggagacggcgcttgccgatccgcagtttgtcgcctggcttggtgatgaaacgaagaaaaaaagcatgtttgactcaaagcgcgcggcagtcgccttgaaatggaaaggaattgagctatgcggcgtttcctttgatttattgctggccgcctatttgcttgatccggcgcaaggtgttgatgatgtggctgccgcagcaaaaatgaagcaatacgaagcggtgcgctcggatgaagcggtgtatggcaaaggggcgaagcgggccgtgccggatgagccagtgctcgccgagcatctcgtccgcaaggcggcggcgatttgggcgctcgaacgtccgtttttggatgagctgcgccgcaacgaacaagatcggttgctcgtcgagctcgagcagccgttgtcttcgattttggcggaaatggaatttgccggagtgaaagtggatacgaagcggctcgaacagatgggcgaagagctcgccgagcagctgcgcacggtcgagcagcgcatttatgagctcgccggccaagaattcaacatcaattcaccgaaacagctcggcgtcattttatttgaaaaactgcagctgcccgtcttgaaaaaaacgaaaaccggctactccacttcggcggatgtgcttgaaaaacttgcgccttatcacgagatcgtggaaaacattttgcattaccgccagcttggcaagttgcagtcgacgtatattgaaggattgctgaaagtcgtgcgacccgatacaaagaaggtgcatacgattttcaatcaggcgttgacgcaaaccggacggctcagctcgacggagccgaacttgcaaaacattccgattcggcttgaggaaggacggaaaatccgccaagcgttcgtgccgtcggagtctgattggctcattttcgctgccgactactcgcaaattgagttgcgcgtcctcgcccatattgcggaagatgacaatttaatggaagcgttccgccgcgatttggatatccatacgaaaacagcgatggacattttccaagtgagcgaggacgaagtgacgcccaacatgcgccgtcaggcgaaggcggtcaactttgggatcgtttacgggatcagtgattacggcttggcgcaaaacttaaatatttcacgcaaagaggccgctgaattcatcgagcgctacttcgaaagcttccctggcgtgaagcggtatatggaaaacattgtgcaagaagcaaaacagaaagggtatgtgacgacgctgctgcatcggcgccgctatttgccggatatcacgagccgcaacttcaactggcgcagctttgctgaacggatggcgatgaacacgccgattcaagggagcgccgctgacattattaaaaaggcgatgatcgatctgaacgctagactgaaggaagagcggctgcaagcgcgccttttgctacaggtgcatgacgagctcattttggaggcgccgaaagaagagatggagcggctgtgccggctcgttccggaagtgatggagcaagcggtcacacttcgcgtgccgctcaaagtcgattaccattatggctcgacgtggtatgacgcgaaataaaaaggatcc

SEQ ID NO: 2514 - DNA, 2712 bp, Artificial Sequence
  Description of Artificial Sequence: Synthetic DNA sequence of Bacillus caldolyticus EA1 DNA polymerase V807P
atgaaatacctgctgccgaccgctgctgctggtctgctgctcctcgctgcccagccggcgatggccatgggattgaaaaaaaagcttgttttaatcgacggcagcagcgtggcgtaccgcgcctttttcgccttgccgcttttgcataacgacaaaggcatccatacgaacgccgtctacgggtttacgatgatgttgaataaaattttggcggaagaagagccaactcatatgcttgtcgcgtttgacgccgggaaaacgacgttccggcatgaagcgtttcaagagtataaaggtgggcgccagcagacgccaccggagctgtcggagcagtttccgctgttgcgcgagctgctgagggcgtatcgcatccccgcctatgaactcgagaactacgaagcggacgatattatcggaacgcttgccgcccgcgctgagcaggaagggtttgaggtgaaagtcatttccggcgaccgcgatctgacccagctcgcctccccccatgtgacggtggacattacgaaaaaagggattaccgatatcgaaccgtacacgccggaggcggtccgcgaaaaatacggcttaactccggaacaaatcgttgatttgaaaggattgatgggcgacaaatcggacaacattcccggagtgccgggcatcggggaaaagacggcggtcaagctgctcaagcaattcggcacggtcgaaaacgtgcttgcctccattgacgagatcaaaggcgaaaagttgaaagaaacgctgcgccaacaccgggagatggcgctgttaagcaaaaagctcgccgccattcgccgcgacgccccggtcgagctctcgcttgatgacatcgtctatcaaggggaagaccgggagaaagtggtcgctttatttaaagagcttgggtttcaatcgtttttagagaaaatggaatcgccgtcatcagaagaggaaaaaccgcttgccaagatggcatttacgcttgctgaccgcgtgacggaggagatgcttgccgacaaggcggcgcttgtcgttgaagtggtcgaggaaaattatcatgatgcgccgatcgtcggcatcgctgtggtcaacgaacatggacggtttttcctgcgcccggagacggcgcttgccgatccgcagtttgtcgcctggcttggtgatgaaacgaagaaaaaaagcatgtttgactcaaagcgcgcggcagtcgccttgaaatggaaaggaattgagctatgcggcgtttcctttgatttattgctggccgcctatttgcttgatccggcgcaaggtgttgatgatgtggctgccgcagcaaaaatgaagcaatacgaagcggtgcgctcggatgaagcggtgtatggcaaaggggcgaagcgggccgtgccggatgagccagtgctcgccgagcatctcgtccgcaaggcggcggcgatttgggcgctcgaacgtccgtttttggatgagctgcgccgcaacgaacaagatcggttgctcgtcgagctcgagcagccgttgtcttcgattttggcggaaatggaatttgccggagtgaaagtggatacgaagcggctcgaacagatgggcgaagagctcgccgagcagctgcgcacggtcgagcagcgcatttatgagctcgccggccaagaattcaacatcaattcaccgaaacagctcggcgtcattttatttgaaaaactgcagctgcccgtcttgaaaaaaacgaaaaccggctactccacttcggcggatgtgcttgaaaaacttgcgccttatcacgagatcgtggaaaacattttgcattaccgccagcttggcaagttgcagtcgacgtatattgaaggattgctgaaagtcgtgcgacccgatacaaagaaggtgcatacgattttcaatcaggcgttgacgcaaaccggacggctcagctcgacggagccgaacttgcaaaacattccgattcggcttgaggaaggacggaaaatccgccaagcgttcgtgccgtcggagtctgattggctcattttcgctgccgactactcgcaaattgagttgcgcgtcctcgcccatattgcggaagatgacaatttaatggaagcgttccgccgcgatttggatatccatacgaaaacagcgatggacattttccaagtgagcgaggacgaagtgacgcccaacatgcgccgtcaggcgaaggcggtcaactttgggatcgtttacgggatcagtgattacggcttggcgcaaaacttaaatatttcacgcaaagaggccgctgaattcatcgagcgctacttcgaaagcttccctggcgtgaagcggtatatggaaaacattgtgcaagaagcaaaacagaaagggtatgtgacgacgctgctgcatcggcgccgctatttgccggatatcacgagccgcaacttcaaccctcgcagctttgctgaacggatggcgatgaacacgccgattcaagggagcgccgctgacattattaaaaaggcgatgatcgatctgaacgctagactgaaggaagagcggctgcaagcgcgccttttgctacaggtgcatgacgagctcattttggaggcgccgaaagaagagatggagcggctgtgccggctcgttccggaagtgatggagcaagcggtcacacttcgcgtgccgctcaaagtcgattaccattatggctcgacgtggtatgacgcgaaataaaaaggatcc

SEQ ID NO: 2515 - DNA, 2712 bp, Artificial Sequence
  Description of Artificial Sequence: Synthetic DNA sequence of Bacillus caldolyticus EA1 DNA polymerase V807M
atgaaatacctgctgccgaccgctgctgctggtctgctgctcctcgctgcccagccggcgatggccatgggattgaaaaaaaagcttgttttaatcgacggcagcagcgtggcgtaccgcgcctttttcgccttgccgcttttgcataacgacaaaggcatccatacgaacgccgtctacgggtttacgatgatgttgaataaaattttggcggaagaagagccaactcatatgcttgtcgcgtttgacgccgggaaaacgacgttccggcatgaagcgtttcaagagtataaaggtgggcgccagcagacgccaccggagctgtcggagcagtttccgctgttgcgcgagctgctgagggcgtatcgcatccccgcctatgaactcgagaactacgaagcggacgatattatcggaacgcttgccgcccgcgctgagcaggaagggtttgaggtgaaagtcatttccggcgaccgcgatctgacccagctcgcctccccccatgtgacggtggacattacgaaaaaagggattaccgatatcgaaccgtacacgccggaggcggtccgcgaaaaatacggcttaactccggaacaaatcgttgatttgaaaggattgatgggcgacaaatcggacaacattcccggagtgccgggcatcggggaaaagacggcggtcaagctgctcaagcaattcggcacggtcgaaaacgtgcttgcctccattgacgagatcaaaggcgaaaagttgaaagaaacgctgcgccaacaccgggagatggcgctgttaagcaaaaagctcgccgccattcgccgcgacgccccggtcgagctctcgcttgatgacatcgtctatcaaggggaagaccgggagaaagtggtcgctttatttaaagagcttgggtttcaatcgtttttagagaaaatggaatcgccgtcatcagaagaggaaaaaccgcttgccaagatggcatttacgcttgctgaccgcgtgacggaggagatgcttgccgacaaggcggcgcttgtcgttgaagtggtcgaggaaaattatcatgatgcgccgatcgtcggcatcgctgtggtcaacgaacatggacggtttttcctgcgcccggagacggcgcttgccgatccgcagtttgtcgcctggcttggtgatgaaacgaagaaaaaaagcatgtttgactcaaagcgcgcggcagtcgccttgaaatggaaaggaattgagctatgcggcgtttcctttgatttattgctggccgcctatttgcttgatccggcgcaaggtgttgatgatgtggctgccgcagcaaaaatgaagcaatacgaagcggtgcgctcggatgaagcggtgtatggcaaaggggcgaagcgggccgtgccggatgagccagtgctcgccgagcatctcgtccgcaaggcggcggcgatttgggcgctcgaacgtccgtttttggatgagctgcgccgcaacgaacaagatcggttgctcgtcgagctcgagcagccgttgtcttcgattttggcggaaatggaatttgccggagtgaaagtggatacgaagcggctcgaacagatgggcgaagagctcgccgagcagctgcgcacggtcgagcagcgcatttatgagctcgccggccaagaattcaacatcaattcaccgaaacagctcggcgtcattttatttgaaaaactgcagctgcccgtcttgaaaaaaacgaaaaccggctactccacttcggcggatgtgcttgaaaaacttgcgccttatcacgagatcgtggaaaacattttgcattaccgccagcttggcaagttgcagtcgacgtatattgaaggattgctgaaagtcgtgcgacccgatacaaagaaggtgcatacgattttcaatcaggcgttgacgcaaaccggacggctcagctcgacggagccgaacttgcaaaacattccgattcggcttgaggaaggacggaaaatccgccaagcgttcgtgccgtcggagtctgattggctcattttcgctgccgactactcgcaaattgagttgcgcgtcctcgcccatattgcggaagatgacaatttaatggaagcgttccgccgcgatttggatatccatacgaaaacagcgatggacattttccaagtgagcgaggacgaagtgacgcccaacatgcgccgtcaggcgaaggcggtcaactttgggatcgtttacgggatcagtgattacggcttggcgcaaaacttaaatatttcacgcaaagaggccgctgaattcatcgagcgctacttcgaaagcttccctggcgtgaagcggtatatggaaaacattgtgcaagaagcaaaacagaaagggtatgtgacgacgctgctgcatcggcgccgctatttgccggatatcacgagccgcaacttcaacatgcgcagctttgctgaacggatggcgatgaacacgccgattcaagggagcgccgctgacattattaaaaaggcgatgatcgatctgaacgctagactgaaggaagagcggctgcaagcgcgccttttgctacaggtgcatgacgagctcattttggaggcgccgaaagaagagatggagcggctgtgccggctcgttccggaagtgatggagcaagcggtcacacttcgcgtgccgctcaaagtcgattaccattatggctcgacgtggtatgacgcgaaataaaaaggatcc

SEQ ID NO: 2516 - DNA, 2712 bp, Artificial Sequence
  Description of Artificial Sequence: Synthetic DNA sequence of Bacillus caldolyticus EA1 DNA polymerase V807T
atgaaatacctgctgccgaccgctgctgctggtctgctgctcctcgctgcccagccggcgatggccatgggattgaaaaaaaagcttgttttaatcgacggcagcagcgtggcgtaccgcgcctttttcgccttgccgcttttgcataacgacaaaggcatccatacgaacgccgtctacgggtttacgatgatgttgaataaaattttggcggaagaagagccaactcatatgcttgtcgcgtttgacgccgggaaaacgacgttccggcatgaagcgtttcaagagtataaaggtgggcgccagcagacgccaccggagctgtcggagcagtttccgctgttgcgcgagctgctgagggcgtatcgcatccccgcctatgaactcgagaactacgaagcggacgatattatcggaacgcttgccgcccgcgctgagcaggaagggtttgaggtgaaagtcatttccggcgaccgcgatctgacccagctcgcctccccccatgtgacggtggacattacgaaaaaagggattaccgatatcgaaccgtacacgccggaggcggtccgcgaaaaatacggcttaactccggaacaaatcgttgatttgaaaggattgatgggcgacaaatcggacaacattcccggagtgccgggcatcggggaaaagacggcggtcaagctgctcaagcaattcggcacggtcgaaaacgtgcttgcctccattgacgagatcaaaggcgaaaagttgaaagaaacgctgcgccaacaccgggagatggcgctgttaagcaaaaagctcgccgccattcgccgcgacgccccggtcgagctctcgcttgatgacatcgtctatcaaggggaagaccgggagaaagtggtcgctttatttaaagagcttgggtttcaatcgtttttagagaaaatggaatcgccgtcatcagaagaggaaaaaccgcttgccaagatggcatttacgcttgctgaccgcgtgacggaggagatgcttgccgacaaggcggcgcttgtcgttgaagtggtcgaggaaaattatcatgatgcgccgatcgtcggcatcgctgtggtcaacgaacatggacggtttttcctgcgcccggagacggcgcttgccgatccgcagtttgtcgcctggcttggtgatgaaacgaagaaaaaaagcatgtttgactcaaagcgcgcggcagtcgccttgaaatggaaaggaattgagctatgcggcgtttcctttgatttattgctggccgcctatttgcttgatccggcgcaaggtgttgatgatgtggctgccgcagcaaaaatgaagcaatacgaagcggtgcgctcggatgaagcggtgtatggcaaaggggcgaagcgggccgtgccggatgagccagtgctcgccgagcatctcgtccgcaaggcggcggcgatttgggcgctcgaacgtccgtttttggatgagctgcgccgcaacgaacaagatcggttgctcgtcgagctcgagcagccgttgtcttcgattttggcggaaatggaatttgccggagtgaaagtggatacgaagcggctcgaacagatgggcgaagagctcgccgagcagctgcgcacggtcgagcagcgcatttatgagctcgccggccaagaattcaacatcaattcaccgaaacagctcggcgtcattttatttgaaaaactgcagctgcccgtcttgaaaaaaacgaaaaccggctactccacttcggcggatgtgcttgaaaaacttgcgccttatcacgagatcgtggaaaacattttgcattaccgccagcttggcaagttgcagtcgacgtatattgaaggattgctgaaagtcgtgcgacccgatacaaagaaggtgcatacgattttcaatcaggcgttgacgcaaaccggacggctcagctcgacggagccgaacttgcaaaacattccgattcggcttgaggaaggacggaaaatccgccaagcgttcgtgccgtcggagtctgattggctcattttcgctgccgactactcgcaaattgagttgcgcgtcctcgcccatattgcggaagatgacaatttaatggaagcgttccgccgcgatttggatatccatacgaaaacagcgatggacattttccaagtgagcgaggacgaagtgacgcccaacatgcgccgtcaggcgaaggcggtcaactttgggatcgtttacgggatcagtgattacggcttggcgcaaaacttaaatatttcacgcaaagaggccgctgaattcatcgagcgctacttcgaaagcttccctggcgtgaagcggtatatggaaaacattgtgcaagaagcaaaacagaaagggtatgtgacgacgctgctgcatcggcgccgctatttgccggatatcacgagccgcaacttcaacactcgcagctttgctgaacggatggcgatgaacacgccgattcaagggagcgccgctgacattattaaaaaggcgatgatcgatctgaacgctagactgaaggaagagcggctgcaagcgcgccttttgctacaggtgcatgacgagctcattttggaggcgccgaaagaagagatggagcggctgtgccggctcgttccggaagtgatggagcaagcggtcacacttcgcgtgccgctcaaagtcgattaccattatggctcgacgtggtatgacgcgaaataaaaaggatcc

SEQ ID NO: 2517 - DNA, 2712 bp, Artificial Sequence
  Description of Artificial Sequence: Synthetic DNA sequence of Bacillus caldolyticus EA1 DNA polymerase V807N
atgaaatacctgctgccgaccgctgctgctggtctgctgctcctcgctgcccagccggcgatggccatgggattgaaaaaaaagcttgttttaatcgacggcagcagcgtggcgtaccgcgcctttttcgccttgccgcttttgcataacgacaaaggcatccatacgaacgccgtctacgggtttacgatgatgttgaataaaattttggcggaagaagagccaactcatatgcttgtcgcgtttgacgccgggaaaacgacgttccggcatgaagcgtttcaagagtataaaggtgggcgccagcagacgccaccggagctgtcggagcagtttccgctgttgcgcgagctgctgagggcgtatcgcatccccgcctatgaactcgagaactacgaagcggacgatattatcggaacgcttgccgcccgcgctgagcaggaagggtttgaggtgaaagtcatttccggcgaccgcgatctgacccagctcgcctccccccatgtgacggtggacattacgaaaaaagggattaccgatatcgaaccgtacacgccggaggcggtccgcgaaaaatacggcttaactccggaacaaatcgttgatttgaaaggattgatgggcgacaaatcggacaacattcccggagtgccgggcatcggggaaaagacggcggtcaagctgctcaagcaattcggcacggtcgaaaacgtgcttgcctccattgacgagatcaaaggcgaaaagttgaaagaaacgctgcgccaacaccgggagatggcgctgttaagcaaaaagctcgccgccattcgccgcgacgccccggtcgagctctcgcttgatgacatcgtctatcaaggggaagaccgggagaaagtggtcgctttatttaaagagcttgggtttcaatcgtttttagagaaaatggaatcgccgtcatcagaagaggaaaaaccgcttgccaagatggcatttacgcttgctgaccgcgtgacggaggagatgcttgccgacaaggcggcgcttgtcgttgaagtggtcgaggaaaattatcatgatgcgccgatcgtcggcatcgctgtggtcaacgaacatggacggtttttcctgcgcccggagacggcgcttgccgatccgcagtttgtcgcctggcttggtgatgaaacgaagaaaaaaagcatgtttgactcaaagcgcgcggcagtcgccttgaaatggaaaggaattgagctatgcggcgtttcctttgatttattgctggccgcctatttgcttgatccggcgcaaggtgttgatgatgtggctgccgcagcaaaaatgaagcaatacgaagcggtgcgctcggatgaagcggtgtatggcaaaggggcgaagcgggccgtgccggatgagccagtgctcgccgagcatctcgtccgcaaggcggcggcgatttgggcgctcgaacgtccgtttttggatgagctgcgccgcaacgaacaagatcggttgctcgtcgagctcgagcagccgttgtcttcgattttggcggaaatggaatttgccggagtgaaagtggatacgaagcggctcgaacagatgggcgaagagctcgccgagcagctgcgcacggtcgagcagcgcatttatgagctcgccggccaagaattcaacatcaattcaccgaaacagctcggcgtcattttatttgaaaaactgcagctgcccgtcttgaaaaaaacgaaaaccggctactccacttcggcggatgtgcttgaaaaacttgcgccttatcacgagatcgtggaaaacattttgcattaccgccagcttggcaagttgcagtcgacgtatattgaaggattgctgaaagtcgtgcgacccgatacaaagaaggtgcatacgattttcaatcaggcgttgacgcaaaccggacggctcagctcgacggagccgaacttgcaaaacattccgattcggcttgaggaaggacggaaaatccgccaagcgttcgtgccgtcggagtctgattggctcattttcgctgccgactactcgcaaattgagttgcgcgtcctcgcccatattgcggaagatgacaatttaatggaagcgttccgccgcgatttggatatccatacgaaaacagcgatggacattttccaagtgagcgaggacgaagtgacgcccaacatgcgccgtcaggcgaaggcggtcaactttgggatcgtttacgggatcagtgattacggcttggcgcaaaacttaaatatttcacgcaaagaggccgctgaattcatcgagcgctacttcgaaagcttccctggcgtgaagcggtatatggaaaacattgtgcaagaagcaaaacagaaagggtatgtgacgacgctgctgcatcggcgccgctatttgccggatatcacgagccgcaacttcaacaatcgcagctttgctgaacggatggcgatgaacacgccgattcaagggagcgccgctgacattattaaaaaggcgatgatcgatctgaacgctagactgaaggaagagcggctgcaagcgcgccttttgctacaggtgcatgacgagctcattttggaggcgccgaaagaagagatggagcggctgtgccggctcgttccggaagtgatggagcaagcggtcacacttcgcgtgccgctcaaagtcgattaccattatggctcgacgtggtatgacgcgaaataaaaaggatcc

SEQ ID NO: 2518 - DNA, 2712 bp, Artificial Sequence
  Description of Artificial Sequence: Synthetic DNA sequence of Bacillus caldolyticus EA1 DNA polymerase R808A
atgaaatacctgctgccgaccgctgctgctggtctgctgctcctcgctgcccagccggcgatggccatgggattgaaaaaaaagcttgttttaatcgacggcagcagcgtggcgtaccgcgcctttttcgccttgccgcttttgcataacgacaaaggcatccatacgaacgccgtctacgggtttacgatgatgttgaataaaattttggcggaagaagagccaactcatatgcttgtcgcgtttgacgccgggaaaacgacgttccggcatgaagcgtttcaagagtataaaggtgggcgccagcagacgccaccggagctgtcggagcagtttccgctgttgcgcgagctgctgagggcgtatcgcatccccgcctatgaactcgagaactacgaagcggacgatattatcggaacgcttgccgcccgcgctgagcaggaagggtttgaggtgaaagtcatttccggcgaccgcgatctgacccagctcgcctccccccatgtgacggtggacattacgaaaaaagggattaccgatatcgaaccgtacacgccggaggcggtccgcgaaaaatacggcttaactccggaacaaatcgttgatttgaaaggattgatgggcgacaaatcggacaacattcccggagtgccgggcatcggggaaaagacggcggtcaagctgctcaagcaattcggcacggtcgaaaacgtgcttgcctccattgacgagatcaaaggcgaaaagttgaaagaaacgctgcgccaacaccgggagatggcgctgttaagcaaaaagctcgccgccattcgccgcgacgccccggtcgagctctcgcttgatgacatcgtctatcaaggggaagaccgggagaaagtggtcgctttatttaaagagcttgggtttcaatcgtttttagagaaaatggaatcgccgtcatcagaagaggaaaaaccgcttgccaagatggcatttacgcttgctgaccgcgtgacggaggagatgcttgccgacaaggcggcgcttgtcgttgaagtggtcgaggaaaattatcatgatgcgccgatcgtcggcatcgctgtggtcaacgaacatggacggtttttcctgcgcccggagacggcgcttgccgatccgcagtttgtcgcctggcttggtgatgaaacgaagaaaaaaagcatgtttgactcaaagcgcgcggcagtcgccttgaaatggaaaggaattgagctatgcggcgtttcctttgatttattgctggccgcctatttgcttgatccggcgcaaggtgttgatgatgtggctgccgcagcaaaaatgaagcaatacgaagcggtgcgctcggatgaagcggtgtatggcaaaggggcgaagcgggccgtgccggatgagccagtgctcgccgagcatctcgtccgcaaggcggcggcgatttgggcgctcgaacgtccgtttttggatgagctgcgccgcaacgaacaagatcggttgctcgtcgagctcgagcagccgttgtcttcgattttggcggaaatggaatttgccggagtgaaagtggatacgaagcggctcgaacagatgggcgaagagctcgccgagcagctgcgcacggtcgagcagcgcatttatgagctcgccggccaagaattcaacatcaattcaccgaaacagctcggcgtcattttatttgaaaaactgcagctgcccgtcttgaaaaaaacgaaaaccggctactccacttcggcggatgtgcttgaaaaacttgcgccttatcacgagatcgtggaaaacattttgcattaccgccagcttggcaagttgcagtcgacgtatattgaaggattgctgaaagtcgtgcgacccgatacaaagaaggtgcatacgattttcaatcaggcgttgacgcaaaccggacggctcagctcgacggagccgaacttgcaaaacattccgattcggcttgaggaaggacggaaaatccgccaagcgttcgtgccgtcggagtctgattggctcattttcgctgccgactactcgcaaattgagttgcgcgtcctcgcccatattgcggaagatgacaatttaatggaagcgttccgccgcgatttggatatccatacgaaaacagcgatggacattttccaagtgagcgaggacgaagtgacgcccaacatgcgccgtcaggcgaaggcggtcaactttgggatcgtttacgggatcagtgattacggcttggcgcaaaacttaaatatttcacgcaaagaggccgctgaattcatcgagcgctacttcgaaagcttccctggcgtgaagcggtatatggaaaacattgtgcaagaagcaaaacagaaagggtatgtgacgacgctgctgcatcggcgccgctatttgccggatatcacgagccgcaacttcaacgtcgctagctttgctgaacggatggcgatgaacacgccgattcaagggagcgccgctgacattattaaaaaggcgatgatcgatctgaacgctagactgaaggaagagcggctgcaagcgcgccttttgctacaggtgcatgacgagctcattttggaggcgccgaaagaagagatggagcggctgtgccggctcgttccggaagtgatggagcaagcggtcacacttcgcgtgccgctcaaagtcgattaccattatggctcgacgtggtatgacgcgaaataaaaaggatcc

SEQ ID NO: 2519 - DNA, 2712 bp, Artificial Sequence
  Description of Artificial Sequence: Synthetic DNA sequence of Bacillus caldolyticus EA1 DNA polymerase R808C
atgaaatacctgctgccgaccgctgctgctggtctgctgctcctcgctgcccagccggcgatggccatgggattgaaaaaaaagcttgttttaatcgacggcagcagcgtggcgtaccgcgcctttttcgccttgccgcttttgcataacgacaaaggcatccatacgaacgccgtctacgggtttacgatgatgttgaataaaattttggcggaagaagagccaactcatatgcttgtcgcgtttgacgccgggaaaacgacgttccggcatgaagcgtttcaagagtataaaggtgggcgccagcagacgccaccggagctgtcggagcagtttccgctgttgcgcgagctgctgagggcgtatcgcatccccgcctatgaactcgagaactacgaagcggacgatattatcggaacgcttgccgcccgcgctgagcaggaagggtttgaggtgaaagtcatttccggcgaccgcgatctgacccagctcgcctccccccatgtgacggtggacattacgaaaaaagggattaccgatatcgaaccgtacacgccggaggcggtccgcgaaaaatacggcttaactccggaacaaatcgttgatttgaaaggattgatgggcgacaaatcggacaacattcccggagtgccgggcatcggggaaaagacggcggtcaagctgctcaagcaattcggcacggtcgaaaacgtgcttgcctccattgacgagatcaaaggcgaaaagttgaaagaaacgctgcgccaacaccgggagatggcgctgttaagcaaaaagctcgccgccattcgccgcgacgccccggtcgagctctcgcttgatgacatcgtctatcaaggggaagaccgggagaaagtggtcgctttatttaaagagcttgggtttcaatcgtttttagagaaaatggaatcgccgtcatcagaagaggaaaaaccgcttgccaagatggcatttacgcttgctgaccgcgtgacggaggagatgcttgccgacaaggcggcgcttgtcgttgaagtggtcgaggaaaattatcatgatgcgccgatcgtcggcatcgctgtggtcaacgaacatggacggtttttcctgcgcccggagacggcgcttgccgatccgcagtttgtcgcctggcttggtgatgaaacgaagaaaaaaagcatgtttgactcaaagcgcgcggcagtcgccttgaaatggaaaggaattgagctatgcggcgtttcctttgatttattgctggccgcctatttgcttgatccggcgcaaggtgttgatgatgtggctgccgcagcaaaaatgaagcaatacgaagcggtgcgctcggatgaagcggtgtatggcaaaggggcgaagcgggccgtgccggatgagccagtgctcgccgagcatctcgtccgcaaggcggcggcgatttgggcgctcgaacgtccgtttttggatgagctgcgccgcaacgaacaagatcggttgctcgtcgagctcgagcagccgttgtcttcgattttggcggaaatggaatttgccggagtgaaagtggatacgaagcggctcgaacagatgggcgaagagctcgccgagcagctgcgcacggtcgagcagcgcatttatgagctcgccggccaagaattcaacatcaattcaccgaaacagctcggcgtcattttatttgaaaaactgcagctgcccgtcttgaaaaaaacgaaaaccggctactccacttcggcggatgtgcttgaaaaacttgcgccttatcacgagatcgtggaaaacattttgcattaccgccagcttggcaagttgcagtcgacgtatattgaaggattgctgaaagtcgtgcgacccgatacaaagaaggtgcatacgattttcaatcaggcgttgacgcaaaccggacggctcagctcgacggagccgaacttgcaaaacattccgattcggcttgaggaaggacggaaaatccgccaagcgttcgtgccgtcggagtctgattggctcattttcgctgccgactactcgcaaattgagttgcgcgtcctcgcccatattgcggaagatgacaatttaatggaagcgttccgccgcgatttggatatccatacgaaaacagcgatggacattttccaagtgagcgaggacgaagtgacgcccaacatgcgccgtcaggcgaaggcggtcaactttgggatcgtttacgggatcagtgattacggcttggcgcaaaacttaaatatttcacgcaaagaggccgctgaattcatcgagcgctacttcgaaagcttccctggcgtgaagcggtatatggaaaacattgtgcaagaagcaaaacagaaagggtatgtgacgacgctgctgcatcggcgccgctatttgccggatatcacgagccgcaacttcaacgtctgtagctttgctgaacggatggcgatgaacacgccgattcaagggagcgccgctgacattattaaaaaggcgatgatcgatctgaacgctagactgaaggaagagcggctgcaagcgcgccttttgctacaggtgcatgacgagctcattttggaggcgccgaaagaagagatggagcggctgtgccggctcgttccggaagtgatggagcaagcggtcacacttcgcgtgccgctcaaagtcgattaccattatggctcgacgtggtatgacgcgaaataaaaaggatcc

SEQ ID NO: 2520 - DNA, 2712 bp, Artificial Sequence
  Description of Artificial Sequence: Synthetic DNA sequence of Bacillus caldolyticus EA1 DNA polymerase R808G
atgaaatacctgctgccgaccgctgctgctggtctgctgctcctcgctgcccagccggcgatggccatgggattgaaaaaaaagcttgttttaatcgacggcagcagcgtggcgtaccgcgcctttttcgccttgccgcttttgcataacgacaaaggcatccatacgaacgccgtctacgggtttacgatgatgttgaataaaattttggcggaagaagagccaactcatatgcttgtcgcgtttgacgccgggaaaacgacgttccggcatgaagcgtttcaagagtataaaggtgggcgccagcagacgccaccggagctgtcggagcagtttccgctgttgcgcgagctgctgagggcgtatcgcatccccgcctatgaactcgagaactacgaagcggacgatattatcggaacgcttgccgcccgcgctgagcaggaagggtttgaggtgaaagtcatttccggcgaccgcgatctgacccagctcgcctccccccatgtgacggtggacattacgaaaaaagggattaccgatatcgaaccgtacacgccggaggcggtccgcgaaaaatacggcttaactccggaacaaatcgttgatttgaaaggattgatgggcgacaaatcggacaacattcccggagtgccgggcatcggggaaaagacggcggtcaagctgctcaagcaattcggcacggtcgaaaacgtgcttgcctccattgacgagatcaaaggcgaaaagttgaaagaaacgctgcgccaacaccgggagatggcgctgttaagcaaaaagctcgccgccattcgccgcgacgccccggtcgagctctcgcttgatgacatcgtctatcaaggggaagaccgggagaaagtggtcgctttatttaaagagcttgggtttcaatcgtttttagagaaaatggaatcgccgtcatcagaagaggaaaaaccgcttgccaagatggcatttacgcttgctgaccgcgtgacggaggagatgcttgccgacaaggcggcgcttgtcgttgaagtggtcgaggaaaattatcatgatgcgccgatcgtcggcatcgctgtggtcaacgaacatggacggtttttcctgcgcccggagacggcgcttgccgatccgcagtttgtcgcctggcttggtgatgaaacgaagaaaaaaagcatgtttgactcaaagcgcgcggcagtcgccttgaaatggaaaggaattgagctatgcggcgtttcctttgatttattgctggccgcctatttgcttgatccggcgcaaggtgttgatgatgtggctgccgcagcaaaaatgaagcaatacgaagcggtgcgctcggatgaagcggtgtatggcaaaggggcgaagcgggccgtgccggatgagccagtgctcgccgagcatctcgtccgcaaggcggcggcgatttgggcgctcgaacgtccgtttttggatgagctgcgccgcaacgaacaagatcggttgctcgtcgagctcgagcagccgttgtcttcgattttggcggaaatggaatttgccggagtgaaagtggatacgaagcggctcgaacagatgggcgaagagctcgccgagcagctgcgcacggtcgagcagcgcatttatgagctcgccggccaagaattcaacatcaattcaccgaaacagctcggcgtcattttatttgaaaaactgcagctgcccgtcttgaaaaaaacgaaaaccggctactccacttcggcggatgtgcttgaaaaacttgcgccttatcacgagatcgtggaaaacattttgcattaccgccagcttggcaagttgcagtcgacgtatattgaaggattgctgaaagtcgtgcgacccgatacaaagaaggtgcatacgattttcaatcaggcgttgacgcaaaccggacggctcagctcgacggagccgaacttgcaaaacattccgattcggcttgaggaaggacggaaaatccgccaagcgttcgtgccgtcggagtctgattggctcattttcgctgccgactactcgcaaattgagttgcgcgtcctcgcccatattgcggaagatgacaatttaatggaagcgttccgccgcgatttggatatccatacgaaaacagcgatggacattttccaagtgagcgaggacgaagtgacgcccaacatgcgccgtcaggcgaaggcggtcaactttgggatcgtttacgggatcagtgattacggcttggcgcaaaacttaaatatttcacgcaaagaggccgctgaattcatcgagcgctacttcgaaagcttccctggcgtgaagcggtatatggaaaacattgtgcaagaagcaaaacagaaagggtatgtgacgacgctgctgcatcggcgccgctatttgccggatatcacgagccgcaacttcaacgtcggtagctttgctgaacggatggcgatgaacacgccgattcaagggagcgccgctgacattattaaaaaggcgatgatcgatctgaacgctagactgaaggaagagcggctgcaagcgcgccttttgctacaggtgcatgacgagctcattttggaggcgccgaaagaagagatggagcggctgtgccggctcgttccggaagtgatggagcaagcggtcacacttcgcgtgccgctcaaagtcgattaccattatggctcgacgtggtatgacgcgaaataaaaaggatcc

SEQ ID NO: 2521 - DNA, 2712 bp, Artificial Sequence
  Description of Artificial Sequence: Synthetic DNA sequence of Bacillus caldolyticus EA1 DNA polymerase R808Q
atgaaatacctgctgccgaccgctgctgctggtctgctgctcctcgctgcccagccggcgatggccatgggattgaaaaaaaagcttgttttaatcgacggcagcagcgtggcgtaccgcgcctttttcgccttgccgcttttgcataacgacaaaggcatccatacgaacgccgtctacgggtttacgatgatgttgaataaaattttggcggaagaagagccaactcatatgcttgtcgcgtttgacgccgggaaaacgacgttccggcatgaagcgtttcaagagtataaaggtgggcgccagcagacgccaccggagctgtcggagcagtttccgctgttgcgcgagctgctgagggcgtatcgcatccccgcctatgaactcgagaactacgaagcggacgatattatcggaacgcttgccgcccgcgctgagcaggaagggtttgaggtgaaagtcatttccggcgaccgcgatctgacccagctcgcctccccccatgtgacggtggacattacgaaaaaagggattaccgatatcgaaccgtacacgccggaggcggtccgcgaaaaatacggcttaactccggaacaaatcgttgatttgaaaggattgatgggcgacaaatcggacaacattcccggagtgccgggcatcggggaaaagacggcggtcaagctgctcaagcaattcggcacggtcgaaaacgtgcttgcctccattgacgagatcaaaggcgaaaagttgaaagaaacgctgcgccaacaccgggagatggcgctgttaagcaaaaagctcgccgccattcgccgcgacgccccggtcgagctctcgcttgatgacatcgtctatcaaggggaagaccgggagaaagtggtcgctttatttaaagagcttgggtttcaatcgtttttagagaaaatggaatcgccgtcatcagaagaggaaaaaccgcttgccaagatggcatttacgcttgctgaccgcgtgacggaggagatgcttgccgacaaggcggcgcttgtcgttgaagtggtcgaggaaaattatcatgatgcgccgatcgtcggcatcgctgtggtcaacgaacatggacggtttttcctgcgcccggagacggcgcttgccgatccgcagtttgtcgcctggcttggtgatgaaacgaagaaaaaaagcatgtttgactcaaagcgcgcggcagtcgccttgaaatggaaaggaattgagctatgcggcgtttcctttgatttattgctggccgcctatttgcttgatccggcgcaaggtgttgatgatgtggctgccgcagcaaaaatgaagcaatacgaagcggtgcgctcggatgaagcggtgtatggcaaaggggcgaagcgggccgtgccggatgagccagtgctcgccgagcatctcgtccgcaaggcggcggcgatttgggcgctcgaacgtccgtttttggatgagctgcgccgcaacgaacaagatcggttgctcgtcgagctcgagcagccgttgtcttcgattttggcggaaatggaatttgccggagtgaaagtggatacgaagcggctcgaacagatgggcgaagagctcgccgagcagctgcgcacggtcgagcagcgcatttatgagctcgccggccaagaattcaacatcaattcaccgaaacagctcggcgtcattttatttgaaaaactgcagctgcccgtcttgaaaaaaacgaaaaccggctactccacttcggcggatgtgcttgaaaaacttgcgccttatcacgagatcgtggaaaacattttgcattaccgccagcttggcaagttgcagtcgacgtatattgaaggattgctgaaagtcgtgcgacccgatacaaagaaggtgcatacgattttcaatcaggcgttgacgcaaaccggacggctcagctcgacggagccgaacttgcaaaacattccgattcggcttgaggaaggacggaaaatccgccaagcgttcgtgccgtcggagtctgattggctcattttcgctgccgactactcgcaaattgagttgcgcgtcctcgcccatattgcggaagatgacaatttaatggaagcgttccgccgcgatttggatatccatacgaaaacagcgatggacattttccaagtgagcgaggacgaagtgacgcccaacatgcgccgtcaggcgaaggcggtcaactttgggatcgtttacgggatcagtgattacggcttggcgcaaaacttaaatatttcacgcaaagaggccgctgaattcatcgagcgctacttcgaaagcttccctggcgtgaagcggtatatggaaaacattgtgcaagaagcaaaacagaaagggtatgtgacgacgctgctgcatcggcgccgctatttgccggatatcacgagccgcaacttcaacgtccaaagctttgctgaacggatggcgatgaacacgccgattcaagggagcgccgctgacattattaaaaaggcgatgatcgatctgaacgctagactgaaggaagagcggctgcaagcgcgccttttgctacaggtgcatgacgagctcattttggaggcgccgaaagaagagatggagcggctgtgccggctcgttccggaagtgatggagcaagcggtcacacttcgcgtgccgctcaaagtcgattaccattatggctcgacgtggtatgacgcgaaataaaaaggatcc

SEQ ID NO: 2522 - DNA, 2712 bp, Artificial Sequence
  Description of Artificial Sequence: Synthetic DNA sequence of Bacillus caldolyticus EA1 DNA polymerase R808H
atgaaatacctgctgccgaccgctgctgctggtctgctgctcctcgctgcccagccggcgatggccatgggattgaaaaaaaagcttgttttaatcgacggcagcagcgtggcgtaccgcgcctttttcgccttgccgcttttgcataacgacaaaggcatccatacgaacgccgtctacgggtttacgatgatgttgaataaaattttggcggaagaagagccaactcatatgcttgtcgcgtttgacgccgggaaaacgacgttccggcatgaagcgtttcaagagtataaaggtgggcgccagcagacgccaccggagctgtcggagcagtttccgctgttgcgcgagctgctgagggcgtatcgcatccccgcctatgaactcgagaactacgaagcggacgatattatcggaacgcttgccgcccgcgctgagcaggaagggtttgaggtgaaagtcatttccggcgaccgcgatctgacccagctcgcctccccccatgtgacggtggacattacgaaaaaagggattaccgatatcgaaccgtacacgccggaggcggtccgcgaaaaatacggcttaactccggaacaaatcgttgatttgaaaggattgatgggcgacaaatcggacaacattcccggagtgccgggcatcggggaaaagacggcggtcaagctgctcaagcaattcggcacggtcgaaaacgtgcttgcctccattgacgagatcaaaggcgaaaagttgaaagaaacgctgcgccaacaccgggagatggcgctgttaagcaaaaagctcgccgccattcgccgcgacgccccggtcgagctctcgcttgatgacatcgtctatcaaggggaagaccgggagaaagtggtcgctttatttaaagagcttgggtttcaatcgtttttagagaaaatggaatcgccgtcatcagaagaggaaaaaccgcttgccaagatggcatttacgcttgctgaccgcgtgacggaggagatgcttgccgacaaggcggcgcttgtcgttgaagtggtcgaggaaaattatcatgatgcgccgatcgtcggcatcgctgtggtcaacgaacatggacggtttttcctgcgcccggagacggcgcttgccgatccgcagtttgtcgcctggcttggtgatgaaacgaagaaaaaaagcatgtttgactcaaagcgcgcggcagtcgccttgaaatggaaaggaattgagctatgcggcgtttcctttgatttattgctggccgcctatttgcttgatccggcgcaaggtgttgatgatgtggctgccgcagcaaaaatgaagcaatacgaagcggtgcgctcggatgaagcggtgtatggcaaaggggcgaagcgggccgtgccggatgagccagtgctcgccgagcatctcgtccgcaaggcggcggcgatttgggcgctcgaacgtccgtttttggatgagctgcgccgcaacgaacaagatcggttgctcgtcgagctcgagcagccgttgtcttcgattttggcggaaatggaatttgccggagtgaaagtggatacgaagcggctcgaacagatgggcgaagagctcgccgagcagctgcgcacggtcgagcagcgcatttatgagctcgccggccaagaattcaacatcaattcaccgaaacagctcggcgtcattttatttgaaaaactgcagctgcccgtcttgaaaaaaacgaaaaccggctactccacttcggcggatgtgcttgaaaaacttgcgccttatcacgagatcgtggaaaacattttgcattaccgccagcttggcaagttgcagtcgacgtatattgaaggattgctgaaagtcgtgcgacccgatacaaagaaggtgcatacgattttcaatcaggcgttgacgcaaaccggacggctcagctcgacggagccgaacttgcaaaacattccgattcggcttgaggaaggacggaaaatccgccaagcgttcgtgccgtcggagtctgattggctcattttcgctgccgactactcgcaaattgagttgcgcgtcctcgcccatattgcggaagatgacaatttaatggaagcgttccgccgcgatttggatatccatacgaaaacagcgatggacattttccaagtgagcgaggacgaagtgacgcccaacatgcgccgtcaggcgaaggcggtcaactttgggatcgtttacgggatcagtgattacggcttggcgcaaaacttaaatatttcacgcaaagaggccgctgaattcatcgagcgctacttcgaaagcttccctggcgtgaagcggtatatggaaaacattgtgcaagaagcaaaacagaaagggtatgtgacgacgctgctgcatcggcgccgctatttgccggatatcacgagccgcaacttcaacgtccatagctttgctgaacggatggcgatgaacacgccgattcaagggagcgccgctgacattattaaaaaggcgatgatcgatctgaacgctagactgaaggaagagcggctgcaagcgcgccttttgctacaggtgcatgacgagctcattttggaggcgccgaaagaagagatggagcggctgtgccggctcgttccggaagtgatggagcaagcggtcacacttcgcgtgccgctcaaagtcgattaccattatggctcgacgtggtatgacgcgaaataaaaaggatcc

SEQ ID NO: 2523 - DNA, 2712 bp, Artificial Sequence
  Description of Artificial Sequence: Synthetic DNA sequence of Bacillus caldolyticus EA1 DNA polymerase R808I
atgaaatacctgctgccgaccgctgctgctggtctgctgctcctcgctgcccagccggcgatggccatgggattgaaaaaaaagcttgttttaatcgacggcagcagcgtggcgtaccgcgcctttttcgccttgccgcttttgcataacgacaaaggcatccatacgaacgccgtctacgggtttacgatgatgttgaataaaattttggcggaagaagagccaactcatatgcttgtcgcgtttgacgccgggaaaacgacgttccggcatgaagcgtttcaagagtataaaggtgggcgccagcagacgccaccggagctgtcggagcagtttccgctgttgcgcgagctgctgagggcgtatcgcatccccgcctatgaactcgagaactacgaagcggacgatattatcggaacgcttgccgcccgcgctgagcaggaagggtttgaggtgaaagtcatttccggcgaccgcgatctgacccagctcgcctccccccatgtgacggtggacattacgaaaaaagggattaccgatatcgaaccgtacacgccggaggcggtccgcgaaaaatacggcttaactccggaacaaatcgttgatttgaaaggattgatgggcgacaaatcggacaacattcccggagtgccgggcatcggggaaaagacggcggtcaagctgctcaagcaattcggcacggtcgaaaacgtgcttgcctccattgacgagatcaaaggcgaaaagttgaaagaaacgctgcgccaacaccgggagatggcgctgttaagcaaaaagctcgccgccattcgccgcgacgccccggtcgagctctcgcttgatgacatcgtctatcaaggggaagaccgggagaaagtggtcgctttatttaaagagcttgggtttcaatcgtttttagagaaaatggaatcgccgtcatcagaagaggaaaaaccgcttgccaagatggcatttacgcttgctgaccgcgtgacggaggagatgcttgccgacaaggcggcgcttgtcgttgaagtggtcgaggaaaattatcatgatgcgccgatcgtcggcatcgctgtggtcaacgaacatggacggtttttcctgcgcccggagacggcgcttgccgatccgcagtttgtcgcctggcttggtgatgaaacgaagaaaaaaagcatgtttgactcaaagcgcgcggcagtcgccttgaaatggaaaggaattgagctatgcggcgtttcctttgatttattgctggccgcctatttgcttgatccggcgcaaggtgttgatgatgtggctgccgcagcaaaaatgaagcaatacgaagcggtgcgctcggatgaagcggtgtatggcaaaggggcgaagcgggccgtgccggatgagccagtgctcgccgagcatctcgtccgcaaggcggcggcgatttgggcgctcgaacgtccgtttttggatgagctgcgccgcaacgaacaagatcggttgctcgtcgagctcgagcagccgttgtcttcgattttggcggaaatggaatttgccggagtgaaagtggatacgaagcggctcgaacagatgggcgaagagctcgccgagcagctgcgcacggtcgagcagcgcatttatgagctcgccggccaagaattcaacatcaattcaccgaaacagctcggcgtcattttatttgaaaaactgcagctgcccgtcttgaaaaaaacgaaaaccggctactccacttcggcggatgtgcttgaaaaacttgcgccttatcacgagatcgtggaaaacattttgcattaccgccagcttggcaagttgcagtcgacgtatattgaaggattgctgaaagtcgtgcgacccgatacaaagaaggtgcatacgattttcaatcaggcgttgacgcaaaccggacggctcagctcgacggagccgaacttgcaaaacattccgattcggcttgaggaaggacggaaaatccgccaagcgttcgtgccgtcggagtctgattggctcattttcgctgccgactactcgcaaattgagttgcgcgtcctcgcccatattgcggaagatgacaatttaatggaagcgttccgccgcgatttggatatccatacgaaaacagcgatggacattttccaagtgagcgaggacgaagtgacgcccaacatgcgccgtcaggcgaaggcggtcaactttgggatcgtttacgggatcagtgattacggcttggcgcaaaacttaaatatttcacgcaaagaggccgctgaattcatcgagcgctacttcgaaagcttccctggcgtgaagcggtatatggaaaacattgtgcaagaagcaaaacagaaagggtatgtgacgacgctgctgcatcggcgccgctatttgccggatatcacgagccgcaacttcaacgtcattagctttgctgaacggatggcgatgaacacgccgattcaagggagcgccgctgacattattaaaaaggcgatgatcgatctgaacgctagactgaaggaagagcggctgcaagcgcgccttttgctacaggtgcatgacgagctcattttggaggcgccgaaagaagagatggagcggctgtgccggctcgttccggaagtgatggagcaagcggtcacacttcgcgtgccgctcaaagtcgattaccattatggctcgacgtggtatgacgcgaaataaaaaggatcc

SEQ ID NO: 2524 - DNA, 2712 bp, Artificial Sequence
  Description of Artificial Sequence: Synthetic DNA sequence of Bacillus caldolyticus EA1 DNA polymerase R808L
atgaaatacctgctgccgaccgctgctgctggtctgctgctcctcgctgcccagccggcgatggccatgggattgaaaaaaaagcttgttttaatcgacggcagcagcgtggcgtaccgcgcctttttcgccttgccgcttttgcataacgacaaaggcatccatacgaacgccgtctacgggtttacgatgatgttgaataaaattttggcggaagaagagccaactcatatgcttgtcgcgtttgacgccgggaaaacgacgttccggcatgaagcgtttcaagagtataaaggtgggcgccagcagacgccaccggagctgtcggagcagtttccgctgttgcgcgagctgctgagggcgtatcgcatccccgcctatgaactcgagaactacgaagcggacgatattatcggaacgcttgccgcccgcgctgagcaggaagggtttgaggtgaaagtcatttccggcgaccgcgatctgacccagctcgcctccccccatgtgacggtggacattacgaaaaaagggattaccgatatcgaaccgtacacgccggaggcggtccgcgaaaaatacggcttaactccggaacaaatcgttgatttgaaaggattgatgggcgacaaatcggacaacattcccggagtgccgggcatcggggaaaagacggcggtcaagctgctcaagcaattcggcacggtcgaaaacgtgcttgcctccattgacgagatcaaaggcgaaaagttgaaagaaacgctgcgccaacaccgggagatggcgctgttaagcaaaaagctcgccgccattcgccgcgacgccccggtcgagctctcgcttgatgacatcgtctatcaaggggaagaccgggagaaagtggtcgctttatttaaagagcttgggtttcaatcgtttttagagaaaatggaatcgccgtcatcagaagaggaaaaaccgcttgccaagatggcatttacgcttgctgaccgcgtgacggaggagatgcttgccgacaaggcggcgcttgtcgttgaagtggtcgaggaaaattatcatgatgcgccgatcgtcggcatcgctgtggtcaacgaacatggacggtttttcctgcgcccggagacggcgcttgccgatccgcagtttgtcgcctggcttggtgatgaaacgaagaaaaaaagcatgtttgactcaaagcgcgcggcagtcgccttgaaatggaaaggaattgagctatgcggcgtttcctttgatttattgctggccgcctatttgcttgatccggcgcaaggtgttgatgatgtggctgccgcagcaaaaatgaagcaatacgaagcggtgcgctcggatgaagcggtgtatggcaaaggggcgaagcgggccgtgccggatgagccagtgctcgccgagcatctcgtccgcaaggcggcggcgatttgggcgctcgaacgtccgtttttggatgagctgcgccgcaacgaacaagatcggttgctcgtcgagctcgagcagccgttgtcttcgattttggcggaaatggaatttgccggagtgaaagtggatacgaagcggctcgaacagatgggcgaagagctcgccgagcagctgcgcacggtcgagcagcgcatttatgagctcgccggccaagaattcaacatcaattcaccgaaacagctcggcgtcattttatttgaaaaactgcagctgcccgtcttgaaaaaaacgaaaaccggctactccacttcggcggatgtgcttgaaaaacttgcgccttatcacgagatcgtggaaaacattttgcattaccgccagcttggcaagttgcagtcgacgtatattgaaggattgctgaaagtcgtgcgacccgatacaaagaaggtgcatacgattttcaatcaggcgttgacgcaaaccggacggctcagctcgacggagccgaacttgcaaaacattccgattcggcttgaggaaggacggaaaatccgccaagcgttcgtgccgtcggagtctgattggctcattttcgctgccgactactcgcaaattgagttgcgcgtcctcgcccatattgcggaagatgacaatttaatggaagcgttccgccgcgatttggatatccatacgaaaacagcgatggacattttccaagtgagcgaggacgaagtgacgcccaacatgcgccgtcaggcgaaggcggtcaactttgggatcgtttacgggatcagtgattacggcttggcgcaaaacttaaatatttcacgcaaagaggccgctgaattcatcgagcgctacttcgaaagcttccctggcgtgaagcggtatatggaaaacattgtgcaagaagcaaaacagaaagggtatgtgacgacgctgctgcatcggcgccgctatttgccggatatcacgagccgcaacttcaacgtcttaagctttgctgaacggatggcgatgaacacgccgattcaagggagcgccgctgacattattaaaaaggcgatgatcgatctgaacgctagactgaaggaagagcggctgcaagcgcgccttttgctacaggtgcatgacgagctcattttggaggcgccgaaagaagagatggagcggctgtgccggctcgttccggaagtgatggagcaagcggtcacacttcgcgtgccgctcaaagtcgattaccattatggctcgacgtggtatgacgcgaaataaaaaggatcc

SEQ ID NO: 2525 - DNA, 2712 bp, Artificial Sequence
  Description of Artificial Sequence: Synthetic DNA sequence of Bacillus caldolyticus EA1 DNA polymerase R808K
atgaaatacctgctgccgaccgctgctgctggtctgctgctcctcgctgcccagccggcgatggccatgggattgaaaaaaaagcttgttttaatcgacggcagcagcgtggcgtaccgcgcctttttcgccttgccgcttttgcataacgacaaaggcatccatacgaacgccgtctacgggtttacgatgatgttgaataaaattttggcggaagaagagccaactcatatgcttgtcgcgtttgacgccgggaaaacgacgttccggcatgaagcgtttcaagagtataaaggtgggcgccagcagacgccaccggagctgtcggagcagtttccgctgttgcgcgagctgctgagggcgtatcgcatccccgcctatgaactcgagaactacgaagcggacgatattatcggaacgcttgccgcccgcgctgagcaggaagggtttgaggtgaaagtcatttccggcgaccgcgatctgacccagctcgcctccccccatgtgacggtggacattacgaaaaaagggattaccgatatcgaaccgtacacgccggaggcggtccgcgaaaaatacggcttaactccggaacaaatcgttgatttgaaaggattgatgggcgacaaatcggacaacattcccggagtgccgggcatcggggaaaagacggcggtcaagctgctcaagcaattcggcacggtcgaaaacgtgcttgcctccattgacgagatcaaaggcgaaaagttgaaagaaacgctgcgccaacaccgggagatggcgctgttaagcaaaaagctcgccgccattcgccgcgacgccccggtcgagctctcgcttgatgacatcgtctatcaaggggaagaccgggagaaagtggtcgctttatttaaagagcttgggtttcaatcgtttttagagaaaatggaatcgccgtcatcagaagaggaaaaaccgcttgccaagatggcatttacgcttgctgaccgcgtgacggaggagatgcttgccgacaaggcggcgcttgtcgttgaagtggtcgaggaaaattatcatgatgcgccgatcgtcggcatcgctgtggtcaacgaacatggacggtttttcctgcgcccggagacggcgcttgccgatccgcagtttgtcgcctggcttggtgatgaaacgaagaaaaaaagcatgtttgactcaaagcgcgcggcagtcgccttgaaatggaaaggaattgagctatgcggcgtttcctttgatttattgctggccgcctatttgcttgatccggcgcaaggtgttgatgatgtggctgccgcagcaaaaatgaagcaatacgaagcggtgcgctcggatgaagcggtgtatggcaaaggggcgaagcgggccgtgccggatgagccagtgctcgccgagcatctcgtccgcaaggcggcggcgatttgggcgctcgaacgtccgtttttggatgagctgcgccgcaacgaacaagatcggttgctcgtcgagctcgagcagccgttgtcttcgattttggcggaaatggaatttgccggagtgaaagtggatacgaagcggctcgaacagatgggcgaagagctcgccgagcagctgcgcacggtcgagcagcgcatttatgagctcgccggccaagaattcaacatcaattcaccgaaacagctcggcgtcattttatttgaaaaactgcagctgcccgtcttgaaaaaaacgaaaaccggctactccacttcggcggatgtgcttgaaaaacttgcgccttatcacgagatcgtggaaaacattttgcattaccgccagcttggcaagttgcagtcgacgtatattgaaggattgctgaaagtcgtgcgacccgatacaaagaaggtgcatacgattttcaatcaggcgttgacgcaaaccggacggctcagctcgacggagccgaacttgcaaaacattccgattcggcttgaggaaggacggaaaatccgccaagcgttcgtgccgtcggagtctgattggctcattttcgctgccgactactcgcaaattgagttgcgcgtcctcgcccatattgcggaagatgacaatttaatggaagcgttccgccgcgatttggatatccatacgaaaacagcgatggacattttccaagtgagcgaggacgaagtgacgcccaacatgcgccgtcaggcgaaggcggtcaactttgggatcgtttacgggatcagtgattacggcttggcgcaaaacttaaatatttcacgcaaagaggccgctgaattcatcgagcgctacttcgaaagcttccctggcgtgaagcggtatatggaaaacattgtgcaagaagcaaaacagaaagggtatgtgacgacgctgctgcatcggcgccgctatttgccggatatcacgagccgcaacttcaacgtcaaaagctttgctgaacggatggcgatgaacacgccgattcaagggagcgccgctgacattattaaaaaggcgatgatcgatctgaacgctagactgaaggaagagcggctgcaagcgcgccttttgctacaggtgcatgacgagctcattttggaggcgccgaaagaagagatggagcggctgtgccggctcgttccggaagtgatggagcaagcggtcacacttcgcgtgccgctcaaagtcgattaccattatggctcgacgtggtatgacgcgaaataaaaaggatcc

SEQ ID NO: 2526 - DNA, 2712 bp, Artificial Sequence
  Description of Artificial Sequence: Synthetic DNA sequence of Bacillus caldolyticus EA1 DNA polymerase R808E
atgaaatacctgctgccgaccgctgctgctggtctgctgctcctcgctgcccagccggcgatggccatgggattgaaaaaaaagcttgttttaatcgacggcagcagcgtggcgtaccgcgcctttttcgccttgccgcttttgcataacgacaaaggcatccatacgaacgccgtctacgggtttacgatgatgttgaataaaattttggcggaagaagagccaactcatatgcttgtcgcgtttgacgccgggaaaacgacgttccggcatgaagcgtttcaagagtataaaggtgggcgccagcagacgccaccggagctgtcggagcagtttccgctgttgcgcgagctgctgagggcgtatcgcatccccgcctatgaactcgagaactacgaagcggacgatattatcggaacgcttgccgcccgcgctgagcaggaagggtttgaggtgaaagtcatttccggcgaccgcgatctgacccagctcgcctccccccatgtgacggtggacattacgaaaaaagggattaccgatatcgaaccgtacacgccggaggcggtccgcgaaaaatacggcttaactccggaacaaatcgttgatttgaaaggattgatgggcgacaaatcggacaacattcccggagtgccgggcatcggggaaaagacggcggtcaagctgctcaagcaattcggcacggtcgaaaacgtgcttgcctccattgacgagatcaaaggcgaaaagttgaaagaaacgctgcgccaacaccgggagatggcgctgttaagcaaaaagctcgccgccattcgccgcgacgccccggtcgagctctcgcttgatgacatcgtctatcaaggggaagaccgggagaaagtggtcgctttatttaaagagcttgggtttcaatcgtttttagagaaaatggaatcgccgtcatcagaagaggaaaaaccgcttgccaagatggcatttacgcttgctgaccgcgtgacggaggagatgcttgccgacaaggcggcgcttgtcgttgaagtggtcgaggaaaattatcatgatgcgccgatcgtcggcatcgctgtggtcaacgaacatggacggtttttcctgcgcccggagacggcgcttgccgatccgcagtttgtcgcctggcttggtgatgaaacgaagaaaaaaagcatgtttgactcaaagcgcgcggcagtcgccttgaaatggaaaggaattgagctatgcggcgtttcctttgatttattgctggccgcctatttgcttgatccggcgcaaggtgttgatgatgtggctgccgcagcaaaaatgaagcaatacgaagcggtgcgctcggatgaagcggtgtatggcaaaggggcgaagcgggccgtgccggatgagccagtgctcgccgagcatctcgtccgcaaggcggcggcgatttgggcgctcgaacgtccgtttttggatgagctgcgccgcaacgaacaagatcggttgctcgtcgagctcgagcagccgttgtcttcgattttggcggaaatggaatttgccggagtgaaagtggatacgaagcggctcgaacagatgggcgaagagctcgccgagcagctgcgcacggtcgagcagcgcatttatgagctcgccggccaagaattcaacatcaattcaccgaaacagctcggcgtcattttatttgaaaaactgcagctgcccgtcttgaaaaaaacgaaaaccggctactccacttcggcggatgtgcttgaaaaacttgcgccttatcacgagatcgtggaaaacattttgcattaccgccagcttggcaagttgcagtcgacgtatattgaaggattgctgaaagtcgtgcgacccgatacaaagaaggtgcatacgattttcaatcaggcgttgacgcaaaccggacggctcagctcgacggagccgaacttgcaaaacattccgattcggcttgaggaaggacggaaaatccgccaagcgttcgtgccgtcggagtctgattggctcattttcgctgccgactactcgcaaattgagttgcgcgtcctcgcccatattgcggaagatgacaatttaatggaagcgttccgccgcgatttggatatccatacgaaaacagcgatggacattttccaagtgagcgaggacgaagtgacgcccaacatgcgccgtcaggcgaaggcggtcaactttgggatcgtttacgggatcagtgattacggcttggcgcaaaacttaaatatttcacgcaaagaggccgctgaattcatcgagcgctacttcgaaagcttccctggcgtgaagcggtatatggaaaacattgtgcaagaagcaaaacagaaagggtatgtgacgacgctgctgcatcggcgccgctatttgccggatatcacgagccgcaacttcaacgtcgaaagctttgctgaacggatggcgatgaacacgccgattcaagggagcgccgctgacattattaaaaaggcgatgatcgatctgaacgctagactgaaggaagagcggctgcaagcgcgccttttgctacaggtgcatgacgagctcattttggaggcgccgaaagaagagatggagcggctgtgccggctcgttccggaagtgatggagcaagcggtcacacttcgcgtgccgctcaaagtcgattaccattatggctcgacgtggtatgacgcgaaataaaaaggatcc

SEQ ID NO: 2527 - DNA, 2712 bp, Artificial Sequence
  Description of Artificial Sequence: Synthetic DNA sequence of Bacillus caldolyticus EA1 DNA polymerase R808D
atgaaatacctgctgccgaccgctgctgctggtctgctgctcctcgctgcccagccggcgatggccatgggattgaaaaaaaagcttgttttaatcgacggcagcagcgtggcgtaccgcgcctttttcgccttgccgcttttgcataacgacaaaggcatccatacgaacgccgtctacgggtttacgatgatgttgaataaaattttggcggaagaagagccaactcatatgcttgtcgcgtttgacgccgggaaaacgacgttccggcatgaagcgtttcaagagtataaaggtgggcgccagcagacgccaccggagctgtcggagcagtttccgctgttgcgcgagctgctgagggcgtatcgcatccccgcctatgaactcgagaactacgaagcggacgatattatcggaacgcttgccgcccgcgctgagcaggaagggtttgaggtgaaagtcatttccggcgaccgcgatctgacccagctcgcctccccccatgtgacggtggacattacgaaaaaagggattaccgatatcgaaccgtacacgccggaggcggtccgcgaaaaatacggcttaactccggaacaaatcgttgatttgaaaggattgatgggcgacaaatcggacaacattcccggagtgccgggcatcggggaaaagacggcggtcaagctgctcaagcaattcggcacggtcgaaaacgtgcttgcctccattgacgagatcaaaggcgaaaagttgaaagaaacgctgcgccaacaccgggagatggcgctgttaagcaaaaagctcgccgccattcgccgcgacgccccggtcgagctctcgcttgatgacatcgtctatcaaggggaagaccgggagaaagtggtcgctttatttaaagagcttgggtttcaatcgtttttagagaaaatggaatcgccgtcatcagaagaggaaaaaccgcttgccaagatggcatttacgcttgctgaccgcgtgacggaggagatgcttgccgacaaggcggcgcttgtcgttgaagtggtcgaggaaaattatcatgatgcgccgatcgtcggcatcgctgtggtcaacgaacatggacggtttttcctgcgcccggagacggcgcttgccgatccgcagtttgtcgcctggcttggtgatgaaacgaagaaaaaaagcatgtttgactcaaagcgcgcggcagtcgccttgaaatggaaaggaattgagctatgcggcgtttcctttgatttattgctggccgcctatttgcttgatccggcgcaaggtgttgatgatgtggctgccgcagcaaaaatgaagcaatacgaagcggtgcgctcggatgaagcggtgtatggcaaaggggcgaagcgggccgtgccggatgagccagtgctcgccgagcatctcgtccgcaaggcggcggcgatttgggcgctcgaacgtccgtttttggatgagctgcgccgcaacgaacaagatcggttgctcgtcgagctcgagcagccgttgtcttcgattttggcggaaatggaatttgccggagtgaaagtggatacgaagcggctcgaacagatgggcgaagagctcgccgagcagctgcgcacggtcgagcagcgcatttatgagctcgccggccaagaattcaacatcaattcaccgaaacagctcggcgtcattttatttgaaaaactgcagctgcccgtcttgaaaaaaacgaaaaccggctactccacttcggcggatgtgcttgaaaaacttgcgccttatcacgagatcgtggaaaacattttgcattaccgccagcttggcaagttgcagtcgacgtatattgaaggattgctgaaagtcgtgcgacccgatacaaagaaggtgcatacgattttcaatcaggcgttgacgcaaaccggacggctcagctcgacggagccgaacttgcaaaacattccgattcggcttgaggaaggacggaaaatccgccaagcgttcgtgccgtcggagtctgattggctcattttcgctgccgactactcgcaaattgagttgcgcgtcctcgcccatattgcggaagatgacaatttaatggaagcgttccgccgcgatttggatatccatacgaaaacagcgatggacattttccaagtgagcgaggacgaagtgacgcccaacatgcgccgtcaggcgaaggcggtcaactttgggatcgtttacgggatcagtgattacggcttggcgcaaaacttaaatatttcacgcaaagaggccgctgaattcatcgagcgctacttcgaaagcttccctggcgtgaagcggtatatggaaaacattgtgcaagaagcaaaacagaaagggtatgtgacgacgctgctgcatcggcgccgctatttgccggatatcacgagccgcaacttcaacgtcgatagctttgctgaacggatggcgatgaacacgccgattcaagggagcgccgctgacattattaaaaaggcgatgatcgatctgaacgctagactgaaggaagagcggctgcaagcgcgccttttgctacaggtgcatgacgagctcattttggaggcgccgaaagaagagatggagcggctgtgccggctcgttccggaagtgatggagcaagcggtcacacttcgcgtgccgctcaaagtcgattaccattatggctcgacgtggtatgacgcgaaataaaaaggatcc

SEQ ID NO: 2528 - DNA, 2712 bp, Artificial Sequence
  Description of Artificial Sequence: Synthetic DNA sequence of Bacillus caldolyticus EA1 DNA polymerase R808F
atgaaatacctgctgccgaccgctgctgctggtctgctgctcctcgctgcccagccggcgatggccatgggattgaaaaaaaagcttgttttaatcgacggcagcagcgtggcgtaccgcgcctttttcgccttgccgcttttgcataacgacaaaggcatccatacgaacgccgtctacgggtttacgatgatgttgaataaaattttggcggaagaagagccaactcatatgcttgtcgcgtttgacgccgggaaaacgacgttccggcatgaagcgtttcaagagtataaaggtgggcgccagcagacgccaccggagctgtcggagcagtttccgctgttgcgcgagctgctgagggcgtatcgcatccccgcctatgaactcgagaactacgaagcggacgatattatcggaacgcttgccgcccgcgctgagcaggaagggtttgaggtgaaagtcatttccggcgaccgcgatctgacccagctcgcctccccccatgtgacggtggacattacgaaaaaagggattaccgatatcgaaccgtacacgccggaggcggtccgcgaaaaatacggcttaactccggaacaaatcgttgatttgaaaggattgatgggcgacaaatcggacaacattcccggagtgccgggcatcggggaaaagacggcggtcaagctgctcaagcaattcggcacggtcgaaaacgtgcttgcctccattgacgagatcaaaggcgaaaagttgaaagaaacgctgcgccaacaccgggagatggcgctgttaagcaaaaagctcgccgccattcgccgcgacgccccggtcgagctctcgcttgatgacatcgtctatcaaggggaagaccgggagaaagtggtcgctttatttaaagagcttgggtttcaatcgtttttagagaaaatggaatcgccgtcatcagaagaggaaaaaccgcttgccaagatggcatttacgcttgctgaccgcgtgacggaggagatgcttgccgacaaggcggcgcttgtcgttgaagtggtcgaggaaaattatcatgatgcgccgatcgtcggcatcgctgtggtcaacgaacatggacggtttttcctgcgcccggagacggcgcttgccgatccgcagtttgtcgcctggcttggtgatgaaacgaagaaaaaaagcatgtttgactcaaagcgcgcggcagtcgccttgaaatggaaaggaattgagctatgcggcgtttcctttgatttattgctggccgcctatttgcttgatccggcgcaaggtgttgatgatgtggctgccgcagcaaaaatgaagcaatacgaagcggtgcgctcggatgaagcggtgtatggcaaaggggcgaagcgggccgtgccggatgagccagtgctcgccgagcatctcgtccgcaaggcggcggcgatttgggcgctcgaacgtccgtttttggatgagctgcgccgcaacgaacaagatcggttgctcgtcgagctcgagcagccgttgtcttcgattttggcggaaatggaatttgccggagtgaaagtggatacgaagcggctcgaacagatgggcgaagagctcgccgagcagctgcgcacggtcgagcagcgcatttatgagctcgccggccaagaattcaacatcaattcaccgaaacagctcggcgtcattttatttgaaaaactgcagctgcccgtcttgaaaaaaacgaaaaccggctactccacttcggcggatgtgcttgaaaaacttgcgccttatcacgagatcgtggaaaacattttgcattaccgccagcttggcaagttgcagtcgacgtatattgaaggattgctgaaagtcgtgcgacccgatacaaagaaggtgcatacgattttcaatcaggcgttgacgcaaaccggacggctcagctcgacggagccgaacttgcaaaacattccgattcggcttgaggaaggacggaaaatccgccaagcgttcgtgccgtcggagtctgattggctcattttcgctgccgactactcgcaaattgagttgcgcgtcctcgcccatattgcggaagatgacaatttaatggaagcgttccgccgcgatttggatatccatacgaaaacagcgatggacattttccaagtgagcgaggacgaagtgacgcccaacatgcgccgtcaggcgaaggcggtcaactttgggatcgtttacgggatcagtgattacggcttggcgcaaaacttaaatatttcacgcaaagaggccgctgaattcatcgagcgctacttcgaaagcttccctggcgtgaagcggtatatggaaaacattgtgcaagaagcaaaacagaaagggtatgtgacgacgctgctgcatcggcgccgctatttgccggatatcacgagccgcaacttcaacgtctttagctttgctgaacggatggcgatgaacacgccgattcaagggagcgccgctgacattattaaaaaggcgatgatcgatctgaacgctagactgaaggaagagcggctgcaagcgcgccttttgctacaggtgcatgacgagctcattttggaggcgccgaaagaagagatggagcggctgtgccggctcgttccggaagtgatggagcaagcggtcacacttcgcgtgccgctcaaagtcgattaccattatggctcgacgtggtatgacgcgaaataaaaaggatcc

SEQ ID NO: 2529 - DNA, 2712 bp, Artificial Sequence
  Description of Artificial Sequence: Synthetic DNA sequence of Bacillus caldolyticus EA1 DNA polymerase R808S
atgaaatacctgctgccgaccgctgctgctggtctgctgctcctcgctgcccagccggcgatggccatgggattgaaaaaaaagcttgttttaatcgacggcagcagcgtggcgtaccgcgcctttttcgccttgccgcttttgcataacgacaaaggcatccatacgaacgccgtctacgggtttacgatgatgttgaataaaattttggcggaagaagagccaactcatatgcttgtcgcgtttgacgccgggaaaacgacgttccggcatgaagcgtttcaagagtataaaggtgggcgccagcagacgccaccggagctgtcggagcagtttccgctgttgcgcgagctgctgagggcgtatcgcatccccgcctatgaactcgagaactacgaagcggacgatattatcggaacgcttgccgcccgcgctgagcaggaagggtttgaggtgaaagtcatttccggcgaccgcgatctgacccagctcgcctccccccatgtgacggtggacattacgaaaaaagggattaccgatatcgaaccgtacacgccggaggcggtccgcgaaaaatacggcttaactccggaacaaatcgttgatttgaaaggattgatgggcgacaaatcggacaacattcccggagtgccgggcatcggggaaaagacggcggtcaagctgctcaagcaattcggcacggtcgaaaacgtgcttgcctccattgacgagatcaaaggcgaaaagttgaaagaaacgctgcgccaacaccgggagatggcgctgttaagcaaaaagctcgccgccattcgccgcgacgccccggtcgagctctcgcttgatgacatcgtctatcaaggggaagaccgggagaaagtggtcgctttatttaaagagcttgggtttcaatcgtttttagagaaaatggaatcgccgtcatcagaagaggaaaaaccgcttgccaagatggcatttacgcttgctgaccgcgtgacggaggagatgcttgccgacaaggcggcgcttgtcgttgaagtggtcgaggaaaattatcatgatgcgccgatcgtcggcatcgctgtggtcaacgaacatggacggtttttcctgcgcccggagacggcgcttgccgatccgcagtttgtcgcctggcttggtgatgaaacgaagaaaaaaagcatgtttgactcaaagcgcgcggcagtcgccttgaaatggaaaggaattgagctatgcggcgtttcctttgatttattgctggccgcctatttgcttgatccggcgcaaggtgttgatgatgtggctgccgcagcaaaaatgaagcaatacgaagcggtgcgctcggatgaagcggtgtatggcaaaggggcgaagcgggccgtgccggatgagccagtgctcgccgagcatctcgtccgcaaggcggcggcgatttgggcgctcgaacgtccgtttttggatgagctgcgccgcaacgaacaagatcggttgctcgtcgagctcgagcagccgttgtcttcgattttggcggaaatggaatttgccggagtgaaagtggatacgaagcggctcgaacagatgggcgaagagctcgccgagcagctgcgcacggtcgagcagcgcatttatgagctcgccggccaagaattcaacatcaattcaccgaaacagctcggcgtcattttatttgaaaaactgcagctgcccgtcttgaaaaaaacgaaaaccggctactccacttcggcggatgtgcttgaaaaacttgcgccttatcacgagatcgtggaaaacattttgcattaccgccagcttggcaagttgcagtcgacgtatattgaaggattgctgaaagtcgtgcgacccgatacaaagaaggtgcatacgattttcaatcaggcgttgacgcaaaccggacggctcagctcgacggagccgaacttgcaaaacattccgattcggcttgaggaaggacggaaaatccgccaagcgttcgtgccgtcggagtctgattggctcattttcgctgccgactactcgcaaattgagttgcgcgtcctcgcccatattgcggaagatgacaatttaatggaagcgttccgccgcgatttggatatccatacgaaaacagcgatggacattttccaagtgagcgaggacgaagtgacgcccaacatgcgccgtcaggcgaaggcggtcaactttgggatcgtttacgggatcagtgattacggcttggcgcaaaacttaaatatttcacgcaaagaggccgctgaattcatcgagcgctacttcgaaagcttccctggcgtgaagcggtatatggaaaacattgtgcaagaagcaaaacagaaagggtatgtgacgacgctgctgcatcggcgccgctatttgccggatatcacgagccgcaacttcaacgtctctagctttgctgaacggatggcgatgaacacgccgattcaagggagcgccgctgacattattaaaaaggcgatgatcgatctgaacgctagactgaaggaagagcggctgcaagcgcgccttttgctacaggtgcatgacgagctcattttggaggcgccgaaagaagagatggagcggctgtgccggctcgttccggaagtgatggagcaagcggtcacacttcgcgtgccgctcaaagtcgattaccattatggctcgacgtggtatgacgcgaaataaaaaggatcc

SEQ ID NO: 2530 - DNA, 2712 bp, Artificial Sequence
  Description of Artificial Sequence: Synthetic DNA sequence of Bacillus caldolyticus EA1 DNA polymerase R808Y
atgaaatacctgctgccgaccgctgctgctggtctgctgctcctcgctgcccagccggcgatggccatgggattgaaaaaaaagcttgttttaatcgacggcagcagcgtggcgtaccgcgcctttttcgccttgccgcttttgcataacgacaaaggcatccatacgaacgccgtctacgggtttacgatgatgttgaataaaattttggcggaagaagagccaactcatatgcttgtcgcgtttgacgccgggaaaacgacgttccggcatgaagcgtttcaagagtataaaggtgggcgccagcagacgccaccggagctgtcggagcagtttccgctgttgcgcgagctgctgagggcgtatcgcatccccgcctatgaactcgagaactacgaagcggacgatattatcggaacgcttgccgcccgcgctgagcaggaagggtttgaggtgaaagtcatttccggcgaccgcgatctgacccagctcgcctccccccatgtgacggtggacattacgaaaaaagggattaccgatatcgaaccgtacacgccggaggcggtccgcgaaaaatacggcttaactccggaacaaatcgttgatttgaaaggattgatgggcgacaaatcggacaacattcccggagtgccgggcatcggggaaaagacggcggtcaagctgctcaagcaattcggcacggtcgaaaacgtgcttgcctccattgacgagatcaaaggcgaaaagttgaaagaaacgctgcgccaacaccgggagatggcgctgttaagcaaaaagctcgccgccattcgccgcgacgccccggtcgagctctcgcttgatgacatcgtctatcaaggggaagaccgggagaaagtggtcgctttatttaaagagcttgggtttcaatcgtttttagagaaaatggaatcgccgtcatcagaagaggaaaaaccgcttgccaagatggcatttacgcttgctgaccgcgtgacggaggagatgcttgccgacaaggcggcgcttgtcgttgaagtggtcgaggaaaattatcatgatgcgccgatcgtcggcatcgctgtggtcaacgaacatggacggtttttcctgcgcccggagacggcgcttgccgatccgcagtttgtcgcctggcttggtgatgaaacgaagaaaaaaagcatgtttgactcaaagcgcgcggcagtcgccttgaaatggaaaggaattgagctatgcggcgtttcctttgatttattgctggccgcctatttgcttgatccggcgcaaggtgttgatgatgtggctgccgcagcaaaaatgaagcaatacgaagcggtgcgctcggatgaagcggtgtatggcaaaggggcgaagcgggccgtgccggatgagccagtgctcgccgagcatctcgtccgcaaggcggcggcgatttgggcgctcgaacgtccgtttttggatgagctgcgccgcaacgaacaagatcggttgctcgtcgagctcgagcagccgttgtcttcgattttggcggaaatggaatttgccggagtgaaagtggatacgaagcggctcgaacagatgggcgaagagctcgccgagcagctgcgcacggtcgagcagcgcatttatgagctcgccggccaagaattcaacatcaattcaccgaaacagctcggcgtcattttatttgaaaaactgcagctgcccgtcttgaaaaaaacgaaaaccggctactccacttcggcggatgtgcttgaaaaacttgcgccttatcacgagatcgtggaaaacattttgcattaccgccagcttggcaagttgcagtcgacgtatattgaaggattgctgaaagtcgtgcgacccgatacaaagaaggtgcatacgattttcaatcaggcgttgacgcaaaccggacggctcagctcgacggagccgaacttgcaaaacattccgattcggcttgaggaaggacggaaaatccgccaagcgttcgtgccgtcggagtctgattggctcattttcgctgccgactactcgcaaattgagttgcgcgtcctcgcccatattgcggaagatgacaatttaatggaagcgttccgccgcgatttggatatccatacgaaaacagcgatggacattttccaagtgagcgaggacgaagtgacgcccaacatgcgccgtcaggcgaaggcggtcaactttgggatcgtttacgggatcagtgattacggcttggcgcaaaacttaaatatttcacgcaaagaggccgctgaattcatcgagcgctacttcgaaagcttccctggcgtgaagcggtatatggaaaacattgtgcaagaagcaaaacagaaagggtatgtgacgacgctgctgcatcggcgccgctatttgccggatatcacgagccgcaacttcaacgtctatagctttgctgaacggatggcgatgaacacgccgattcaagggagcgccgctgacattattaaaaaggcgatgatcgatctgaacgctagactgaaggaagagcggctgcaagcgcgccttttgctacaggtgcatgacgagctcattttggaggcgccgaaagaagagatggagcggctgtgccggctcgttccggaagtgatggagcaagcggtcacacttcgcgtgccgctcaaagtcgattaccattatggctcgacgtggtatgacgcgaaataaaaaggatcc

SEQ ID NO: 2531 - DNA, 2712 bp, Artificial Sequence
  Description of Artificial Sequence: Synthetic DNA sequence of Bacillus caldolyticus EA1 DNA polymerase R808W
atgaaatacctgctgccgaccgctgctgctggtctgctgctcctcgctgcccagccggcgatggccatgggattgaaaaaaaagcttgttttaatcgacggcagcagcgtggcgtaccgcgcctttttcgccttgccgcttttgcataacgacaaaggcatccatacgaacgccgtctacgggtttacgatgatgttgaataaaattttggcggaagaagagccaactcatatgcttgtcgcgtttgacgccgggaaaacgacgttccggcatgaagcgtttcaagagtataaaggtgggcgccagcagacgccaccggagctgtcggagcagtttccgctgttgcgcgagctgctgagggcgtatcgcatccccgcctatgaactcgagaactacgaagcggacgatattatcggaacgcttgccgcccgcgctgagcaggaagggtttgaggtgaaagtcatttccggcgaccgcgatctgacccagctcgcctccccccatgtgacggtggacattacgaaaaaagggattaccgatatcgaaccgtacacgccggaggcggtccgcgaaaaatacggcttaactccggaacaaatcgttgatttgaaaggattgatgggcgacaaatcggacaacattcccggagtgccgggcatcggggaaaagacggcggtcaagctgctcaagcaattcggcacggtcgaaaacgtgcttgcctccattgacgagatcaaaggcgaaaagttgaaagaaacgctgcgccaacaccgggagatggcgctgttaagcaaaaagctcgccgccattcgccgcgacgccccggtcgagctctcgcttgatgacatcgtctatcaaggggaagaccgggagaaagtggtcgctttatttaaagagcttgggtttcaatcgtttttagagaaaatggaatcgccgtcatcagaagaggaaaaaccgcttgccaagatggcatttacgcttgctgaccgcgtgacggaggagatgcttgccgacaaggcggcgcttgtcgttgaagtggtcgaggaaaattatcatgatgcgccgatcgtcggcatcgctgtggtcaacgaacatggacggtttttcctgcgcccggagacggcgcttgccgatccgcagtttgtcgcctggcttggtgatgaaacgaagaaaaaaagcatgtttgactcaaagcgcgcggcagtcgccttgaaatggaaaggaattgagctatgcggcgtttcctttgatttattgctggccgcctatttgcttgatccggcgcaaggtgttgatgatgtggctgccgcagcaaaaatgaagcaatacgaagcggtgcgctcggatgaagcggtgtatggcaaaggggcgaagcgggccgtgccggatgagccagtgctcgccgagcatctcgtccgcaaggcggcggcgatttgggcgctcgaacgtccgtttttggatgagctgcgccgcaacgaacaagatcggttgctcgtcgagctcgagcagccgttgtcttcgattttggcggaaatggaatttgccggagtgaaagtggatacgaagcggctcgaacagatgggcgaagagctcgccgagcagctgcgcacggtcgagcagcgcatttatgagctcgccggccaagaattcaacatcaattcaccgaaacagctcggcgtcattttatttgaaaaactgcagctgcccgtcttgaaaaaaacgaaaaccggctactccacttcggcggatgtgcttgaaaaacttgcgccttatcacgagatcgtggaaaacattttgcattaccgccagcttggcaagttgcagtcgacgtatattgaaggattgctgaaagtcgtgcgacccgatacaaagaaggtgcatacgattttcaatcaggcgttgacgcaaaccggacggctcagctcgacggagccgaacttgcaaaacattccgattcggcttgaggaaggacggaaaatccgccaagcgttcgtgccgtcggagtctgattggctcattttcgctgccgactactcgcaaattgagttgcgcgtcctcgcccatattgcggaagatgacaatttaatggaagcgttccgccgcgatttggatatccatacgaaaacagcgatggacattttccaagtgagcgaggacgaagtgacgcccaacatgcgccgtcaggcgaaggcggtcaactttgggatcgtttacgggatcagtgattacggcttggcgcaaaacttaaatatttcacgcaaagaggccgctgaattcatcgagcgctacttcgaaagcttccctggcgtgaagcggtatatggaaaacattgtgcaagaagcaaaacagaaagggtatgtgacgacgctgctgcatcggcgccgctatttgccggatatcacgagccgcaacttcaacgtctggagctttgctgaacggatggcgatgaacacgccgattcaagggagcgccgctgacattattaaaaaggcgatgatcgatctgaacgctagactgaaggaagagcggctgcaagcgcgccttttgctacaggtgcatgacgagctcattttggaggcgccgaaagaagagatggagcggctgtgccggctcgttccggaagtgatggagcaagcggtcacacttcgcgtgccgctcaaagtcgattaccattatggctcgacgtggtatgacgcgaaataaaaaggatcc

SEQ ID NO: 2532 - DNA, 2712 bp, Artificial Sequence
  Description of Artificial Sequence: Synthetic DNA sequence of Bacillus caldolyticus EA1 DNA polymerase R808P
atgaaatacctgctgccgaccgctgctgctggtctgctgctcctcgctgcccagccggcgatggccatgggattgaaaaaaaagcttgttttaatcgacggcagcagcgtggcgtaccgcgcctttttcgccttgccgcttttgcataacgacaaaggcatccatacgaacgccgtctacgggtttacgatgatgttgaataaaattttggcggaagaagagccaactcatatgcttgtcgcgtttgacgccgggaaaacgacgttccggcatgaagcgtttcaagagtataaaggtgggcgccagcagacgccaccggagctgtcggagcagtttccgctgttgcgcgagctgctgagggcgtatcgcatccccgcctatgaactcgagaactacgaagcggacgatattatcggaacgcttgccgcccgcgctgagcaggaagggtttgaggtgaaagtcatttccggcgaccgcgatctgacccagctcgcctccccccatgtgacggtggacattacgaaaaaagggattaccgatatcgaaccgtacacgccggaggcggtccgcgaaaaatacggcttaactccggaacaaatcgttgatttgaaaggattgatgggcgacaaatcggacaacattcccggagtgccgggcatcggggaaaagacggcggtcaagctgctcaagcaattcggcacggtcgaaaacgtgcttgcctccattgacgagatcaaaggcgaaaagttgaaagaaacgctgcgccaacaccgggagatggcgctgttaagcaaaaagctcgccgccattcgccgcgacgccccggtcgagctctcgcttgatgacatcgtctatcaaggggaagaccgggagaaagtggtcgctttatttaaagagcttgggtttcaatcgtttttagagaaaatggaatcgccgtcatcagaagaggaaaaaccgcttgccaagatggcatttacgcttgctgaccgcgtgacggaggagatgcttgccgacaaggcggcgcttgtcgttgaagtggtcgaggaaaattatcatgatgcgccgatcgtcggcatcgctgtggtcaacgaacatggacggtttttcctgcgcccggagacggcgcttgccgatccgcagtttgtcgcctggcttggtgatgaaacgaagaaaaaaagcatgtttgactcaaagcgcgcggcagtcgccttgaaatggaaaggaattgagctatgcggcgtttcctttgatttattgctggccgcctatttgcttgatccggcgcaaggtgttgatgatgtggctgccgcagcaaaaatgaagcaatacgaagcggtgcgctcggatgaagcggtgtatggcaaaggggcgaagcgggccgtgccggatgagccagtgctcgccgagcatctcgtccgcaaggcggcggcgatttgggcgctcgaacgtccgtttttggatgagctgcgccgcaacgaacaagatcggttgctcgtcgagctcgagcagccgttgtcttcgattttggcggaaatggaatttgccggagtgaaagtggatacgaagcggctcgaacagatgggcgaagagctcgccgagcagctgcgcacggtcgagcagcgcatttatgagctcgccggccaagaattcaacatcaattcaccgaaacagctcggcgtcattttatttgaaaaactgcagctgcccgtcttgaaaaaaacgaaaaccggctactccacttcggcggatgtgcttgaaaaacttgcgccttatcacgagatcgtggaaaacattttgcattaccgccagcttggcaagttgcagtcgacgtatattgaaggattgctgaaagtcgtgcgacccgatacaaagaaggtgcatacgattttcaatcaggcgttgacgcaaaccggacggctcagctcgacggagccgaacttgcaaaacattccgattcggcttgaggaaggacggaaaatccgccaagcgttcgtgccgtcggagtctgattggctcattttcgctgccgactactcgcaaattgagttgcgcgtcctcgcccatattgcggaagatgacaatttaatggaagcgttccgccgcgatttggatatccatacgaaaacagcgatggacattttccaagtgagcgaggacgaagtgacgcccaacatgcgccgtcaggcgaaggcggtcaactttgggatcgtttacgggatcagtgattacggcttggcgcaaaacttaaatatttcacgcaaagaggccgctgaattcatcgagcgctacttcgaaagcttccctggcgtgaagcggtatatggaaaacattgtgcaagaagcaaaacagaaagggtatgtgacgacgctgctgcatcggcgccgctatttgccggatatcacgagccgcaacttcaacgtccctagctttgctgaacggatggcgatgaacacgccgattcaagggagcgccgctgacattattaaaaaggcgatgatcgatctgaacgctagactgaaggaagagcggctgcaagcgcgccttttgctacaggtgcatgacgagctcattttggaggcgccgaaagaagagatggagcggctgtgccggctcgttccggaagtgatggagcaagcggtcacacttcgcgtgccgctcaaagtcgattaccattatggctcgacgtggtatgacgcgaaataaaaaggatcc

SEQ ID NO: 2533 - DNA, 2712 bp, Artificial Sequence
  Description of Artificial Sequence: Synthetic DNA sequence of Bacillus caldolyticus EA1 DNA polymerase R808M
atgaaatacctgctgccgaccgctgctgctggtctgctgctcctcgctgcccagccggcgatggccatgggattgaaaaaaaagcttgttttaatcgacggcagcagcgtggcgtaccgcgcctttttcgccttgccgcttttgcataacgacaaaggcatccatacgaacgccgtctacgggtttacgatgatgttgaataaaattttggcggaagaagagccaactcatatgcttgtcgcgtttgacgccgggaaaacgacgttccggcatgaagcgtttcaagagtataaaggtgggcgccagcagacgccaccggagctgtcggagcagtttccgctgttgcgcgagctgctgagggcgtatcgcatccccgcctatgaactcgagaactacgaagcggacgatattatcggaacgcttgccgcccgcgctgagcaggaagggtttgaggtgaaagtcatttccggcgaccgcgatctgacccagctcgcctccccccatgtgacggtggacattacgaaaaaagggattaccgatatcgaaccgtacacgccggaggcggtccgcgaaaaatacggcttaactccggaacaaatcgttgatttgaaaggattgatgggcgacaaatcggacaacattcccggagtgccgggcatcggggaaaagacggcggtcaagctgctcaagcaattcggcacggtcgaaaacgtgcttgcctccattgacgagatcaaaggcgaaaagttgaaagaaacgctgcgccaacaccgggagatggcgctgttaagcaaaaagctcgccgccattcgccgcgacgccccggtcgagctctcgcttgatgacatcgtctatcaaggggaagaccgggagaaagtggtcgctttatttaaagagcttgggtttcaatcgtttttagagaaaatggaatcgccgtcatcagaagaggaaaaaccgcttgccaagatggcatttacgcttgctgaccgcgtgacggaggagatgcttgccgacaaggcggcgcttgtcgttgaagtggtcgaggaaaattatcatgatgcgccgatcgtcggcatcgctgtggtcaacgaacatggacggtttttcctgcgcccggagacggcgcttgccgatccgcagtttgtcgcctggcttggtgatgaaacgaagaaaaaaagcatgtttgactcaaagcgcgcggcagtcgccttgaaatggaaaggaattgagctatgcggcgtttcctttgatttattgctggccgcctatttgcttgatccggcgcaaggtgttgatgatgtggctgccgcagcaaaaatgaagcaatacgaagcggtgcgctcggatgaagcggtgtatggcaaaggggcgaagcgggccgtgccggatgagccagtgctcgccgagcatctcgtccgcaaggcggcggcgatttgggcgctcgaacgtccgtttttggatgagctgcgccgcaacgaacaagatcggttgctcgtcgagctcgagcagccgttgtcttcgattttggcggaaatggaatttgccggagtgaaagtggatacgaagcggctcgaacagatgggcgaagagctcgccgagcagctgcgcacggtcgagcagcgcatttatgagctcgccggccaagaattcaacatcaattcaccgaaacagctcggcgtcattttatttgaaaaactgcagctgcccgtcttgaaaaaaacgaaaaccggctactccacttcggcggatgtgcttgaaaaacttgcgccttatcacgagatcgtggaaaacattttgcattaccgccagcttggcaagttgcagtcgacgtatattgaaggattgctgaaagtcgtgcgacccgatacaaagaaggtgcatacgattttcaatcaggcgttgacgcaaaccggacggctcagctcgacggagccgaacttgcaaaacattccgattcggcttgaggaaggacggaaaatccgccaagcgttcgtgccgtcggagtctgattggctcattttcgctgccgactactcgcaaattgagttgcgcgtcctcgcccatattgcggaagatgacaatttaatggaagcgttccgccgcgatttggatatccatacgaaaacagcgatggacattttccaagtgagcgaggacgaagtgacgcccaacatgcgccgtcaggcgaaggcggtcaactttgggatcgtttacgggatcagtgattacggcttggcgcaaaacttaaatatttcacgcaaagaggccgctgaattcatcgagcgctacttcgaaagcttccctggcgtgaagcggtatatggaaaacattgtgcaagaagcaaaacagaaagggtatgtgacgacgctgctgcatcggcgccgctatttgccggatatcacgagccgcaacttcaacgtcatgagctttgctgaacggatggcgatgaacacgccgattcaagggagcgccgctgacattattaaaaaggcgatgatcgatctgaacgctagactgaaggaagagcggctgcaagcgcgccttttgctacaggtgcatgacgagctcattttggaggcgccgaaagaagagatggagcggctgtgccggctcgttccggaagtgatggagcaagcggtcacacttcgcgtgccgctcaaagtcgattaccattatggctcgacgtggtatgacgcgaaataaaaaggatcc

SEQ ID NO: 2534 - DNA, 2712 bp, Artificial Sequence
  Description of Artificial Sequence: Synthetic DNA sequence of Bacillus caldolyticus EA1 DNA polymerase R808T
atgaaatacctgctgccgaccgctgctgctggtctgctgctcctcgctgcccagccggcgatggccatgggattgaaaaaaaagcttgttttaatcgacggcagcagcgtggcgtaccgcgcctttttcgccttgccgcttttgcataacgacaaaggcatccatacgaacgccgtctacgggtttacgatgatgttgaataaaattttggcggaagaagagccaactcatatgcttgtcgcgtttgacgccgggaaaacgacgttccggcatgaagcgtttcaagagtataaaggtgggcgccagcagacgccaccggagctgtcggagcagtttccgctgttgcgcgagctgctgagggcgtatcgcatccccgcctatgaactcgagaactacgaagcggacgatattatcggaacgcttgccgcccgcgctgagcaggaagggtttgaggtgaaagtcatttccggcgaccgcgatctgacccagctcgcctccccccatgtgacggtggacattacgaaaaaagggattaccgatatcgaaccgtacacgccggaggcggtccgcgaaaaatacggcttaactccggaacaaatcgttgatttgaaaggattgatgggcgacaaatcggacaacattcccggagtgccgggcatcggggaaaagacggcggtcaagctgctcaagcaattcggcacggtcgaaaacgtgcttgcctccattgacgagatcaaaggcgaaaagttgaaagaaacgctgcgccaacaccgggagatggcgctgttaagcaaaaagctcgccgccattcgccgcgacgccccggtcgagctctcgcttgatgacatcgtctatcaaggggaagaccgggagaaagtggtcgctttatttaaagagcttgggtttcaatcgtttttagagaaaatggaatcgccgtcatcagaagaggaaaaaccgcttgccaagatggcatttacgcttgctgaccgcgtgacggaggagatgcttgccgacaaggcggcgcttgtcgttgaagtggtcgaggaaaattatcatgatgcgccgatcgtcggcatcgctgtggtcaacgaacatggacggtttttcctgcgcccggagacggcgcttgccgatccgcagtttgtcgcctggcttggtgatgaaacgaagaaaaaaagcatgtttgactcaaagcgcgcggcagtcgccttgaaatggaaaggaattgagctatgcggcgtttcctttgatttattgctggccgcctatttgcttgatccggcgcaaggtgttgatgatgtggctgccgcagcaaaaatgaagcaatacgaagcggtgcgctcggatgaagcggtgtatggcaaaggggcgaagcgggccgtgccggatgagccagtgctcgccgagcatctcgtccgcaaggcggcggcgatttgggcgctcgaacgtccgtttttggatgagctgcgccgcaacgaacaagatcggttgctcgtcgagctcgagcagccgttgtcttcgattttggcggaaatggaatttgccggagtgaaagtggatacgaagcggctcgaacagatgggcgaagagctcgccgagcagctgcgcacggtcgagcagcgcatttatgagctcgccggccaagaattcaacatcaattcaccgaaacagctcggcgtcattttatttgaaaaactgcagctgcccgtcttgaaaaaaacgaaaaccggctactccacttcggcggatgtgcttgaaaaacttgcgccttatcacgagatcgtggaaaacattttgcattaccgccagcttggcaagttgcagtcgacgtatattgaaggattgctgaaagtcgtgcgacccgatacaaagaaggtgcatacgattttcaatcaggcgttgacgcaaaccggacggctcagctcgacggagccgaacttgcaaaacattccgattcggcttgaggaaggacggaaaatccgccaagcgttcgtgccgtcggagtctgattggctcattttcgctgccgactactcgcaaattgagttgcgcgtcctcgcccatattgcggaagatgacaatttaatggaagcgttccgccgcgatttggatatccatacgaaaacagcgatggacattttccaagtgagcgaggacgaagtgacgcccaacatgcgccgtcaggcgaaggcggtcaactttgggatcgtttacgggatcagtgattacggcttggcgcaaaacttaaatatttcacgcaaagaggccgctgaattcatcgagcgctacttcgaaagcttccctggcgtgaagcggtatatggaaaacattgtgcaagaagcaaaacagaaagggtatgtgacgacgctgctgcatcggcgccgctatttgccggatatcacgagccgcaacttcaacgtcactagctttgctgaacggatggcgatgaacacgccgattcaagggagcgccgctgacattattaaaaaggcgatgatcgatctgaacgctagactgaaggaagagcggctgcaagcgcgccttttgctacaggtgcatgacgagctcattttggaggcgccgaaagaagagatggagcggctgtgccggctcgttccggaagtgatggagcaagcggtcacacttcgcgtgccgctcaaagtcgattaccattatggctcgacgtggtatgacgcgaaataaaaaggatcc

SEQ ID NO: 2535 - DNA, 2712 bp, Artificial Sequence
  Description of Artificial Sequence: Synthetic DNA sequence of Bacillus caldolyticus EA1 DNA polymerase R808N
atgaaatacctgctgccgaccgctgctgctggtctgctgctcctcgctgcccagccggcgatggccatgggattgaaaaaaaagcttgttttaatcgacggcagcagcgtggcgtaccgcgcctttttcgccttgccgcttttgcataacgacaaaggcatccatacgaacgccgtctacgggtttacgatgatgttgaataaaattttggcggaagaagagccaactcatatgcttgtcgcgtttgacgccgggaaaacgacgttccggcatgaagcgtttcaagagtataaaggtgggcgccagcagacgccaccggagctgtcggagcagtttccgctgttgcgcgagctgctgagggcgtatcgcatccccgcctatgaactcgagaactacgaagcggacgatattatcggaacgcttgccgcccgcgctgagcaggaagggtttgaggtgaaagtcatttccggcgaccgcgatctgacccagctcgcctccccccatgtgacggtggacattacgaaaaaagggattaccgatatcgaaccgtacacgccggaggcggtccgcgaaaaatacggcttaactccggaacaaatcgttgatttgaaaggattgatgggcgacaaatcggacaacattcccggagtgccgggcatcggggaaaagacggcggtcaagctgctcaagcaattcggcacggtcgaaaacgtgcttgcctccattgacgagatcaaaggcgaaaagttgaaagaaacgctgcgccaacaccgggagatggcgctgttaagcaaaaagctcgccgccattcgccgcgacgccccggtcgagctctcgcttgatgacatcgtctatcaaggggaagaccgggagaaagtggtcgctttatttaaagagcttgggtttcaatcgtttttagagaaaatggaatcgccgtcatcagaagaggaaaaaccgcttgccaagatggcatttacgcttgctgaccgcgtgacggaggagatgcttgccgacaaggcggcgcttgtcgttgaagtggtcgaggaaaattatcatgatgcgccgatcgtcggcatcgctgtggtcaacgaacatggacggtttttcctgcgcccggagacggcgcttgccgatccgcagtttgtcgcctggcttggtgatgaaacgaagaaaaaaagcatgtttgactcaaagcgcgcggcagtcgccttgaaatggaaaggaattgagctatgcggcgtttcctttgatttattgctggccgcctatttgcttgatccggcgcaaggtgttgatgatgtggctgccgcagcaaaaatgaagcaatacgaagcggtgcgctcggatgaagcggtgtatggcaaaggggcgaagcgggccgtgccggatgagccagtgctcgccgagcatctcgtccgcaaggcggcggcgatttgggcgctcgaacgtccgtttttggatgagctgcgccgcaacgaacaagatcggttgctcgtcgagctcgagcagccgttgtcttcgattttggcggaaatggaatttgccggagtgaaagtggatacgaagcggctcgaacagatgggcgaagagctcgccgagcagctgcgcacggtcgagcagcgcatttatgagctcgccggccaagaattcaacatcaattcaccgaaacagctcggcgtcattttatttgaaaaactgcagctgcccgtcttgaaaaaaacgaaaaccggctactccacttcggcggatgtgcttgaaaaacttgcgccttatcacgagatcgtggaaaacattttgcattaccgccagcttggcaagttgcagtcgacgtatattgaaggattgctgaaagtcgtgcgacccgatacaaagaaggtgcatacgattttcaatcaggcgttgacgcaaaccggacggctcagctcgacggagccgaacttgcaaaacattccgattcggcttgaggaaggacggaaaatccgccaagcgttcgtgccgtcggagtctgattggctcattttcgctgccgactactcgcaaattgagttgcgcgtcctcgcccatattgcggaagatgacaatttaatggaagcgttccgccgcgatttggatatccatacgaaaacagcgatggacattttccaagtgagcgaggacgaagtgacgcccaacatgcgccgtcaggcgaaggcggtcaactttgggatcgtttacgggatcagtgattacggcttggcgcaaaacttaaatatttcacgcaaagaggccgctgaattcatcgagcgctacttcgaaagcttccctggcgtgaagcggtatatggaaaacattgtgcaagaagcaaaacagaaagggtatgtgacgacgctgctgcatcggcgccgctatttgccggatatcacgagccgcaacttcaacgtcaatagctttgctgaacggatggcgatgaacacgccgattcaagggagcgccgctgacattattaaaaaggcgatgatcgatctgaacgctagactgaaggaagagcggctgcaagcgcgccttttgctacaggtgcatgacgagctcattttggaggcgccgaaagaagagatggagcggctgtgccggctcgttccggaagtgatggagcaagcggtcacacttcgcgtgccgctcaaagtcgattaccattatggctcgacgtggtatgacgcgaaataaaaaggatcc

SEQ ID NO: 2536 - DNA, 2712 bp, Artificial Sequence
  Description of Artificial Sequence: Synthetic DNA sequence of Bacillus caldolyticus EA1 DNA polymerase R808V
atgaaatacctgctgccgaccgctgctgctggtctgctgctcctcgctgcccagccggcgatggccatgggattgaaaaaaaagcttgttttaatcgacggcagcagcgtggcgtaccgcgcctttttcgccttgccgcttttgcataacgacaaaggcatccatacgaacgccgtctacgggtttacgatgatgttgaataaaattttggcggaagaagagccaactcatatgcttgtcgcgtttgacgccgggaaaacgacgttccggcatgaagcgtttcaagagtataaaggtgggcgccagcagacgccaccggagctgtcggagcagtttccgctgttgcgcgagctgctgagggcgtatcgcatccccgcctatgaactcgagaactacgaagcggacgatattatcggaacgcttgccgcccgcgctgagcaggaagggtttgaggtgaaagtcatttccggcgaccgcgatctgacccagctcgcctccccccatgtgacggtggacattacgaaaaaagggattaccgatatcgaaccgtacacgccggaggcggtccgcgaaaaatacggcttaactccggaacaaatcgttgatttgaaaggattgatgggcgacaaatcggacaacattcccggagtgccgggcatcggggaaaagacggcggtcaagctgctcaagcaattcggcacggtcgaaaacgtgcttgcctccattgacgagatcaaaggcgaaaagttgaaagaaacgctgcgccaacaccgggagatggcgctgttaagcaaaaagctcgccgccattcgccgcgacgccccggtcgagctctcgcttgatgacatcgtctatcaaggggaagaccgggagaaagtggtcgctttatttaaagagcttgggtttcaatcgtttttagagaaaatggaatcgccgtcatcagaagaggaaaaaccgcttgccaagatggcatttacgcttgctgaccgcgtgacggaggagatgcttgccgacaaggcggcgcttgtcgttgaagtggtcgaggaaaattatcatgatgcgccgatcgtcggcatcgctgtggtcaacgaacatggacggtttttcctgcgcccggagacggcgcttgccgatccgcagtttgtcgcctggcttggtgatgaaacgaagaaaaaaagcatgtttgactcaaagcgcgcggcagtcgccttgaaatggaaaggaattgagctatgcggcgtttcctttgatttattgctggccgcctatttgcttgatccggcgcaaggtgttgatgatgtggctgccgcagcaaaaatgaagcaatacgaagcggtgcgctcggatgaagcggtgtatggcaaaggggcgaagcgggccgtgccggatgagccagtgctcgccgagcatctcgtccgcaaggcggcggcgatttgggcgctcgaacgtccgtttttggatgagctgcgccgcaacgaacaagatcggttgctcgtcgagctcgagcagccgttgtcttcgattttggcggaaatggaatttgccggagtgaaagtggatacgaagcggctcgaacagatgggcgaagagctcgccgagcagctgcgcacggtcgagcagcgcatttatgagctcgccggccaagaattcaacatcaattcaccgaaacagctcggcgtcattttatttgaaaaactgcagctgcccgtcttgaaaaaaacgaaaaccggctactccacttcggcggatgtgcttgaaaaacttgcgccttatcacgagatcgtggaaaacattttgcattaccgccagcttggcaagttgcagtcgacgtatattgaaggattgctgaaagtcgtgcgacccgatacaaagaaggtgcatacgattttcaatcaggcgttgacgcaaaccggacggctcagctcgacggagccgaacttgcaaaacattccgattcggcttgaggaaggacggaaaatccgccaagcgttcgtgccgtcggagtctgattggctcattttcgctgccgactactcgcaaattgagttgcgcgtcctcgcccatattgcggaagatgacaatttaatggaagcgttccgccgcgatttggatatccatacgaaaacagcgatggacattttccaagtgagcgaggacgaagtgacgcccaacatgcgccgtcaggcgaaggcggtcaactttgggatcgtttacgggatcagtgattacggcttggcgcaaaacttaaatatttcacgcaaagaggccgctgaattcatcgagcgctacttcgaaagcttccctggcgtgaagcggtatatggaaaacattgtgcaagaagcaaaacagaaagggtatgtgacgacgctgctgcatcggcgccgctatttgccggatatcacgagccgcaacttcaacgtcgtcagctttgctgaacggatggcgatgaacacgccgattcaagggagcgccgctgacattattaaaaaggcgatgatcgatctgaacgctagactgaaggaagagcggctgcaagcgcgccttttgctacaggtgcatgacgagctcattttggaggcgccgaaagaagagatggagcggctgtgccggctcgttccggaagtgatggagcaagcggtcacacttcgcgtgccgctcaaagtcgattaccattatggctcgacgtggtatgacgcgaaataaaaaggatcc

SEQ ID NO: 2537 - DNA, 2712 bp, Artificial Sequence
  Description of Artificial Sequence: Synthetic DNA sequence of Bacillus caldolyticus EA1 DNA polymerase S809A
atgaaatacctgctgccgaccgctgctgctggtctgctgctcctcgctgcccagccggcgatggccatgggattgaaaaaaaagcttgttttaatcgacggcagcagcgtggcgtaccgcgcctttttcgccttgccgcttttgcataacgacaaaggcatccatacgaacgccgtctacgggtttacgatgatgttgaataaaattttggcggaagaagagccaactcatatgcttgtcgcgtttgacgccgggaaaacgacgttccggcatgaagcgtttcaagagtataaaggtgggcgccagcagacgccaccggagctgtcggagcagtttccgctgttgcgcgagctgctgagggcgtatcgcatccccgcctatgaactcgagaactacgaagcggacgatattatcggaacgcttgccgcccgcgctgagcaggaagggtttgaggtgaaagtcatttccggcgaccgcgatctgacccagctcgcctccccccatgtgacggtggacattacgaaaaaagggattaccgatatcgaaccgtacacgccggaggcggtccgcgaaaaatacggcttaactccggaacaaatcgttgatttgaaaggattgatgggcgacaaatcggacaacattcccggagtgccgggcatcggggaaaagacggcggtcaagctgctcaagcaattcggcacggtcgaaaacgtgcttgcctccattgacgagatcaaaggcgaaaagttgaaagaaacgctgcgccaacaccgggagatggcgctgttaagcaaaaagctcgccgccattcgccgcgacgccccggtcgagctctcgcttgatgacatcgtctatcaaggggaagaccgggagaaagtggtcgctttatttaaagagcttgggtttcaatcgtttttagagaaaatggaatcgccgtcatcagaagaggaaaaaccgcttgccaagatggcatttacgcttgctgaccgcgtgacggaggagatgcttgccgacaaggcggcgcttgtcgttgaagtggtcgaggaaaattatcatgatgcgccgatcgtcggcatcgctgtggtcaacgaacatggacggtttttcctgcgcccggagacggcgcttgccgatccgcagtttgtcgcctggcttggtgatgaaacgaagaaaaaaagcatgtttgactcaaagcgcgcggcagtcgccttgaaatggaaaggaattgagctatgcggcgtttcctttgatttattgctggccgcctatttgcttgatccggcgcaaggtgttgatgatgtggctgccgcagcaaaaatgaagcaatacgaagcggtgcgctcggatgaagcggtgtatggcaaaggggcgaagcgggccgtgccggatgagccagtgctcgccgagcatctcgtccgcaaggcggcggcgatttgggcgctcgaacgtccgtttttggatgagctgcgccgcaacgaacaagatcggttgctcgtcgagctcgagcagccgttgtcttcgattttggcggaaatggaatttgccggagtgaaagtggatacgaagcggctcgaacagatgggcgaagagctcgccgagcagctgcgcacggtcgagcagcgcatttatgagctcgccggccaagaattcaacatcaattcaccgaaacagctcggcgtcattttatttgaaaaactgcagctgcccgtcttgaaaaaaacgaaaaccggctactccacttcggcggatgtgcttgaaaaacttgcgccttatcacgagatcgtggaaaacattttgcattaccgccagcttggcaagttgcagtcgacgtatattgaaggattgctgaaagtcgtgcgacccgatacaaagaaggtgcatacgattttcaatcaggcgttgacgcaaaccggacggctcagctcgacggagccgaacttgcaaaacattccgattcggcttgaggaaggacggaaaatccgccaagcgttcgtgccgtcggagtctgattggctcattttcgctgccgactactcgcaaattgagttgcgcgtcctcgcccatattgcggaagatgacaatttaatggaagcgttccgccgcgatttggatatccatacgaaaacagcgatggacattttccaagtgagcgaggacgaagtgacgcccaacatgcgccgtcaggcgaaggcggtcaactttgggatcgtttacgggatcagtgattacggcttggcgcaaaacttaaatatttcacgcaaagaggccgctgaattcatcgagcgctacttcgaaagcttccctggcgtgaagcggtatatggaaaacattgtgcaagaagcaaaacagaaagggtatgtgacgacgctgctgcatcggcgccgctatttgccggatatcacgagccgcaacttcaacgtccgcgcttttgctgaacggatggcgatgaacacgccgattcaagggagcgccgctgacattattaaaaaggcgatgatcgatctgaacgctagactgaaggaagagcggctgcaagcgcgccttttgctacaggtgcatgacgagctcattttggaggcgccgaaagaagagatggagcggctgtgccggctcgttccggaagtgatggagcaagcggtcacacttcgcgtgccgctcaaagtcgattaccattatggctcgacgtggtatgacgcgaaataaaaaggatcc

SEQ ID NO: 2538 - DNA, 2712 bp, Artificial Sequence
  Description of Artificial Sequence: Synthetic DNA sequence of Bacillus caldolyticus EA1 DNA polymerase S809R
atgaaatacctgctgccgaccgctgctgctggtctgctgctcctcgctgcccagccggcgatggccatgggattgaaaaaaaagcttgttttaatcgacggcagcagcgtggcgtaccgcgcctttttcgccttgccgcttttgcataacgacaaaggcatccatacgaacgccgtctacgggtttacgatgatgttgaataaaattttggcggaagaagagccaactcatatgcttgtcgcgtttgacgccgggaaaacgacgttccggcatgaagcgtttcaagagtataaaggtgggcgccagcagacgccaccggagctgtcggagcagtttccgctgttgcgcgagctgctgagggcgtatcgcatccccgcctatgaactcgagaactacgaagcggacgatattatcggaacgcttgccgcccgcgctgagcaggaagggtttgaggtgaaagtcatttccggcgaccgcgatctgacccagctcgcctccccccatgtgacggtggacattacgaaaaaagggattaccgatatcgaaccgtacacgccggaggcggtccgcgaaaaatacggcttaactccggaacaaatcgttgatttgaaaggattgatgggcgacaaatcggacaacattcccggagtgccgggcatcggggaaaagacggcggtcaagctgctcaagcaattcggcacggtcgaaaacgtgcttgcctccattgacgagatcaaaggcgaaaagttgaaagaaacgctgcgccaacaccgggagatggcgctgttaagcaaaaagctcgccgccattcgccgcgacgccccggtcgagctctcgcttgatgacatcgtctatcaaggggaagaccgggagaaagtggtcgctttatttaaagagcttgggtttcaatcgtttttagagaaaatggaatcgccgtcatcagaagaggaaaaaccgcttgccaagatggcatttacgcttgctgaccgcgtgacggaggagatgcttgccgacaaggcggcgcttgtcgttgaagtggtcgaggaaaattatcatgatgcgccgatcgtcggcatcgctgtggtcaacgaacatggacggtttttcctgcgcccggagacggcgcttgccgatccgcagtttgtcgcctggcttggtgatgaaacgaagaaaaaaagcatgtttgactcaaagcgcgcggcagtcgccttgaaatggaaaggaattgagctatgcggcgtttcctttgatttattgctggccgcctatttgcttgatccggcgcaaggtgttgatgatgtggctgccgcagcaaaaatgaagcaatacgaagcggtgcgctcggatgaagcggtgtatggcaaaggggcgaagcgggccgtgccggatgagccagtgctcgccgagcatctcgtccgcaaggcggcggcgatttgggcgctcgaacgtccgtttttggatgagctgcgccgcaacgaacaagatcggttgctcgtcgagctcgagcagccgttgtcttcgattttggcggaaatggaatttgccggagtgaaagtggatacgaagcggctcgaacagatgggcgaagagctcgccgagcagctgcgcacggtcgagcagcgcatttatgagctcgccggccaagaattcaacatcaattcaccgaaacagctcggcgtcattttatttgaaaaactgcagctgcccgtcttgaaaaaaacgaaaaccggctactccacttcggcggatgtgcttgaaaaacttgcgccttatcacgagatcgtggaaaacattttgcattaccgccagcttggcaagttgcagtcgacgtatattgaaggattgctgaaagtcgtgcgacccgatacaaagaaggtgcatacgattttcaatcaggcgttgacgcaaaccggacggctcagctcgacggagccgaacttgcaaaacattccgattcggcttgaggaaggacggaaaatccgccaagcgttcgtgccgtcggagtctgattggctcattttcgctgccgactactcgcaaattgagttgcgcgtcctcgcccatattgcggaagatgacaatttaatggaagcgttccgccgcgatttggatatccatacgaaaacagcgatggacattttccaagtgagcgaggacgaagtgacgcccaacatgcgccgtcaggcgaaggcggtcaactttgggatcgtttacgggatcagtgattacggcttggcgcaaaacttaaatatttcacgcaaagaggccgctgaattcatcgagcgctacttcgaaagcttccctggcgtgaagcggtatatggaaaacattgtgcaagaagcaaaacagaaagggtatgtgacgacgctgctgcatcggcgccgctatttgccggatatcacgagccgcaacttcaacgtccgccgatttgctgaacggatggcgatgaacacgccgattcaagggagcgccgctgacattattaaaaaggcgatgatcgatctgaacgctagactgaaggaagagcggctgcaagcgcgccttttgctacaggtgcatgacgagctcattttggaggcgccgaaagaagagatggagcggctgtgccggctcgttccggaagtgatggagcaagcggtcacacttcgcgtgccgctcaaagtcgattaccattatggctcgacgtggtatgacgcgaaataaaaaggatcc

SEQ ID NO: 2539 - DNA, 2712 bp, Artificial Sequence
  Description of Artificial Sequence: Synthetic DNA sequence of Bacillus caldolyticus EA1 DNA polymerase S809C
atgaaatacctgctgccgaccgctgctgctggtctgctgctcctcgctgcccagccggcgatggccatgggattgaaaaaaaagcttgttttaatcgacggcagcagcgtggcgtaccgcgcctttttcgccttgccgcttttgcataacgacaaaggcatccatacgaacgccgtctacgggtttacgatgatgttgaataaaattttggcggaagaagagccaactcatatgcttgtcgcgtttgacgccgggaaaacgacgttccggcatgaagcgtttcaagagtataaaggtgggcgccagcagacgccaccggagctgtcggagcagtttccgctgttgcgcgagctgctgagggcgtatcgcatccccgcctatgaactcgagaactacgaagcggacgatattatcggaacgcttgccgcccgcgctgagcaggaagggtttgaggtgaaagtcatttccggcgaccgcgatctgacccagctcgcctccccccatgtgacggtggacattacgaaaaaagggattaccgatatcgaaccgtacacgccggaggcggtccgcgaaaaatacggcttaactccggaacaaatcgttgatttgaaaggattgatgggcgacaaatcggacaacattcccggagtgccgggcatcggggaaaagacggcggtcaagctgctcaagcaattcggcacggtcgaaaacgtgcttgcctccattgacgagatcaaaggcgaaaagttgaaagaaacgctgcgccaacaccgggagatggcgctgttaagcaaaaagctcgccgccattcgccgcgacgccccggtcgagctctcgcttgatgacatcgtctatcaaggggaagaccgggagaaagtggtcgctttatttaaagagcttgggtttcaatcgtttttagagaaaatggaatcgccgtcatcagaagaggaaaaaccgcttgccaagatggcatttacgcttgctgaccgcgtgacggaggagatgcttgccgacaaggcggcgcttgtcgttgaagtggtcgaggaaaattatcatgatgcgccgatcgtcggcatcgctgtggtcaacgaacatggacggtttttcctgcgcccggagacggcgcttgccgatccgcagtttgtcgcctggcttggtgatgaaacgaagaaaaaaagcatgtttgactcaaagcgcgcggcagtcgccttgaaatggaaaggaattgagctatgcggcgtttcctttgatttattgctggccgcctatttgcttgatccggcgcaaggtgttgatgatgtggctgccgcagcaaaaatgaagcaatacgaagcggtgcgctcggatgaagcggtgtatggcaaaggggcgaagcgggccgtgccggatgagccagtgctcgccgagcatctcgtccgcaaggcggcggcgatttgggcgctcgaacgtccgtttttggatgagctgcgccgcaacgaacaagatcggttgctcgtcgagctcgagcagccgttgtcttcgattttggcggaaatggaatttgccggagtgaaagtggatacgaagcggctcgaacagatgggcgaagagctcgccgagcagctgcgcacggtcgagcagcgcatttatgagctcgccggccaagaattcaacatcaattcaccgaaacagctcggcgtcattttatttgaaaaactgcagctgcccgtcttgaaaaaaacgaaaaccggctactccacttcggcggatgtgcttgaaaaacttgcgccttatcacgagatcgtggaaaacattttgcattaccgccagcttggcaagttgcagtcgacgtatattgaaggattgctgaaagtcgtgcgacccgatacaaagaaggtgcatacgattttcaatcaggcgttgacgcaaaccggacggctcagctcgacggagccgaacttgcaaaacattccgattcggcttgaggaaggacggaaaatccgccaagcgttcgtgccgtcggagtctgattggctcattttcgctgccgactactcgcaaattgagttgcgcgtcctcgcccatattgcggaagatgacaatttaatggaagcgttccgccgcgatttggatatccatacgaaaacagcgatggacattttccaagtgagcgaggacgaagtgacgcccaacatgcgccgtcaggcgaaggcggtcaactttgggatcgtttacgggatcagtgattacggcttggcgcaaaacttaaatatttcacgcaaagaggccgctgaattcatcgagcgctacttcgaaagcttccctggcgtgaagcggtatatggaaaacattgtgcaagaagcaaaacagaaagggtatgtgacgacgctgctgcatcggcgccgctatttgccggatatcacgagccgcaacttcaacgtccgctgttttgctgaacggatggcgatgaacacgccgattcaagggagcgccgctgacattattaaaaaggcgatgatcgatctgaacgctagactgaaggaagagcggctgcaagcgcgccttttgctacaggtgcatgacgagctcattttggaggcgccgaaagaagagatggagcggctgtgccggctcgttccggaagtgatggagcaagcggtcacacttcgcgtgccgctcaaagtcgattaccattatggctcgacgtggtatgacgcgaaataaaaaggatcc

SEQ ID NO: 2540 - DNA, 2712 bp, Artificial Sequence
  Description of Artificial Sequence: Synthetic DNA sequence of Bacillus caldolyticus EA1 DNA polymerase S809G
atgaaatacctgctgccgaccgctgctgctggtctgctgctcctcgctgcccagccggcgatggccatgggattgaaaaaaaagcttgttttaatcgacggcagcagcgtggcgtaccgcgcctttttcgccttgccgcttttgcataacgacaaaggcatccatacgaacgccgtctacgggtttacgatgatgttgaataaaattttggcggaagaagagccaactcatatgcttgtcgcgtttgacgccgggaaaacgacgttccggcatgaagcgtttcaagagtataaaggtgggcgccagcagacgccaccggagctgtcggagcagtttccgctgttgcgcgagctgctgagggcgtatcgcatccccgcctatgaactcgagaactacgaagcggacgatattatcggaacgcttgccgcccgcgctgagcaggaagggtttgaggtgaaagtcatttccggcgaccgcgatctgacccagctcgcctccccccatgtgacggtggacattacgaaaaaagggattaccgatatcgaaccgtacacgccggaggcggtccgcgaaaaatacggcttaactccggaacaaatcgttgatttgaaaggattgatgggcgacaaatcggacaacattcccggagtgccgggcatcggggaaaagacggcggtcaagctgctcaagcaattcggcacggtcgaaaacgtgcttgcctccattgacgagatcaaaggcgaaaagttgaaagaaacgctgcgccaacaccgggagatggcgctgttaagcaaaaagctcgccgccattcgccgcgacgccccggtcgagctctcgcttgatgacatcgtctatcaaggggaagaccgggagaaagtggtcgctttatttaaagagcttgggtttcaatcgtttttagagaaaatggaatcgccgtcatcagaagaggaaaaaccgcttgccaagatggcatttacgcttgctgaccgcgtgacggaggagatgcttgccgacaaggcggcgcttgtcgttgaagtggtcgaggaaaattatcatgatgcgccgatcgtcggcatcgctgtggtcaacgaacatggacggtttttcctgcgcccggagacggcgcttgccgatccgcagtttgtcgcctggcttggtgatgaaacgaagaaaaaaagcatgtttgactcaaagcgcgcggcagtcgccttgaaatggaaaggaattgagctatgcggcgtttcctttgatttattgctggccgcctatttgcttgatccggcgcaaggtgttgatgatgtggctgccgcagcaaaaatgaagcaatacgaagcggtgcgctcggatgaagcggtgtatggcaaaggggcgaagcgggccgtgccggatgagccagtgctcgccgagcatctcgtccgcaaggcggcggcgatttgggcgctcgaacgtccgtttttggatgagctgcgccgcaacgaacaagatcggttgctcgtcgagctcgagcagccgttgtcttcgattttggcggaaatggaatttgccggagtgaaagtggatacgaagcggctcgaacagatgggcgaagagctcgccgagcagctgcgcacggtcgagcagcgcatttatgagctcgccggccaagaattcaacatcaattcaccgaaacagctcggcgtcattttatttgaaaaactgcagctgcccgtcttgaaaaaaacgaaaaccggctactccacttcggcggatgtgcttgaaaaacttgcgccttatcacgagatcgtggaaaacattttgcattaccgccagcttggcaagttgcagtcgacgtatattgaaggattgctgaaagtcgtgcgacccgatacaaagaaggtgcatacgattttcaatcaggcgttgacgcaaaccggacggctcagctcgacggagccgaacttgcaaaacattccgattcggcttgaggaaggacggaaaatccgccaagcgttcgtgccgtcggagtctgattggctcattttcgctgccgactactcgcaaattgagttgcgcgtcctcgcccatattgcggaagatgacaatttaatggaagcgttccgccgcgatttggatatccatacgaaaacagcgatggacattttccaagtgagcgaggacgaagtgacgcccaacatgcgccgtcaggcgaaggcggtcaactttgggatcgtttacgggatcagtgattacggcttggcgcaaaacttaaatatttcacgcaaagaggccgctgaattcatcgagcgctacttcgaaagcttccctggcgtgaagcggtatatggaaaacattgtgcaagaagcaaaacagaaagggtatgtgacgacgctgctgcatcggcgccgctatttgccggatatcacgagccgcaacttcaacgtccgcggttttgctgaacggatggcgatgaacacgccgattcaagggagcgccgctgacattattaaaaaggcgatgatcgatctgaacgctagactgaaggaagagcggctgcaagcgcgccttttgctacaggtgcatgacgagctcattttggaggcgccgaaagaagagatggagcggctgtgccggctcgttccggaagtgatggagcaagcggtcacacttcgcgtgccgctcaaagtcgattaccattatggctcgacgtggtatgacgcgaaataaaaaggatcc

SEQ ID NO: 2541 - DNA, 2712 bp, Artificial Sequence
  Description of Artificial Sequence: Synthetic DNA sequence of Bacillus caldolyticus EA1 DNA polymerase S809Q
atgaaatacctgctgccgaccgctgctgctggtctgctgctcctcgctgcccagccggcgatggccatgggattgaaaaaaaagcttgttttaatcgacggcagcagcgtggcgtaccgcgcctttttcgccttgccgcttttgcataacgacaaaggcatccatacgaacgccgtctacgggtttacgatgatgttgaataaaattttggcggaagaagagccaactcatatgcttgtcgcgtttgacgccgggaaaacgacgttccggcatgaagcgtttcaagagtataaaggtgggcgccagcagacgccaccggagctgtcggagcagtttccgctgttgcgcgagctgctgagggcgtatcgcatccccgcctatgaactcgagaactacgaagcggacgatattatcggaacgcttgccgcccgcgctgagcaggaagggtttgaggtgaaagtcatttccggcgaccgcgatctgacccagctcgcctccccccatgtgacggtggacattacgaaaaaagggattaccgatatcgaaccgtacacgccggaggcggtccgcgaaaaatacggcttaactccggaacaaatcgttgatttgaaaggattgatgggcgacaaatcggacaacattcccggagtgccgggcatcggggaaaagacggcggtcaagctgctcaagcaattcggcacggtcgaaaacgtgcttgcctccattgacgagatcaaaggcgaaaagttgaaagaaacgctgcgccaacaccgggagatggcgctgttaagcaaaaagctcgccgccattcgccgcgacgccccggtcgagctctcgcttgatgacatcgtctatcaaggggaagaccgggagaaagtggtcgctttatttaaagagcttgggtttcaatcgtttttagagaaaatggaatcgccgtcatcagaagaggaaaaaccgcttgccaagatggcatttacgcttgctgaccgcgtgacggaggagatgcttgccgacaaggcggcgcttgtcgttgaagtggtcgaggaaaattatcatgatgcgccgatcgtcggcatcgctgtggtcaacgaacatggacggtttttcctgcgcccggagacggcgcttgccgatccgcagtttgtcgcctggcttggtgatgaaacgaagaaaaaaagcatgtttgactcaaagcgcgcggcagtcgccttgaaatggaaaggaattgagctatgcggcgtttcctttgatttattgctggccgcctatttgcttgatccggcgcaaggtgttgatgatgtggctgccgcagcaaaaatgaagcaatacgaagcggtgcgctcggatgaagcggtgtatggcaaaggggcgaagcgggccgtgccggatgagccagtgctcgccgagcatctcgtccgcaaggcggcggcgatttgggcgctcgaacgtccgtttttggatgagctgcgccgcaacgaacaagatcggttgctcgtcgagctcgagcagccgttgtcttcgattttggcggaaatggaatttgccggagtgaaagtggatacgaagcggctcgaacagatgggcgaagagctcgccgagcagctgcgcacggtcgagcagcgcatttatgagctcgccggccaagaattcaacatcaattcaccgaaacagctcggcgtcattttatttgaaaaactgcagctgcccgtcttgaaaaaaacgaaaaccggctactccacttcggcggatgtgcttgaaaaacttgcgccttatcacgagatcgtggaaaacattttgcattaccgccagcttggcaagttgcagtcgacgtatattgaaggattgctgaaagtcgtgcgacccgatacaaagaaggtgcatacgattttcaatcaggcgttgacgcaaaccggacggctcagctcgacggagccgaacttgcaaaacattccgattcggcttgaggaaggacggaaaatccgccaagcgttcgtgccgtcggagtctgattggctcattttcgctgccgactactcgcaaattgagttgcgcgtcctcgcccatattgcggaagatgacaatttaatggaagcgttccgccgcgatttggatatccatacgaaaacagcgatggacattttccaagtgagcgaggacgaagtgacgcccaacatgcgccgtcaggcgaaggcggtcaactttgggatcgtttacgggatcagtgattacggcttggcgcaaaacttaaatatttcacgcaaagaggccgctgaattcatcgagcgctacttcgaaagcttccctggcgtgaagcggtatatggaaaacattgtgcaagaagcaaaacagaaagggtatgtgacgacgctgctgcatcggcgccgctatttgccggatatcacgagccgcaacttcaacgtccgccaatttgctgaacggatggcgatgaacacgccgattcaagggagcgccgctgacattattaaaaaggcgatgatcgatctgaacgctagactgaaggaagagcggctgcaagcgcgccttttgctacaggtgcatgacgagctcattttggaggcgccgaaagaagagatggagcggctgtgccggctcgttccggaagtgatggagcaagcggtcacacttcgcgtgccgctcaaagtcgattaccattatggctcgacgtggtatgacgcgaaataaaaaggatcc

SEQ ID NO: 2542 - DNA, 2712 bp, Artificial Sequence
  Description of Artificial Sequence: Synthetic DNA sequence of Bacillus caldolyticus EA1 DNA polymerase S809H
atgaaatacctgctgccgaccgctgctgctggtctgctgctcctcgctgcccagccggcgatggccatgggattgaaaaaaaagcttgttttaatcgacggcagcagcgtggcgtaccgcgcctttttcgccttgccgcttttgcataacgacaaaggcatccatacgaacgccgtctacgggtttacgatgatgttgaataaaattttggcggaagaagagccaactcatatgcttgtcgcgtttgacgccgggaaaacgacgttccggcatgaagcgtttcaagagtataaaggtgggcgccagcagacgccaccggagctgtcggagcagtttccgctgttgcgcgagctgctgagggcgtatcgcatccccgcctatgaactcgagaactacgaagcggacgatattatcggaacgcttgccgcccgcgctgagcaggaagggtttgaggtgaaagtcatttccggcgaccgcgatctgacccagctcgcctccccccatgtgacggtggacattacgaaaaaagggattaccgatatcgaaccgtacacgccggaggcggtccgcgaaaaatacggcttaactccggaacaaatcgttgatttgaaaggattgatgggcgacaaatcggacaacattcccggagtgccgggcatcggggaaaagacggcggtcaagctgctcaagcaattcggcacggtcgaaaacgtgcttgcctccattgacgagatcaaaggcgaaaagttgaaagaaacgctgcgccaacaccgggagatggcgctgttaagcaaaaagctcgccgccattcgccgcgacgccccggtcgagctctcgcttgatgacatcgtctatcaaggggaagaccgggagaaagtggtcgctttatttaaagagcttgggtttcaatcgtttttagagaaaatggaatcgccgtcatcagaagaggaaaaaccgcttgccaagatggcatttacgcttgctgaccgcgtgacggaggagatgcttgccgacaaggcggcgcttgtcgttgaagtggtcgaggaaaattatcatgatgcgccgatcgtcggcatcgctgtggtcaacgaacatggacggtttttcctgcgcccggagacggcgcttgccgatccgcagtttgtcgcctggcttggtgatgaaacgaagaaaaaaagcatgtttgactcaaagcgcgcggcagtcgccttgaaatggaaaggaattgagctatgcggcgtttcctttgatttattgctggccgcctatttgcttgatccggcgcaaggtgttgatgatgtggctgccgcagcaaaaatgaagcaatacgaagcggtgcgctcggatgaagcggtgtatggcaaaggggcgaagcgggccgtgccggatgagccagtgctcgccgagcatctcgtccgcaaggcggcggcgatttgggcgctcgaacgtccgtttttggatgagctgcgccgcaacgaacaagatcggttgctcgtcgagctcgagcagccgttgtcttcgattttggcggaaatggaatttgccggagtgaaagtggatacgaagcggctcgaacagatgggcgaagagctcgccgagcagctgcgcacggtcgagcagcgcatttatgagctcgccggccaagaattcaacatcaattcaccgaaacagctcggcgtcattttatttgaaaaactgcagctgcccgtcttgaaaaaaacgaaaaccggctactccacttcggcggatgtgcttgaaaaacttgcgccttatcacgagatcgtggaaaacattttgcattaccgccagcttggcaagttgcagtcgacgtatattgaaggattgctgaaagtcgtgcgacccgatacaaagaaggtgcatacgattttcaatcaggcgttgacgcaaaccggacggctcagctcgacggagccgaacttgcaaaacattccgattcggcttgaggaaggacggaaaatccgccaagcgttcgtgccgtcggagtctgattggctcattttcgctgccgactactcgcaaattgagttgcgcgtcctcgcccatattgcggaagatgacaatttaatggaagcgttccgccgcgatttggatatccatacgaaaacagcgatggacattttccaagtgagcgaggacgaagtgacgcccaacatgcgccgtcaggcgaaggcggtcaactttgggatcgtttacgggatcagtgattacggcttggcgcaaaacttaaatatttcacgcaaagaggccgctgaattcatcgagcgctacttcgaaagcttccctggcgtgaagcggtatatggaaaacattgtgcaagaagcaaaacagaaagggtatgtgacgacgctgctgcatcggcgccgctatttgccggatatcacgagccgcaacttcaacgtccgccattttgctgaacggatggcgatgaacacgccgattcaagggagcgccgctgacattattaaaaaggcgatgatcgatctgaacgctagactgaaggaagagcggctgcaagcgcgccttttgctacaggtgcatgacgagctcattttggaggcgccgaaagaagagatggagcggctgtgccggctcgttccggaagtgatggagcaagcggtcacacttcgcgtgccgctcaaagtcgattaccattatggctcgacgtggtatgacgcgaaataaaaaggatcc

SEQ ID NO: 2543 - DNA, 2712 bp, Artificial Sequence
  Description of Artificial Sequence: Synthetic DNA sequence of Bacillus caldolyticus EA1 DNA polymerase S809I
atgaaatacctgctgccgaccgctgctgctggtctgctgctcctcgctgcccagccggcgatggccatgggattgaaaaaaaagcttgttttaatcgacggcagcagcgtggcgtaccgcgcctttttcgccttgccgcttttgcataacgacaaaggcatccatacgaacgccgtctacgggtttacgatgatgttgaataaaattttggcggaagaagagccaactcatatgcttgtcgcgtttgacgccgggaaaacgacgttccggcatgaagcgtttcaagagtataaaggtgggcgccagcagacgccaccggagctgtcggagcagtttccgctgttgcgcgagctgctgagggcgtatcgcatccccgcctatgaactcgagaactacgaagcggacgatattatcggaacgcttgccgcccgcgctgagcaggaagggtttgaggtgaaagtcatttccggcgaccgcgatctgacccagctcgcctccccccatgtgacggtggacattacgaaaaaagggattaccgatatcgaaccgtacacgccggaggcggtccgcgaaaaatacggcttaactccggaacaaatcgttgatttgaaaggattgatgggcgacaaatcggacaacattcccggagtgccgggcatcggggaaaagacggcggtcaagctgctcaagcaattcggcacggtcgaaaacgtgcttgcctccattgacgagatcaaaggcgaaaagttgaaagaaacgctgcgccaacaccgggagatggcgctgttaagcaaaaagctcgccgccattcgccgcgacgccccggtcgagctctcgcttgatgacatcgtctatcaaggggaagaccgggagaaagtggtcgctttatttaaagagcttgggtttcaatcgtttttagagaaaatggaatcgccgtcatcagaagaggaaaaaccgcttgccaagatggcatttacgcttgctgaccgcgtgacggaggagatgcttgccgacaaggcggcgcttgtcgttgaagtggtcgaggaaaattatcatgatgcgccgatcgtcggcatcgctgtggtcaacgaacatggacggtttttcctgcgcccggagacggcgcttgccgatccgcagtttgtcgcctggcttggtgatgaaacgaagaaaaaaagcatgtttgactcaaagcgcgcggcagtcgccttgaaatggaaaggaattgagctatgcggcgtttcctttgatttattgctggccgcctatttgcttgatccggcgcaaggtgttgatgatgtggctgccgcagcaaaaatgaagcaatacgaagcggtgcgctcggatgaagcggtgtatggcaaaggggcgaagcgggccgtgccggatgagccagtgctcgccgagcatctcgtccgcaaggcggcggcgatttgggcgctcgaacgtccgtttttggatgagctgcgccgcaacgaacaagatcggttgctcgtcgagctcgagcagccgttgtcttcgattttggcggaaatggaatttgccggagtgaaagtggatacgaagcggctcgaacagatgggcgaagagctcgccgagcagctgcgcacggtcgagcagcgcatttatgagctcgccggccaagaattcaacatcaattcaccgaaacagctcggcgtcattttatttgaaaaactgcagctgcccgtcttgaaaaaaacgaaaaccggctactccacttcggcggatgtgcttgaaaaacttgcgccttatcacgagatcgtggaaaacattttgcattaccgccagcttggcaagttgcagtcgacgtatattgaaggattgctgaaagtcgtgcgacccgatacaaagaaggtgcatacgattttcaatcaggcgttgacgcaaaccggacggctcagctcgacggagccgaacttgcaaaacattccgattcggcttgaggaaggacggaaaatccgccaagcgttcgtgccgtcggagtctgattggctcattttcgctgccgactactcgcaaattgagttgcgcgtcctcgcccatattgcggaagatgacaatttaatggaagcgttccgccgcgatttggatatccatacgaaaacagcgatggacattttccaagtgagcgaggacgaagtgacgcccaacatgcgccgtcaggcgaaggcggtcaactttgggatcgtttacgggatcagtgattacggcttggcgcaaaacttaaatatttcacgcaaagaggccgctgaattcatcgagcgctacttcgaaagcttccctggcgtgaagcggtatatggaaaacattgtgcaagaagcaaaacagaaagggtatgtgacgacgctgctgcatcggcgccgctatttgccggatatcacgagccgcaacttcaacgtccgcatttttgctgaacggatggcgatgaacacgccgattcaagggagcgccgctgacattattaaaaaggcgatgatcgatctgaacgctagactgaaggaagagcggctgcaagcgcgccttttgctacaggtgcatgacgagctcattttggaggcgccgaaagaagagatggagcggctgtgccggctcgttccggaagtgatggagcaagcggtcacacttcgcgtgccgctcaaagtcgattaccattatggctcgacgtggtatgacgcgaaataaaaaggatcc

SEQ ID NO: 2544 - DNA, 2712 bp, Artificial Sequence
  Description of Artificial Sequence: Synthetic DNA sequence of Bacillus caldolyticus EA1 DNA polymerase S809L
atgaaatacctgctgccgaccgctgctgctggtctgctgctcctcgctgcccagccggcgatggccatgggattgaaaaaaaagcttgttttaatcgacggcagcagcgtggcgtaccgcgcctttttcgccttgccgcttttgcataacgacaaaggcatccatacgaacgccgtctacgggtttacgatgatgttgaataaaattttggcggaagaagagccaactcatatgcttgtcgcgtttgacgccgggaaaacgacgttccggcatgaagcgtttcaagagtataaaggtgggcgccagcagacgccaccggagctgtcggagcagtttccgctgttgcgcgagctgctgagggcgtatcgcatccccgcctatgaactcgagaactacgaagcggacgatattatcggaacgcttgccgcccgcgctgagcaggaagggtttgaggtgaaagtcatttccggcgaccgcgatctgacccagctcgcctccccccatgtgacggtggacattacgaaaaaagggattaccgatatcgaaccgtacacgccggaggcggtccgcgaaaaatacggcttaactccggaacaaatcgttgatttgaaaggattgatgggcgacaaatcggacaacattcccggagtgccgggcatcggggaaaagacggcggtcaagctgctcaagcaattcggcacggtcgaaaacgtgcttgcctccattgacgagatcaaaggcgaaaagttgaaagaaacgctgcgccaacaccgggagatggcgctgttaagcaaaaagctcgccgccattcgccgcgacgccccggtcgagctctcgcttgatgacatcgtctatcaaggggaagaccgggagaaagtggtcgctttatttaaagagcttgggtttcaatcgtttttagagaaaatggaatcgccgtcatcagaagaggaaaaaccgcttgccaagatggcatttacgcttgctgaccgcgtgacggaggagatgcttgccgacaaggcggcgcttgtcgttgaagtggtcgaggaaaattatcatgatgcgccgatcgtcggcatcgctgtggtcaacgaacatggacggtttttcctgcgcccggagacggcgcttgccgatccgcagtttgtcgcctggcttggtgatgaaacgaagaaaaaaagcatgtttgactcaaagcgcgcggcagtcgccttgaaatggaaaggaattgagctatgcggcgtttcctttgatttattgctggccgcctatttgcttgatccggcgcaaggtgttgatgatgtggctgccgcagcaaaaatgaagcaatacgaagcggtgcgctcggatgaagcggtgtatggcaaaggggcgaagcgggccgtgccggatgagccagtgctcgccgagcatctcgtccgcaaggcggcggcgatttgggcgctcgaacgtccgtttttggatgagctgcgccgcaacgaacaagatcggttgctcgtcgagctcgagcagccgttgtcttcgattttggcggaaatggaatttgccggagtgaaagtggatacgaagcggctcgaacagatgggcgaagagctcgccgagcagctgcgcacggtcgagcagcgcatttatgagctcgccggccaagaattcaacatcaattcaccgaaacagctcggcgtcattttatttgaaaaactgcagctgcccgtcttgaaaaaaacgaaaaccggctactccacttcggcggatgtgcttgaaaaacttgcgccttatcacgagatcgtggaaaacattttgcattaccgccagcttggcaagttgcagtcgacgtatattgaaggattgctgaaagtcgtgcgacccgatacaaagaaggtgcatacgattttcaatcaggcgttgacgcaaaccggacggctcagctcgacggagccgaacttgcaaaacattccgattcggcttgaggaaggacggaaaatccgccaagcgttcgtgccgtcggagtctgattggctcattttcgctgccgactactcgcaaattgagttgcgcgtcctcgcccatattgcggaagatgacaatttaatggaagcgttccgccgcgatttggatatccatacgaaaacagcgatggacattttccaagtgagcgaggacgaagtgacgcccaacatgcgccgtcaggcgaaggcggtcaactttgggatcgtttacgggatcagtgattacggcttggcgcaaaacttaaatatttcacgcaaagaggccgctgaattcatcgagcgctacttcgaaagcttccctggcgtgaagcggtatatggaaaacattgtgcaagaagcaaaacagaaagggtatgtgacgacgctgctgcatcggcgccgctatttgccggatatcacgagccgcaacttcaacgtccgcttatttgctgaacggatggcgatgaacacgccgattcaagggagcgccgctgacattattaaaaaggcgatgatcgatctgaacgctagactgaaggaagagcggctgcaagcgcgccttttgctacaggtgcatgacgagctcattttggaggcgccgaaagaagagatggagcggctgtgccggctcgttccggaagtgatggagcaagcggtcacacttcgcgtgccgctcaaagtcgattaccattatggctcgacgtggtatgacgcgaaataaaaaggatcc

SEQ ID NO: 2545 - DNA, 2712 bp, Artificial Sequence
  Description of Artificial Sequence: Synthetic DNA sequence of Bacillus caldolyticus EA1 DNA polymerase S809K
atgaaatacctgctgccgaccgctgctgctggtctgctgctcctcgctgcccagccggcgatggccatgggattgaaaaaaaagcttgttttaatcgacggcagcagcgtggcgtaccgcgcctttttcgccttgccgcttttgcataacgacaaaggcatccatacgaacgccgtctacgggtttacgatgatgttgaataaaattttggcggaagaagagccaactcatatgcttgtcgcgtttgacgccgggaaaacgacgttccggcatgaagcgtttcaagagtataaaggtgggcgccagcagacgccaccggagctgtcggagcagtttccgctgttgcgcgagctgctgagggcgtatcgcatccccgcctatgaactcgagaactacgaagcggacgatattatcggaacgcttgccgcccgcgctgagcaggaagggtttgaggtgaaagtcatttccggcgaccgcgatctgacccagctcgcctccccccatgtgacggtggacattacgaaaaaagggattaccgatatcgaaccgtacacgccggaggcggtccgcgaaaaatacggcttaactccggaacaaatcgttgatttgaaaggattgatgggcgacaaatcggacaacattcccggagtgccgggcatcggggaaaagacggcggtcaagctgctcaagcaattcggcacggtcgaaaacgtgcttgcctccattgacgagatcaaaggcgaaaagttgaaagaaacgctgcgccaacaccgggagatggcgctgttaagcaaaaagctcgccgccattcgccgcgacgccccggtcgagctctcgcttgatgacatcgtctatcaaggggaagaccgggagaaagtggtcgctttatttaaagagcttgggtttcaatcgtttttagagaaaatggaatcgccgtcatcagaagaggaaaaaccgcttgccaagatggcatttacgcttgctgaccgcgtgacggaggagatgcttgccgacaaggcggcgcttgtcgttgaagtggtcgaggaaaattatcatgatgcgccgatcgtcggcatcgctgtggtcaacgaacatggacggtttttcctgcgcccggagacggcgcttgccgatccgcagtttgtcgcctggcttggtgatgaaacgaagaaaaaaagcatgtttgactcaaagcgcgcggcagtcgccttgaaatggaaaggaattgagctatgcggcgtttcctttgatttattgctggccgcctatttgcttgatccggcgcaaggtgttgatgatgtggctgccgcagcaaaaatgaagcaatacgaagcggtgcgctcggatgaagcggtgtatggcaaaggggcgaagcgggccgtgccggatgagccagtgctcgccgagcatctcgtccgcaaggcggcggcgatttgggcgctcgaacgtccgtttttggatgagctgcgccgcaacgaacaagatcggttgctcgtcgagctcgagcagccgttgtcttcgattttggcggaaatggaatttgccggagtgaaagtggatacgaagcggctcgaacagatgggcgaagagctcgccgagcagctgcgcacggtcgagcagcgcatttatgagctcgccggccaagaattcaacatcaattcaccgaaacagctcggcgtcattttatttgaaaaactgcagctgcccgtcttgaaaaaaacgaaaaccggctactccacttcggcggatgtgcttgaaaaacttgcgccttatcacgagatcgtggaaaacattttgcattaccgccagcttggcaagttgcagtcgacgtatattgaaggattgctgaaagtcgtgcgacccgatacaaagaaggtgcatacgattttcaatcaggcgttgacgcaaaccggacggctcagctcgacggagccgaacttgcaaaacattccgattcggcttgaggaaggacggaaaatccgccaagcgttcgtgccgtcggagtctgattggctcattttcgctgccgactactcgcaaattgagttgcgcgtcctcgcccatattgcggaagatgacaatttaatggaagcgttccgccgcgatttggatatccatacgaaaacagcgatggacattttccaagtgagcgaggacgaagtgacgcccaacatgcgccgtcaggcgaaggcggtcaactttgggatcgtttacgggatcagtgattacggcttggcgcaaaacttaaatatttcacgcaaagaggccgctgaattcatcgagcgctacttcgaaagcttccctggcgtgaagcggtatatggaaaacattgtgcaagaagcaaaacagaaagggtatgtgacgacgctgctgcatcggcgccgctatttgccggatatcacgagccgcaacttcaacgtccgcaaatttgctgaacggatggcgatgaacacgccgattcaagggagcgccgctgacattattaaaaaggcgatgatcgatctgaacgctagactgaaggaagagcggctgcaagcgcgccttttgctacaggtgcatgacgagctcattttggaggcgccgaaagaagagatggagcggctgtgccggctcgttccggaagtgatggagcaagcggtcacacttcgcgtgccgctcaaagtcgattaccattatggctcgacgtggtatgacgcgaaataaaaaggatcc

SEQ ID NO: 2546 - DNA, 2712 bp, Artificial Sequence
  Description of Artificial Sequence: Synthetic DNA sequence of Bacillus caldolyticus EA1 DNA polymerase S809E
atgaaatacctgctgccgaccgctgctgctggtctgctgctcctcgctgcccagccggcgatggccatgggattgaaaaaaaagcttgttttaatcgacggcagcagcgtggcgtaccgcgcctttttcgccttgccgcttttgcataacgacaaaggcatccatacgaacgccgtctacgggtttacgatgatgttgaataaaattttggcggaagaagagccaactcatatgcttgtcgcgtttgacgccgggaaaacgacgttccggcatgaagcgtttcaagagtataaaggtgggcgccagcagacgccaccggagctgtcggagcagtttccgctgttgcgcgagctgctgagggcgtatcgcatccccgcctatgaactcgagaactacgaagcggacgatattatcggaacgcttgccgcccgcgctgagcaggaagggtttgaggtgaaagtcatttccggcgaccgcgatctgacccagctcgcctccccccatgtgacggtggacattacgaaaaaagggattaccgatatcgaaccgtacacgccggaggcggtccgcgaaaaatacggcttaactccggaacaaatcgttgatttgaaaggattgatgggcgacaaatcggacaacattcccggagtgccgggcatcggggaaaagacggcggtcaagctgctcaagcaattcggcacggtcgaaaacgtgcttgcctccattgacgagatcaaaggcgaaaagttgaaagaaacgctgcgccaacaccgggagatggcgctgttaagcaaaaagctcgccgccattcgccgcgacgccccggtcgagctctcgcttgatgacatcgtctatcaaggggaagaccgggagaaagtggtcgctttatttaaagagcttgggtttcaatcgtttttagagaaaatggaatcgccgtcatcagaagaggaaaaaccgcttgccaagatggcatttacgcttgctgaccgcgtgacggaggagatgcttgccgacaaggcggcgcttgtcgttgaagtggtcgaggaaaattatcatgatgcgccgatcgtcggcatcgctgtggtcaacgaacatggacggtttttcctgcgcccggagacggcgcttgccgatccgcagtttgtcgcctggcttggtgatgaaacgaagaaaaaaagcatgtttgactcaaagcgcgcggcagtcgccttgaaatggaaaggaattgagctatgcggcgtttcctttgatttattgctggccgcctatttgcttgatccggcgcaaggtgttgatgatgtggctgccgcagcaaaaatgaagcaatacgaagcggtgcgctcggatgaagcggtgtatggcaaaggggcgaagcgggccgtgccggatgagccagtgctcgccgagcatctcgtccgcaaggcggcggcgatttgggcgctcgaacgtccgtttttggatgagctgcgccgcaacgaacaagatcggttgctcgtcgagctcgagcagccgttgtcttcgattttggcggaaatggaatttgccggagtgaaagtggatacgaagcggctcgaacagatgggcgaagagctcgccgagcagctgcgcacggtcgagcagcgcatttatgagctcgccggccaagaattcaacatcaattcaccgaaacagctcggcgtcattttatttgaaaaactgcagctgcccgtcttgaaaaaaacgaaaaccggctactccacttcggcggatgtgcttgaaaaacttgcgccttatcacgagatcgtggaaaacattttgcattaccgccagcttggcaagttgcagtcgacgtatattgaaggattgctgaaagtcgtgcgacccgatacaaagaaggtgcatacgattttcaatcaggcgttgacgcaaaccggacggctcagctcgacggagccgaacttgcaaaacattccgattcggcttgaggaaggacggaaaatccgccaagcgttcgtgccgtcggagtctgattggctcattttcgctgccgactactcgcaaattgagttgcgcgtcctcgcccatattgcggaagatgacaatttaatggaagcgttccgccgcgatttggatatccatacgaaaacagcgatggacattttccaagtgagcgaggacgaagtgacgcccaacatgcgccgtcaggcgaaggcggtcaactttgggatcgtttacgggatcagtgattacggcttggcgcaaaacttaaatatttcacgcaaagaggccgctgaattcatcgagcgctacttcgaaagcttccctggcgtgaagcggtatatggaaaacattgtgcaagaagcaaaacagaaagggtatgtgacgacgctgctgcatcggcgccgctatttgccggatatcacgagccgcaacttcaacgtccgcgaatttgctgaacggatggcgatgaacacgccgattcaagggagcgccgctgacattattaaaaaggcgatgatcgatctgaacgctagactgaaggaagagcggctgcaagcgcgccttttgctacaggtgcatgacgagctcattttggaggcgccgaaagaagagatggagcggctgtgccggctcgttccggaagtgatggagcaagcggtcacacttcgcgtgccgctcaaagtcgattaccattatggctcgacgtggtatgacgcgaaataaaaaggatcc

SEQ ID NO: 2547 - DNA, 2712 bp, Artificial Sequence
  Description of Artificial Sequence: Synthetic DNA sequence of Bacillus caldolyticus EA1 DNA polymerase S809D
atgaaatacctgctgccgaccgctgctgctggtctgctgctcctcgctgcccagccggcgatggccatgggattgaaaaaaaagcttgttttaatcgacggcagcagcgtggcgtaccgcgcctttttcgccttgccgcttttgcataacgacaaaggcatccatacgaacgccgtctacgggtttacgatgatgttgaataaaattttggcggaagaagagccaactcatatgcttgtcgcgtttgacgccgggaaaacgacgttccggcatgaagcgtttcaagagtataaaggtgggcgccagcagacgccaccggagctgtcggagcagtttccgctgttgcgcgagctgctgagggcgtatcgcatccccgcctatgaactcgagaactacgaagcggacgatattatcggaacgcttgccgcccgcgctgagcaggaagggtttgaggtgaaagtcatttccggcgaccgcgatctgacccagctcgcctccccccatgtgacggtggacattacgaaaaaagggattaccgatatcgaaccgtacacgccggaggcggtccgcgaaaaatacggcttaactccggaacaaatcgttgatttgaaaggattgatgggcgacaaatcggacaacattcccggagtgccgggcatcggggaaaagacggcggtcaagctgctcaagcaattcggcacggtcgaaaacgtgcttgcctccattgacgagatcaaaggcgaaaagttgaaagaaacgctgcgccaacaccgggagatggcgctgttaagcaaaaagctcgccgccattcgccgcgacgccccggtcgagctctcgcttgatgacatcgtctatcaaggggaagaccgggagaaagtggtcgctttatttaaagagcttgggtttcaatcgtttttagagaaaatggaatcgccgtcatcagaagaggaaaaaccgcttgccaagatggcatttacgcttgctgaccgcgtgacggaggagatgcttgccgacaaggcggcgcttgtcgttgaagtggtcgaggaaaattatcatgatgcgccgatcgtcggcatcgctgtggtcaacgaacatggacggtttttcctgcgcccggagacggcgcttgccgatccgcagtttgtcgcctggcttggtgatgaaacgaagaaaaaaagcatgtttgactcaaagcgcgcggcagtcgccttgaaatggaaaggaattgagctatgcggcgtttcctttgatttattgctggccgcctatttgcttgatccggcgcaaggtgttgatgatgtggctgccgcagcaaaaatgaagcaatacgaagcggtgcgctcggatgaagcggtgtatggcaaaggggcgaagcgggccgtgccggatgagccagtgctcgccgagcatctcgtccgcaaggcggcggcgatttgggcgctcgaacgtccgtttttggatgagctgcgccgcaacgaacaagatcggttgctcgtcgagctcgagcagccgttgtcttcgattttggcggaaatggaatttgccggagtgaaagtggatacgaagcggctcgaacagatgggcgaagagctcgccgagcagctgcgcacggtcgagcagcgcatttatgagctcgccggccaagaattcaacatcaattcaccgaaacagctcggcgtcattttatttgaaaaactgcagctgcccgtcttgaaaaaaacgaaaaccggctactccacttcggcggatgtgcttgaaaaacttgcgccttatcacgagatcgtggaaaacattttgcattaccgccagcttggcaagttgcagtcgacgtatattgaaggattgctgaaagtcgtgcgacccgatacaaagaaggtgcatacgattttcaatcaggcgttgacgcaaaccggacggctcagctcgacggagccgaacttgcaaaacattccgattcggcttgaggaaggacggaaaatccgccaagcgttcgtgccgtcggagtctgattggctcattttcgctgccgactactcgcaaattgagttgcgcgtcctcgcccatattgcggaagatgacaatttaatggaagcgttccgccgcgatttggatatccatacgaaaacagcgatggacattttccaagtgagcgaggacgaagtgacgcccaacatgcgccgtcaggcgaaggcggtcaactttgggatcgtttacgggatcagtgattacggcttggcgcaaaacttaaatatttcacgcaaagaggccgctgaattcatcgagcgctacttcgaaagcttccctggcgtgaagcggtatatggaaaacattgtgcaagaagcaaaacagaaagggtatgtgacgacgctgctgcatcggcgccgctatttgccggatatcacgagccgcaacttcaacgtccgcgattttgctgaacggatggcgatgaacacgccgattcaagggagcgccgctgacattattaaaaaggcgatgatcgatctgaacgctagactgaaggaagagcggctgcaagcgcgccttttgctacaggtgcatgacgagctcattttggaggcgccgaaagaagagatggagcggctgtgccggctcgttccggaagtgatggagcaagcggtcacacttcgcgtgccgctcaaagtcgattaccattatggctcgacgtggtatgacgcgaaataaaaaggatcc

SEQ ID NO: 2548 - DNA, 2712 bp, Artificial Sequence
  Description of Artificial Sequence: Synthetic DNA sequence of Bacillus caldolyticus EA1 DNA polymerase S809F
atgaaatacctgctgccgaccgctgctgctggtctgctgctcctcgctgcccagccggcgatggccatgggattgaaaaaaaagcttgttttaatcgacggcagcagcgtggcgtaccgcgcctttttcgccttgccgcttttgcataacgacaaaggcatccatacgaacgccgtctacgggtttacgatgatgttgaataaaattttggcggaagaagagccaactcatatgcttgtcgcgtttgacgccgggaaaacgacgttccggcatgaagcgtttcaagagtataaaggtgggcgccagcagacgccaccggagctgtcggagcagtttccgctgttgcgcgagctgctgagggcgtatcgcatccccgcctatgaactcgagaactacgaagcggacgatattatcggaacgcttgccgcccgcgctgagcaggaagggtttgaggtgaaagtcatttccggcgaccgcgatctgacccagctcgcctccccccatgtgacggtggacattacgaaaaaagggattaccgatatcgaaccgtacacgccggaggcggtccgcgaaaaatacggcttaactccggaacaaatcgttgatttgaaaggattgatgggcgacaaatcggacaacattcccggagtgccgggcatcggggaaaagacggcggtcaagctgctcaagcaattcggcacggtcgaaaacgtgcttgcctccattgacgagatcaaaggcgaaaagttgaaagaaacgctgcgccaacaccgggagatggcgctgttaagcaaaaagctcgccgccattcgccgcgacgccccggtcgagctctcgcttgatgacatcgtctatcaaggggaagaccgggagaaagtggtcgctttatttaaagagcttgggtttcaatcgtttttagagaaaatggaatcgccgtcatcagaagaggaaaaaccgcttgccaagatggcatttacgcttgctgaccgcgtgacggaggagatgcttgccgacaaggcggcgcttgtcgttgaagtggtcgaggaaaattatcatgatgcgccgatcgtcggcatcgctgtggtcaacgaacatggacggtttttcctgcgcccggagacggcgcttgccgatccgcagtttgtcgcctggcttggtgatgaaacgaagaaaaaaagcatgtttgactcaaagcgcgcggcagtcgccttgaaatggaaaggaattgagctatgcggcgtttcctttgatttattgctggccgcctatttgcttgatccggcgcaaggtgttgatgatgtggctgccgcagcaaaaatgaagcaatacgaagcggtgcgctcggatgaagcggtgtatggcaaaggggcgaagcgggccgtgccggatgagccagtgctcgccgagcatctcgtccgcaaggcggcggcgatttgggcgctcgaacgtccgtttttggatgagctgcgccgcaacgaacaagatcggttgctcgtcgagctcgagcagccgttgtcttcgattttggcggaaatggaatttgccggagtgaaagtggatacgaagcggctcgaacagatgggcgaagagctcgccgagcagctgcgcacggtcgagcagcgcatttatgagctcgccggccaagaattcaacatcaattcaccgaaacagctcggcgtcattttatttgaaaaactgcagctgcccgtcttgaaaaaaacgaaaaccggctactccacttcggcggatgtgcttgaaaaacttgcgccttatcacgagatcgtggaaaacattttgcattaccgccagcttggcaagttgcagtcgacgtatattgaaggattgctgaaagtcgtgcgacccgatacaaagaaggtgcatacgattttcaatcaggcgttgacgcaaaccggacggctcagctcgacggagccgaacttgcaaaacattccgattcggcttgaggaaggacggaaaatccgccaagcgttcgtgccgtcggagtctgattggctcattttcgctgccgactactcgcaaattgagttgcgcgtcctcgcccatattgcggaagatgacaatttaatggaagcgttccgccgcgatttggatatccatacgaaaacagcgatggacattttccaagtgagcgaggacgaagtgacgcccaacatgcgccgtcaggcgaaggcggtcaactttgggatcgtttacgggatcagtgattacggcttggcgcaaaacttaaatatttcacgcaaagaggccgctgaattcatcgagcgctacttcgaaagcttccctggcgtgaagcggtatatggaaaacattgtgcaagaagcaaaacagaaagggtatgtgacgacgctgctgcatcggcgccgctatttgccggatatcacgagccgcaacttcaacgtccgcttttttgctgaacggatggcgatgaacacgccgattcaagggagcgccgctgacattattaaaaaggcgatgatcgatctgaacgctagactgaaggaagagcggctgcaagcgcgccttttgctacaggtgcatgacgagctcattttggaggcgccgaaagaagagatggagcggctgtgccggctcgttccggaagtgatggagcaagcggtcacacttcgcgtgccgctcaaagtcgattaccattatggctcgacgtggtatgacgcgaaataaaaaggatcc

SEQ ID NO: 2549 - DNA, 2712 bp, Artificial Sequence
  Description of Artificial Sequence: Synthetic DNA sequence of Bacillus caldolyticus EA1 DNA polymerase S809Y
atgaaatacctgctgccgaccgctgctgctggtctgctgctcctcgctgcccagccggcgatggccatgggattgaaaaaaaagcttgttttaatcgacggcagcagcgtggcgtaccgcgcctttttcgccttgccgcttttgcataacgacaaaggcatccatacgaacgccgtctacgggtttacgatgatgttgaataaaattttggcggaagaagagccaactcatatgcttgtcgcgtttgacgccgggaaaacgacgttccggcatgaagcgtttcaagagtataaaggtgggcgccagcagacgccaccggagctgtcggagcagtttccgctgttgcgcgagctgctgagggcgtatcgcatccccgcctatgaactcgagaactacgaagcggacgatattatcggaacgcttgccgcccgcgctgagcaggaagggtttgaggtgaaagtcatttccggcgaccgcgatctgacccagctcgcctccccccatgtgacggtggacattacgaaaaaagggattaccgatatcgaaccgtacacgccggaggcggtccgcgaaaaatacggcttaactccggaacaaatcgttgatttgaaaggattgatgggcgacaaatcggacaacattcccggagtgccgggcatcggggaaaagacggcggtcaagctgctcaagcaattcggcacggtcgaaaacgtgcttgcctccattgacgagatcaaaggcgaaaagttgaaagaaacgctgcgccaacaccgggagatggcgctgttaagcaaaaagctcgccgccattcgccgcgacgccccggtcgagctctcgcttgatgacatcgtctatcaaggggaagaccgggagaaagtggtcgctttatttaaagagcttgggtttcaatcgtttttagagaaaatggaatcgccgtcatcagaagaggaaaaaccgcttgccaagatggcatttacgcttgctgaccgcgtgacggaggagatgcttgccgacaaggcggcgcttgtcgttgaagtggtcgaggaaaattatcatgatgcgccgatcgtcggcatcgctgtggtcaacgaacatggacggtttttcctgcgcccggagacggcgcttgccgatccgcagtttgtcgcctggcttggtgatgaaacgaagaaaaaaagcatgtttgactcaaagcgcgcggcagtcgccttgaaatggaaaggaattgagctatgcggcgtttcctttgatttattgctggccgcctatttgcttgatccggcgcaaggtgttgatgatgtggctgccgcagcaaaaatgaagcaatacgaagcggtgcgctcggatgaagcggtgtatggcaaaggggcgaagcgggccgtgccggatgagccagtgctcgccgagcatctcgtccgcaaggcggcggcgatttgggcgctcgaacgtccgtttttggatgagctgcgccgcaacgaacaagatcggttgctcgtcgagctcgagcagccgttgtcttcgattttggcggaaatggaatttgccggagtgaaagtggatacgaagcggctcgaacagatgggcgaagagctcgccgagcagctgcgcacggtcgagcagcgcatttatgagctcgccggccaagaattcaacatcaattcaccgaaacagctcggcgtcattttatttgaaaaactgcagctgcccgtcttgaaaaaaacgaaaaccggctactccacttcggcggatgtgcttgaaaaacttgcgccttatcacgagatcgtggaaaacattttgcattaccgccagcttggcaagttgcagtcgacgtatattgaaggattgctgaaagtcgtgcgacccgatacaaagaaggtgcatacgattttcaatcaggcgttgacgcaaaccggacggctcagctcgacggagccgaacttgcaaaacattccgattcggcttgaggaaggacggaaaatccgccaagcgttcgtgccgtcggagtctgattggctcattttcgctgccgactactcgcaaattgagttgcgcgtcctcgcccatattgcggaagatgacaatttaatggaagcgttccgccgcgatttggatatccatacgaaaacagcgatggacattttccaagtgagcgaggacgaagtgacgcccaacatgcgccgtcaggcgaaggcggtcaactttgggatcgtttacgggatcagtgattacggcttggcgcaaaacttaaatatttcacgcaaagaggccgctgaattcatcgagcgctacttcgaaagcttccctggcgtgaagcggtatatggaaaacattgtgcaagaagcaaaacagaaagggtatgtgacgacgctgctgcatcggcgccgctatttgccggatatcacgagccgcaacttcaacgtccgctattttgctgaacggatggcgatgaacacgccgattcaagggagcgccgctgacattattaaaaaggcgatgatcgatctgaacgctagactgaaggaagagcggctgcaagcgcgccttttgctacaggtgcatgacgagctcattttggaggcgccgaaagaagagatggagcggctgtgccggctcgttccggaagtgatggagcaagcggtcacacttcgcgtgccgctcaaagtcgattaccattatggctcgacgtggtatgacgcgaaataaaaaggatcc

SEQ ID NO: 2550 - DNA, 2712 bp, Artificial Sequence
  Description of Artificial Sequence: Synthetic DNA sequence of Bacillus caldolyticus EA1 DNA polymerase S809W
atgaaatacctgctgccgaccgctgctgctggtctgctgctcctcgctgcccagccggcgatggccatgggattgaaaaaaaagcttgttttaatcgacggcagcagcgtggcgtaccgcgcctttttcgccttgccgcttttgcataacgacaaaggcatccatacgaacgccgtctacgggtttacgatgatgttgaataaaattttggcggaagaagagccaactcatatgcttgtcgcgtttgacgccgggaaaacgacgttccggcatgaagcgtttcaagagtataaaggtgggcgccagcagacgccaccggagctgtcggagcagtttccgctgttgcgcgagctgctgagggcgtatcgcatccccgcctatgaactcgagaactacgaagcggacgatattatcggaacgcttgccgcccgcgctgagcaggaagggtttgaggtgaaagtcatttccggcgaccgcgatctgacccagctcgcctccccccatgtgacggtggacattacgaaaaaagggattaccgatatcgaaccgtacacgccggaggcggtccgcgaaaaatacggcttaactccggaacaaatcgttgatttgaaaggattgatgggcgacaaatcggacaacattcccggagtgccgggcatcggggaaaagacggcggtcaagctgctcaagcaattcggcacggtcgaaaacgtgcttgcctccattgacgagatcaaaggcgaaaagttgaaagaaacgctgcgccaacaccgggagatggcgctgttaagcaaaaagctcgccgccattcgccgcgacgccccggtcgagctctcgcttgatgacatcgtctatcaaggggaagaccgggagaaagtggtcgctttatttaaagagcttgggtttcaatcgtttttagagaaaatggaatcgccgtcatcagaagaggaaaaaccgcttgccaagatggcatttacgcttgctgaccgcgtgacggaggagatgcttgccgacaaggcggcgcttgtcgttgaagtggtcgaggaaaattatcatgatgcgccgatcgtcggcatcgctgtggtcaacgaacatggacggtttttcctgcgcccggagacggcgcttgccgatccgcagtttgtcgcctggcttggtgatgaaacgaagaaaaaaagcatgtttgactcaaagcgcgcggcagtcgccttgaaatggaaaggaattgagctatgcggcgtttcctttgatttattgctggccgcctatttgcttgatccggcgcaaggtgttgatgatgtggctgccgcagcaaaaatgaagcaatacgaagcggtgcgctcggatgaagcggtgtatggcaaaggggcgaagcgggccgtgccggatgagccagtgctcgccgagcatctcgtccgcaaggcggcggcgatttgggcgctcgaacgtccgtttttggatgagctgcgccgcaacgaacaagatcggttgctcgtcgagctcgagcagccgttgtcttcgattttggcggaaatggaatttgccggagtgaaagtggatacgaagcggctcgaacagatgggcgaagagctcgccgagcagctgcgcacggtcgagcagcgcatttatgagctcgccggccaagaattcaacatcaattcaccgaaacagctcggcgtcattttatttgaaaaactgcagctgcccgtcttgaaaaaaacgaaaaccggctactccacttcggcggatgtgcttgaaaaacttgcgccttatcacgagatcgtggaaaacattttgcattaccgccagcttggcaagttgcagtcgacgtatattgaaggattgctgaaagtcgtgcgacccgatacaaagaaggtgcatacgattttcaatcaggcgttgacgcaaaccggacggctcagctcgacggagccgaacttgcaaaacattccgattcggcttgaggaaggacggaaaatccgccaagcgttcgtgccgtcggagtctgattggctcattttcgctgccgactactcgcaaattgagttgcgcgtcctcgcccatattgcggaagatgacaatttaatggaagcgttccgccgcgatttggatatccatacgaaaacagcgatggacattttccaagtgagcgaggacgaagtgacgcccaacatgcgccgtcaggcgaaggcggtcaactttgggatcgtttacgggatcagtgattacggcttggcgcaaaacttaaatatttcacgcaaagaggccgctgaattcatcgagcgctacttcgaaagcttccctggcgtgaagcggtatatggaaaacattgtgcaagaagcaaaacagaaagggtatgtgacgacgctgctgcatcggcgccgctatttgccggatatcacgagccgcaacttcaacgtccgctggtttgctgaacggatggcgatgaacacgccgattcaagggagcgccgctgacattattaaaaaggcgatgatcgatctgaacgctagactgaaggaagagcggctgcaagcgcgccttttgctacaggtgcatgacgagctcattttggaggcgccgaaagaagagatggagcggctgtgccggctcgttccggaagtgatggagcaagcggtcacacttcgcgtgccgctcaaagtcgattaccattatggctcgacgtggtatgacgcgaaataaaaaggatcc

SEQ ID NO: 2551 - DNA, 2712 bp, Artificial Sequence
  Description of Artificial Sequence: Synthetic DNA sequence of Bacillus caldolyticus EA1 DNA polymerase S809P
atgaaatacctgctgccgaccgctgctgctggtctgctgctcctcgctgcccagccggcgatggccatgggattgaaaaaaaagcttgttttaatcgacggcagcagcgtggcgtaccgcgcctttttcgccttgccgcttttgcataacgacaaaggcatccatacgaacgccgtctacgggtttacgatgatgttgaataaaattttggcggaagaagagccaactcatatgcttgtcgcgtttgacgccgggaaaacgacgttccggcatgaagcgtttcaagagtataaaggtgggcgccagcagacgccaccggagctgtcggagcagtttccgctgttgcgcgagctgctgagggcgtatcgcatccccgcctatgaactcgagaactacgaagcggacgatattatcggaacgcttgccgcccgcgctgagcaggaagggtttgaggtgaaagtcatttccggcgaccgcgatctgacccagctcgcctccccccatgtgacggtggacattacgaaaaaagggattaccgatatcgaaccgtacacgccggaggcggtccgcgaaaaatacggcttaactccggaacaaatcgttgatttgaaaggattgatgggcgacaaatcggacaacattcccggagtgccgggcatcggggaaaagacggcggtcaagctgctcaagcaattcggcacggtcgaaaacgtgcttgcctccattgacgagatcaaaggcgaaaagttgaaagaaacgctgcgccaacaccgggagatggcgctgttaagcaaaaagctcgccgccattcgccgcgacgccccggtcgagctctcgcttgatgacatcgtctatcaaggggaagaccgggagaaagtggtcgctttatttaaagagcttgggtttcaatcgtttttagagaaaatggaatcgccgtcatcagaagaggaaaaaccgcttgccaagatggcatttacgcttgctgaccgcgtgacggaggagatgcttgccgacaaggcggcgcttgtcgttgaagtggtcgaggaaaattatcatgatgcgccgatcgtcggcatcgctgtggtcaacgaacatggacggtttttcctgcgcccggagacggcgcttgccgatccgcagtttgtcgcctggcttggtgatgaaacgaagaaaaaaagcatgtttgactcaaagcgcgcggcagtcgccttgaaatggaaaggaattgagctatgcggcgtttcctttgatttattgctggccgcctatttgcttgatccggcgcaaggtgttgatgatgtggctgccgcagcaaaaatgaagcaatacgaagcggtgcgctcggatgaagcggtgtatggcaaaggggcgaagcgggccgtgccggatgagccagtgctcgccgagcatctcgtccgcaaggcggcggcgatttgggcgctcgaacgtccgtttttggatgagctgcgccgcaacgaacaagatcggttgctcgtcgagctcgagcagccgttgtcttcgattttggcggaaatggaatttgccggagtgaaagtggatacgaagcggctcgaacagatgggcgaagagctcgccgagcagctgcgcacggtcgagcagcgcatttatgagctcgccggccaagaattcaacatcaattcaccgaaacagctcggcgtcattttatttgaaaaactgcagctgcccgtcttgaaaaaaacgaaaaccggctactccacttcggcggatgtgcttgaaaaacttgcgccttatcacgagatcgtggaaaacattttgcattaccgccagcttggcaagttgcagtcgacgtatattgaaggattgctgaaagtcgtgcgacccgatacaaagaaggtgcatacgattttcaatcaggcgttgacgcaaaccggacggctcagctcgacggagccgaacttgcaaaacattccgattcggcttgaggaaggacggaaaatccgccaagcgttcgtgccgtcggagtctgattggctcattttcgctgccgactactcgcaaattgagttgcgcgtcctcgcccatattgcggaagatgacaatttaatggaagcgttccgccgcgatttggatatccatacgaaaacagcgatggacattttccaagtgagcgaggacgaagtgacgcccaacatgcgccgtcaggcgaaggcggtcaactttgggatcgtttacgggatcagtgattacggcttggcgcaaaacttaaatatttcacgcaaagaggccgctgaattcatcgagcgctacttcgaaagcttccctggcgtgaagcggtatatggaaaacattgtgcaagaagcaaaacagaaagggtatgtgacgacgctgctgcatcggcgccgctatttgccggatatcacgagccgcaacttcaacgtccgcccttttgctgaacggatggcgatgaacacgccgattcaagggagcgccgctgacattattaaaaaggcgatgatcgatctgaacgctagactgaaggaagagcggctgcaagcgcgccttttgctacaggtgcatgacgagctcattttggaggcgccgaaagaagagatggagcggctgtgccggctcgttccggaagtgatggagcaagcggtcacacttcgcgtgccgctcaaagtcgattaccattatggctcgacgtggtatgacgcgaaataaaaaggatcc

SEQ ID NO: 2552 - DNA, 2712 bp, Artificial Sequence
  Description of Artificial Sequence: Synthetic DNA sequence of Bacillus caldolyticus EA1 DNA polymerase S809M
atgaaatacctgctgccgaccgctgctgctggtctgctgctcctcgctgcccagccggcgatggccatgggattgaaaaaaaagcttgttttaatcgacggcagcagcgtggcgtaccgcgcctttttcgccttgccgcttttgcataacgacaaaggcatccatacgaacgccgtctacgggtttacgatgatgttgaataaaattttggcggaagaagagccaactcatatgcttgtcgcgtttgacgccgggaaaacgacgttccggcatgaagcgtttcaagagtataaaggtgggcgccagcagacgccaccggagctgtcggagcagtttccgctgttgcgcgagctgctgagggcgtatcgcatccccgcctatgaactcgagaactacgaagcggacgatattatcggaacgcttgccgcccgcgctgagcaggaagggtttgaggtgaaagtcatttccggcgaccgcgatctgacccagctcgcctccccccatgtgacggtggacattacgaaaaaagggattaccgatatcgaaccgtacacgccggaggcggtccgcgaaaaatacggcttaactccggaacaaatcgttgatttgaaaggattgatgggcgacaaatcggacaacattcccggagtgccgggcatcggggaaaagacggcggtcaagctgctcaagcaattcggcacggtcgaaaacgtgcttgcctccattgacgagatcaaaggcgaaaagttgaaagaaacgctgcgccaacaccgggagatggcgctgttaagcaaaaagctcgccgccattcgccgcgacgccccggtcgagctctcgcttgatgacatcgtctatcaaggggaagaccgggagaaagtggtcgctttatttaaagagcttgggtttcaatcgtttttagagaaaatggaatcgccgtcatcagaagaggaaaaaccgcttgccaagatggcatttacgcttgctgaccgcgtgacggaggagatgcttgccgacaaggcggcgcttgtcgttgaagtggtcgaggaaaattatcatgatgcgccgatcgtcggcatcgctgtggtcaacgaacatggacggtttttcctgcgcccggagacggcgcttgccgatccgcagtttgtcgcctggcttggtgatgaaacgaagaaaaaaagcatgtttgactcaaagcgcgcggcagtcgccttgaaatggaaaggaattgagctatgcggcgtttcctttgatttattgctggccgcctatttgcttgatccggcgcaaggtgttgatgatgtggctgccgcagcaaaaatgaagcaatacgaagcggtgcgctcggatgaagcggtgtatggcaaaggggcgaagcgggccgtgccggatgagccagtgctcgccgagcatctcgtccgcaaggcggcggcgatttgggcgctcgaacgtccgtttttggatgagctgcgccgcaacgaacaagatcggttgctcgtcgagctcgagcagccgttgtcttcgattttggcggaaatggaatttgccggagtgaaagtggatacgaagcggctcgaacagatgggcgaagagctcgccgagcagctgcgcacggtcgagcagcgcatttatgagctcgccggccaagaattcaacatcaattcaccgaaacagctcggcgtcattttatttgaaaaactgcagctgcccgtcttgaaaaaaacgaaaaccggctactccacttcggcggatgtgcttgaaaaacttgcgccttatcacgagatcgtggaaaacattttgcattaccgccagcttggcaagttgcagtcgacgtatattgaaggattgctgaaagtcgtgcgacccgatacaaagaaggtgcatacgattttcaatcaggcgttgacgcaaaccggacggctcagctcgacggagccgaacttgcaaaacattccgattcggcttgaggaaggacggaaaatccgccaagcgttcgtgccgtcggagtctgattggctcattttcgctgccgactactcgcaaattgagttgcgcgtcctcgcccatattgcggaagatgacaatttaatggaagcgttccgccgcgatttggatatccatacgaaaacagcgatggacattttccaagtgagcgaggacgaagtgacgcccaacatgcgccgtcaggcgaaggcggtcaactttgggatcgtttacgggatcagtgattacggcttggcgcaaaacttaaatatttcacgcaaagaggccgctgaattcatcgagcgctacttcgaaagcttccctggcgtgaagcggtatatggaaaacattgtgcaagaagcaaaacagaaagggtatgtgacgacgctgctgcatcggcgccgctatttgccggatatcacgagccgcaacttcaacgtccgcatgtttgctgaacggatggcgatgaacacgccgattcaagggagcgccgctgacattattaaaaaggcgatgatcgatctgaacgctagactgaaggaagagcggctgcaagcgcgccttttgctacaggtgcatgacgagctcattttggaggcgccgaaagaagagatggagcggctgtgccggctcgttccggaagtgatggagcaagcggtcacacttcgcgtgccgctcaaagtcgattaccattatggctcgacgtggtatgacgcgaaataaaaaggatcc

SEQ ID NO: 2553 - DNA, 2712 bp, Artificial Sequence
  Description of Artificial Sequence: Synthetic DNA sequence of Bacillus caldolyticus EA1 DNA polymerase S809T
atgaaatacctgctgccgaccgctgctgctggtctgctgctcctcgctgcccagccggcgatggccatgggattgaaaaaaaagcttgttttaatcgacggcagcagcgtggcgtaccgcgcctttttcgccttgccgcttttgcataacgacaaaggcatccatacgaacgccgtctacgggtttacgatgatgttgaataaaattttggcggaagaagagccaactcatatgcttgtcgcgtttgacgccgggaaaacgacgttccggcatgaagcgtttcaagagtataaaggtgggcgccagcagacgccaccggagctgtcggagcagtttccgctgttgcgcgagctgctgagggcgtatcgcatccccgcctatgaactcgagaactacgaagcggacgatattatcggaacgcttgccgcccgcgctgagcaggaagggtttgaggtgaaagtcatttccggcgaccgcgatctgacccagctcgcctccccccatgtgacggtggacattacgaaaaaagggattaccgatatcgaaccgtacacgccggaggcggtccgcgaaaaatacggcttaactccggaacaaatcgttgatttgaaaggattgatgggcgacaaatcggacaacattcccggagtgccgggcatcggggaaaagacggcggtcaagctgctcaagcaattcggcacggtcgaaaacgtgcttgcctccattgacgagatcaaaggcgaaaagttgaaagaaacgctgcgccaacaccgggagatggcgctgttaagcaaaaagctcgccgccattcgccgcgacgccccggtcgagctctcgcttgatgacatcgtctatcaaggggaagaccgggagaaagtggtcgctttatttaaagagcttgggtttcaatcgtttttagagaaaatggaatcgccgtcatcagaagaggaaaaaccgcttgccaagatggcatttacgcttgctgaccgcgtgacggaggagatgcttgccgacaaggcggcgcttgtcgttgaagtggtcgaggaaaattatcatgatgcgccgatcgtcggcatcgctgtggtcaacgaacatggacggtttttcctgcgcccggagacggcgcttgccgatccgcagtttgtcgcctggcttggtgatgaaacgaagaaaaaaagcatgtttgactcaaagcgcgcggcagtcgccttgaaatggaaaggaattgagctatgcggcgtttcctttgatttattgctggccgcctatttgcttgatccggcgcaaggtgttgatgatgtggctgccgcagcaaaaatgaagcaatacgaagcggtgcgctcggatgaagcggtgtatggcaaaggggcgaagcgggccgtgccggatgagccagtgctcgccgagcatctcgtccgcaaggcggcggcgatttgggcgctcgaacgtccgtttttggatgagctgcgccgcaacgaacaagatcggttgctcgtcgagctcgagcagccgttgtcttcgattttggcggaaatggaatttgccggagtgaaagtggatacgaagcggctcgaacagatgggcgaagagctcgccgagcagctgcgcacggtcgagcagcgcatttatgagctcgccggccaagaattcaacatcaattcaccgaaacagctcggcgtcattttatttgaaaaactgcagctgcccgtcttgaaaaaaacgaaaaccggctactccacttcggcggatgtgcttgaaaaacttgcgccttatcacgagatcgtggaaaacattttgcattaccgccagcttggcaagttgcagtcgacgtatattgaaggattgctgaaagtcgtgcgacccgatacaaagaaggtgcatacgattttcaatcaggcgttgacgcaaaccggacggctcagctcgacggagccgaacttgcaaaacattccgattcggcttgaggaaggacggaaaatccgccaagcgttcgtgccgtcggagtctgattggctcattttcgctgccgactactcgcaaattgagttgcgcgtcctcgcccatattgcggaagatgacaatttaatggaagcgttccgccgcgatttggatatccatacgaaaacagcgatggacattttccaagtgagcgaggacgaagtgacgcccaacatgcgccgtcaggcgaaggcggtcaactttgggatcgtttacgggatcagtgattacggcttggcgcaaaacttaaatatttcacgcaaagaggccgctgaattcatcgagcgctacttcgaaagcttccctggcgtgaagcggtatatggaaaacattgtgcaagaagcaaaacagaaagggtatgtgacgacgctgctgcatcggcgccgctatttgccggatatcacgagccgcaacttcaacgtccgcacttttgctgaacggatggcgatgaacacgccgattcaagggagcgccgctgacattattaaaaaggcgatgatcgatctgaacgctagactgaaggaagagcggctgcaagcgcgccttttgctacaggtgcatgacgagctcattttggaggcgccgaaagaagagatggagcggctgtgccggctcgttccggaagtgatggagcaagcggtcacacttcgcgtgccgctcaaagtcgattaccattatggctcgacgtggtatgacgcgaaataaaaaggatcc

SEQ ID NO: 2554 - DNA, 2712 bp, Artificial Sequence
  Description of Artificial Sequence: Synthetic DNA sequence of Bacillus caldolyticus EA1 DNA polymerase S809N
atgaaatacctgctgccgaccgctgctgctggtctgctgctcctcgctgcccagccggcgatggccatgggattgaaaaaaaagcttgttttaatcgacggcagcagcgtggcgtaccgcgcctttttcgccttgccgcttttgcataacgacaaaggcatccatacgaacgccgtctacgggtttacgatgatgttgaataaaattttggcggaagaagagccaactcatatgcttgtcgcgtttgacgccgggaaaacgacgttccggcatgaagcgtttcaagagtataaaggtgggcgccagcagacgccaccggagctgtcggagcagtttccgctgttgcgcgagctgctgagggcgtatcgcatccccgcctatgaactcgagaactacgaagcggacgatattatcggaacgcttgccgcccgcgctgagcaggaagggtttgaggtgaaagtcatttccggcgaccgcgatctgacccagctcgcctccccccatgtgacggtggacattacgaaaaaagggattaccgatatcgaaccgtacacgccggaggcggtccgcgaaaaatacggcttaactccggaacaaatcgttgatttgaaaggattgatgggcgacaaatcggacaacattcccggagtgccgggcatcggggaaaagacggcggtcaagctgctcaagcaattcggcacggtcgaaaacgtgcttgcctccattgacgagatcaaaggcgaaaagttgaaagaaacgctgcgccaacaccgggagatggcgctgttaagcaaaaagctcgccgccattcgccgcgacgccccggtcgagctctcgcttgatgacatcgtctatcaaggggaagaccgggagaaagtggtcgctttatttaaagagcttgggtttcaatcgtttttagagaaaatggaatcgccgtcatcagaagaggaaaaaccgcttgccaagatggcatttacgcttgctgaccgcgtgacggaggagatgcttgccgacaaggcggcgcttgtcgttgaagtggtcgaggaaaattatcatgatgcgccgatcgtcggcatcgctgtggtcaacgaacatggacggtttttcctgcgcccggagacggcgcttgccgatccgcagtttgtcgcctggcttggtgatgaaacgaagaaaaaaagcatgtttgactcaaagcgcgcggcagtcgccttgaaatggaaaggaattgagctatgcggcgtttcctttgatttattgctggccgcctatttgcttgatccggcgcaaggtgttgatgatgtggctgccgcagcaaaaatgaagcaatacgaagcggtgcgctcggatgaagcggtgtatggcaaaggggcgaagcgggccgtgccggatgagccagtgctcgccgagcatctcgtccgcaaggcggcggcgatttgggcgctcgaacgtccgtttttggatgagctgcgccgcaacgaacaagatcggttgctcgtcgagctcgagcagccgttgtcttcgattttggcggaaatggaatttgccggagtgaaagtggatacgaagcggctcgaacagatgggcgaagagctcgccgagcagctgcgcacggtcgagcagcgcatttatgagctcgccggccaagaattcaacatcaattcaccgaaacagctcggcgtcattttatttgaaaaactgcagctgcccgtcttgaaaaaaacgaaaaccggctactccacttcggcggatgtgcttgaaaaacttgcgccttatcacgagatcgtggaaaacattttgcattaccgccagcttggcaagttgcagtcgacgtatattgaaggattgctgaaagtcgtgcgacccgatacaaagaaggtgcatacgattttcaatcaggcgttgacgcaaaccggacggctcagctcgacggagccgaacttgcaaaacattccgattcggcttgaggaaggacggaaaatccgccaagcgttcgtgccgtcggagtctgattggctcattttcgctgccgactactcgcaaattgagttgcgcgtcctcgcccatattgcggaagatgacaatttaatggaagcgttccgccgcgatttggatatccatacgaaaacagcgatggacattttccaagtgagcgaggacgaagtgacgcccaacatgcgccgtcaggcgaaggcggtcaactttgggatcgtttacgggatcagtgattacggcttggcgcaaaacttaaatatttcacgcaaagaggccgctgaattcatcgagcgctacttcgaaagcttccctggcgtgaagcggtatatggaaaacattgtgcaagaagcaaaacagaaagggtatgtgacgacgctgctgcatcggcgccgctatttgccggatatcacgagccgcaacttcaacgtccgcaattttgctgaacggatggcgatgaacacgccgattcaagggagcgccgctgacattattaaaaaggcgatgatcgatctgaacgctagactgaaggaagagcggctgcaagcgcgccttttgctacaggtgcatgacgagctcattttggaggcgccgaaagaagagatggagcggctgtgccggctcgttccggaagtgatggagcaagcggtcacacttcgcgtgccgctcaaagtcgattaccattatggctcgacgtggtatgacgcgaaataaaaaggatcc

SEQ ID NO: 2555 - DNA, 2712 bp, Artificial Sequence
  Description of Artificial Sequence: Synthetic DNA sequence of Bacillus caldolyticus EA1 DNA polymerase S809V
atgaaatacctgctgccgaccgctgctgctggtctgctgctcctcgctgcccagccggcgatggccatgggattgaaaaaaaagcttgttttaatcgacggcagcagcgtggcgtaccgcgcctttttcgccttgccgcttttgcataacgacaaaggcatccatacgaacgccgtctacgggtttacgatgatgttgaataaaattttggcggaagaagagccaactcatatgcttgtcgcgtttgacgccgggaaaacgacgttccggcatgaagcgtttcaagagtataaaggtgggcgccagcagacgccaccggagctgtcggagcagtttccgctgttgcgcgagctgctgagggcgtatcgcatccccgcctatgaactcgagaactacgaagcggacgatattatcggaacgcttgccgcccgcgctgagcaggaagggtttgaggtgaaagtcatttccggcgaccgcgatctgacccagctcgcctccccccatgtgacggtggacattacgaaaaaagggattaccgatatcgaaccgtacacgccggaggcggtccgcgaaaaatacggcttaactccggaacaaatcgttgatttgaaaggattgatgggcgacaaatcggacaacattcccggagtgccgggcatcggggaaaagacggcggtcaagctgctcaagcaattcggcacggtcgaaaacgtgcttgcctccattgacgagatcaaaggcgaaaagttgaaagaaacgctgcgccaacaccgggagatggcgctgttaagcaaaaagctcgccgccattcgccgcgacgccccggtcgagctctcgcttgatgacatcgtctatcaaggggaagaccgggagaaagtggtcgctttatttaaagagcttgggtttcaatcgtttttagagaaaatggaatcgccgtcatcagaagaggaaaaaccgcttgccaagatggcatttacgcttgctgaccgcgtgacggaggagatgcttgccgacaaggcggcgcttgtcgttgaagtggtcgaggaaaattatcatgatgcgccgatcgtcggcatcgctgtggtcaacgaacatggacggtttttcctgcgcccggagacggcgcttgccgatccgcagtttgtcgcctggcttggtgatgaaacgaagaaaaaaagcatgtttgactcaaagcgcgcggcagtcgccttgaaatggaaaggaattgagctatgcggcgtttcctttgatttattgctggccgcctatttgcttgatccggcgcaaggtgttgatgatgtggctgccgcagcaaaaatgaagcaatacgaagcggtgcgctcggatgaagcggtgtatggcaaaggggcgaagcgggccgtgccggatgagccagtgctcgccgagcatctcgtccgcaaggcggcggcgatttgggcgctcgaacgtccgtttttggatgagctgcgccgcaacgaacaagatcggttgctcgtcgagctcgagcagccgttgtcttcgattttggcggaaatggaatttgccggagtgaaagtggatacgaagcggctcgaacagatgggcgaagagctcgccgagcagctgcgcacggtcgagcagcgcatttatgagctcgccggccaagaattcaacatcaattcaccgaaacagctcggcgtcattttatttgaaaaactgcagctgcccgtcttgaaaaaaacgaaaaccggctactccacttcggcggatgtgcttgaaaaacttgcgccttatcacgagatcgtggaaaacattttgcattaccgccagcttggcaagttgcagtcgacgtatattgaaggattgctgaaagtcgtgcgacccgatacaaagaaggtgcatacgattttcaatcaggcgttgacgcaaaccggacggctcagctcgacggagccgaacttgcaaaacattccgattcggcttgaggaaggacggaaaatccgccaagcgttcgtgccgtcggagtctgattggctcattttcgctgccgactactcgcaaattgagttgcgcgtcctcgcccatattgcggaagatgacaatttaatggaagcgttccgccgcgatttggatatccatacgaaaacagcgatggacattttccaagtgagcgaggacgaagtgacgcccaacatgcgccgtcaggcgaaggcggtcaactttgggatcgtttacgggatcagtgattacggcttggcgcaaaacttaaatatttcacgcaaagaggccgctgaattcatcgagcgctacttcgaaagcttccctggcgtgaagcggtatatggaaaacattgtgcaagaagcaaaacagaaagggtatgtgacgacgctgctgcatcggcgccgctatttgccggatatcacgagccgcaacttcaacgtccgcgtctttgctgaacggatggcgatgaacacgccgattcaagggagcgccgctgacattattaaaaaggcgatgatcgatctgaacgctagactgaaggaagagcggctgcaagcgcgccttttgctacaggtgcatgacgagctcattttggaggcgccgaaagaagagatggagcggctgtgccggctcgttccggaagtgatggagcaagcggtcacacttcgcgtgccgctcaaagtcgattaccattatggctcgacgtggtatgacgcgaaataaaaaggatcc

SEQ ID NO: 2556 - DNA, 2712 bp, Artificial Sequence
  Description of Artificial Sequence: Synthetic DNA sequence of Bacillus caldolyticus EA1 DNA polymerase F810A
atgaaatacctgctgccgaccgctgctgctggtctgctgctcctcgctgcccagccggcgatggccatgggattgaaaaaaaagcttgttttaatcgacggcagcagcgtggcgtaccgcgcctttttcgccttgccgcttttgcataacgacaaaggcatccatacgaacgccgtctacgggtttacgatgatgttgaataaaattttggcggaagaagagccaactcatatgcttgtcgcgtttgacgccgggaaaacgacgttccggcatgaagcgtttcaagagtataaaggtgggcgccagcagacgccaccggagctgtcggagcagtttccgctgttgcgcgagctgctgagggcgtatcgcatccccgcctatgaactcgagaactacgaagcggacgatattatcggaacgcttgccgcccgcgctgagcaggaagggtttgaggtgaaagtcatttccggcgaccgcgatctgacccagctcgcctccccccatgtgacggtggacattacgaaaaaagggattaccgatatcgaaccgtacacgccggaggcggtccgcgaaaaatacggcttaactccggaacaaatcgttgatttgaaaggattgatgggcgacaaatcggacaacattcccggagtgccgggcatcggggaaaagacggcggtcaagctgctcaagcaattcggcacggtcgaaaacgtgcttgcctccattgacgagatcaaaggcgaaaagttgaaagaaacgctgcgccaacaccgggagatggcgctgttaagcaaaaagctcgccgccattcgccgcgacgccccggtcgagctctcgcttgatgacatcgtctatcaaggggaagaccgggagaaagtggtcgctttatttaaagagcttgggtttcaatcgtttttagagaaaatggaatcgccgtcatcagaagaggaaaaaccgcttgccaagatggcatttacgcttgctgaccgcgtgacggaggagatgcttgccgacaaggcggcgcttgtcgttgaagtggtcgaggaaaattatcatgatgcgccgatcgtcggcatcgctgtggtcaacgaacatggacggtttttcctgcgcccggagacggcgcttgccgatccgcagtttgtcgcctggcttggtgatgaaacgaagaaaaaaagcatgtttgactcaaagcgcgcggcagtcgccttgaaatggaaaggaattgagctatgcggcgtttcctttgatttattgctggccgcctatttgcttgatccggcgcaaggtgttgatgatgtggctgccgcagcaaaaatgaagcaatacgaagcggtgcgctcggatgaagcggtgtatggcaaaggggcgaagcgggccgtgccggatgagccagtgctcgccgagcatctcgtccgcaaggcggcggcgatttgggcgctcgaacgtccgtttttggatgagctgcgccgcaacgaacaagatcggttgctcgtcgagctcgagcagccgttgtcttcgattttggcggaaatggaatttgccggagtgaaagtggatacgaagcggctcgaacagatgggcgaagagctcgccgagcagctgcgcacggtcgagcagcgcatttatgagctcgccggccaagaattcaacatcaattcaccgaaacagctcggcgtcattttatttgaaaaactgcagctgcccgtcttgaaaaaaacgaaaaccggctactccacttcggcggatgtgcttgaaaaacttgcgccttatcacgagatcgtggaaaacattttgcattaccgccagcttggcaagttgcagtcgacgtatattgaaggattgctgaaagtcgtgcgacccgatacaaagaaggtgcatacgattttcaatcaggcgttgacgcaaaccggacggctcagctcgacggagccgaacttgcaaaacattccgattcggcttgaggaaggacggaaaatccgccaagcgttcgtgccgtcggagtctgattggctcattttcgctgccgactactcgcaaattgagttgcgcgtcctcgcccatattgcggaagatgacaatttaatggaagcgttccgccgcgatttggatatccatacgaaaacagcgatggacattttccaagtgagcgaggacgaagtgacgcccaacatgcgccgtcaggcgaaggcggtcaactttgggatcgtttacgggatcagtgattacggcttggcgcaaaacttaaatatttcacgcaaagaggccgctgaattcatcgagcgctacttcgaaagcttccctggcgtgaagcggtatatggaaaacattgtgcaagaagcaaaacagaaagggtatgtgacgacgctgctgcatcggcgccgctatttgccggatatcacgagccgcaacttcaacgtccgcagcgctgctgaacggatggcgatgaacacgccgattcaagggagcgccgctgacattattaaaaaggcgatgatcgatctgaacgctagactgaaggaagagcggctgcaagcgcgccttttgctacaggtgcatgacgagctcattttggaggcgccgaaagaagagatggagcggctgtgccggctcgttccggaagtgatggagcaagcggtcacacttcgcgtgccgctcaaagtcgattaccattatggctcgacgtggtatgacgcgaaataaaaaggatcc

SEQ ID NO: 2557 - DNA, 2712 bp, Artificial Sequence
  Description of Artificial Sequence: Synthetic DNA sequence of Bacillus caldolyticus EA1 DNA polymerase F810R
atgaaatacctgctgccgaccgctgctgctggtctgctgctcctcgctgcccagccggcgatggccatgggattgaaaaaaaagcttgttttaatcgacggcagcagcgtggcgtaccgcgcctttttcgccttgccgcttttgcataacgacaaaggcatccatacgaacgccgtctacgggtttacgatgatgttgaataaaattttggcggaagaagagccaactcatatgcttgtcgcgtttgacgccgggaaaacgacgttccggcatgaagcgtttcaagagtataaaggtgggcgccagcagacgccaccggagctgtcggagcagtttccgctgttgcgcgagctgctgagggcgtatcgcatccccgcctatgaactcgagaactacgaagcggacgatattatcggaacgcttgccgcccgcgctgagcaggaagggtttgaggtgaaagtcatttccggcgaccgcgatctgacccagctcgcctccccccatgtgacggtggacattacgaaaaaagggattaccgatatcgaaccgtacacgccggaggcggtccgcgaaaaatacggcttaactccggaacaaatcgttgatttgaaaggattgatgggcgacaaatcggacaacattcccggagtgccgggcatcggggaaaagacggcggtcaagctgctcaagcaattcggcacggtcgaaaacgtgcttgcctccattgacgagatcaaaggcgaaaagttgaaagaaacgctgcgccaacaccgggagatggcgctgttaagcaaaaagctcgccgccattcgccgcgacgccccggtcgagctctcgcttgatgacatcgtctatcaaggggaagaccgggagaaagtggtcgctttatttaaagagcttgggtttcaatcgtttttagagaaaatggaatcgccgtcatcagaagaggaaaaaccgcttgccaagatggcatttacgcttgctgaccgcgtgacggaggagatgcttgccgacaaggcggcgcttgtcgttgaagtggtcgaggaaaattatcatgatgcgccgatcgtcggcatcgctgtggtcaacgaacatggacggtttttcctgcgcccggagacggcgcttgccgatccgcagtttgtcgcctggcttggtgatgaaacgaagaaaaaaagcatgtttgactcaaagcgcgcggcagtcgccttgaaatggaaaggaattgagctatgcggcgtttcctttgatttattgctggccgcctatttgcttgatccggcgcaaggtgttgatgatgtggctgccgcagcaaaaatgaagcaatacgaagcggtgcgctcggatgaagcggtgtatggcaaaggggcgaagcgggccgtgccggatgagccagtgctcgccgagcatctcgtccgcaaggcggcggcgatttgggcgctcgaacgtccgtttttggatgagctgcgccgcaacgaacaagatcggttgctcgtcgagctcgagcagccgttgtcttcgattttggcggaaatggaatttgccggagtgaaagtggatacgaagcggctcgaacagatgggcgaagagctcgccgagcagctgcgcacggtcgagcagcgcatttatgagctcgccggccaagaattcaacatcaattcaccgaaacagctcggcgtcattttatttgaaaaactgcagctgcccgtcttgaaaaaaacgaaaaccggctactccacttcggcggatgtgcttgaaaaacttgcgccttatcacgagatcgtggaaaacattttgcattaccgccagcttggcaagttgcagtcgacgtatattgaaggattgctgaaagtcgtgcgacccgatacaaagaaggtgcatacgattttcaatcaggcgttgacgcaaaccggacggctcagctcgacggagccgaacttgcaaaacattccgattcggcttgaggaaggacggaaaatccgccaagcgttcgtgccgtcggagtctgattggctcattttcgctgccgactactcgcaaattgagttgcgcgtcctcgcccatattgcggaagatgacaatttaatggaagcgttccgccgcgatttggatatccatacgaaaacagcgatggacattttccaagtgagcgaggacgaagtgacgcccaacatgcgccgtcaggcgaaggcggtcaactttgggatcgtttacgggatcagtgattacggcttggcgcaaaacttaaatatttcacgcaaagaggccgctgaattcatcgagcgctacttcgaaagcttccctggcgtgaagcggtatatggaaaacattgtgcaagaagcaaaacagaaagggtatgtgacgacgctgctgcatcggcgccgctatttgccggatatcacgagccgcaacttcaacgtccgcagccgagctgaacggatggcgatgaacacgccgattcaagggagcgccgctgacattattaaaaaggcgatgatcgatctgaacgctagactgaaggaagagcggctgcaagcgcgccttttgctacaggtgcatgacgagctcattttggaggcgccgaaagaagagatggagcggctgtgccggctcgttccggaagtgatggagcaagcggtcacacttcgcgtgccgctcaaagtcgattaccattatggctcgacgtggtatgacgcgaaataaaaaggatcc

SEQ ID NO: 2558 - DNA, 2712 bp, Artificial Sequence
  Description of Artificial Sequence: Synthetic DNA sequence of Bacillus caldolyticus EA1 DNA polymerase F810C
atgaaatacctgctgccgaccgctgctgctggtctgctgctcctcgctgcccagccggcgatggccatgggattgaaaaaaaagcttgttttaatcgacggcagcagcgtggcgtaccgcgcctttttcgccttgccgcttttgcataacgacaaaggcatccatacgaacgccgtctacgggtttacgatgatgttgaataaaattttggcggaagaagagccaactcatatgcttgtcgcgtttgacgccgggaaaacgacgttccggcatgaagcgtttcaagagtataaaggtgggcgccagcagacgccaccggagctgtcggagcagtttccgctgttgcgcgagctgctgagggcgtatcgcatccccgcctatgaactcgagaactacgaagcggacgatattatcggaacgcttgccgcccgcgctgagcaggaagggtttgaggtgaaagtcatttccggcgaccgcgatctgacccagctcgcctccccccatgtgacggtggacattacgaaaaaagggattaccgatatcgaaccgtacacgccggaggcggtccgcgaaaaatacggcttaactccggaacaaatcgttgatttgaaaggattgatgggcgacaaatcggacaacattcccggagtgccgggcatcggggaaaagacggcggtcaagctgctcaagcaattcggcacggtcgaaaacgtgcttgcctccattgacgagatcaaaggcgaaaagttgaaagaaacgctgcgccaacaccgggagatggcgctgttaagcaaaaagctcgccgccattcgccgcgacgccccggtcgagctctcgcttgatgacatcgtctatcaaggggaagaccgggagaaagtggtcgctttatttaaagagcttgggtttcaatcgtttttagagaaaatggaatcgccgtcatcagaagaggaaaaaccgcttgccaagatggcatttacgcttgctgaccgcgtgacggaggagatgcttgccgacaaggcggcgcttgtcgttgaagtggtcgaggaaaattatcatgatgcgccgatcgtcggcatcgctgtggtcaacgaacatggacggtttttcctgcgcccggagacggcgcttgccgatccgcagtttgtcgcctggcttggtgatgaaacgaagaaaaaaagcatgtttgactcaaagcgcgcggcagtcgccttgaaatggaaaggaattgagctatgcggcgtttcctttgatttattgctggccgcctatttgcttgatccggcgcaaggtgttgatgatgtggctgccgcagcaaaaatgaagcaatacgaagcggtgcgctcggatgaagcggtgtatggcaaaggggcgaagcgggccgtgccggatgagccagtgctcgccgagcatctcgtccgcaaggcggcggcgatttgggcgctcgaacgtccgtttttggatgagctgcgccgcaacgaacaagatcggttgctcgtcgagctcgagcagccgttgtcttcgattttggcggaaatggaatttgccggagtgaaagtggatacgaagcggctcgaacagatgggcgaagagctcgccgagcagctgcgcacggtcgagcagcgcatttatgagctcgccggccaagaattcaacatcaattcaccgaaacagctcggcgtcattttatttgaaaaactgcagctgcccgtcttgaaaaaaacgaaaaccggctactccacttcggcggatgtgcttgaaaaacttgcgccttatcacgagatcgtggaaaacattttgcattaccgccagcttggcaagttgcagtcgacgtatattgaaggattgctgaaagtcgtgcgacccgatacaaagaaggtgcatacgattttcaatcaggcgttgacgcaaaccggacggctcagctcgacggagccgaacttgcaaaacattccgattcggcttgaggaaggacggaaaatccgccaagcgttcgtgccgtcggagtctgattggctcattttcgctgccgactactcgcaaattgagttgcgcgtcctcgcccatattgcggaagatgacaatttaatggaagcgttccgccgcgatttggatatccatacgaaaacagcgatggacattttccaagtgagcgaggacgaagtgacgcccaacatgcgccgtcaggcgaaggcggtcaactttgggatcgtttacgggatcagtgattacggcttggcgcaaaacttaaatatttcacgcaaagaggccgctgaattcatcgagcgctacttcgaaagcttccctggcgtgaagcggtatatggaaaacattgtgcaagaagcaaaacagaaagggtatgtgacgacgctgctgcatcggcgccgctatttgccggatatcacgagccgcaacttcaacgtccgcagctgtgctgaacggatggcgatgaacacgccgattcaagggagcgccgctgacattattaaaaaggcgatgatcgatctgaacgctagactgaaggaagagcggctgcaagcgcgccttttgctacaggtgcatgacgagctcattttggaggcgccgaaagaagagatggagcggctgtgccggctcgttccggaagtgatggagcaagcggtcacacttcgcgtgccgctcaaagtcgattaccattatggctcgacgtggtatgacgcgaaataaaaaggatcc

SEQ ID NO: 2559 - DNA, 2712 bp, Artificial Sequence
  Description of Artificial Sequence: Synthetic DNA sequence of Bacillus caldolyticus EA1 DNA polymerase F810G
atgaaatacctgctgccgaccgctgctgctggtctgctgctcctcgctgcccagccggcgatggccatgggattgaaaaaaaagcttgttttaatcgacggcagcagcgtggcgtaccgcgcctttttcgccttgccgcttttgcataacgacaaaggcatccatacgaacgccgtctacgggtttacgatgatgttgaataaaattttggcggaagaagagccaactcatatgcttgtcgcgtttgacgccgggaaaacgacgttccggcatgaagcgtttcaagagtataaaggtgggcgccagcagacgccaccggagctgtcggagcagtttccgctgttgcgcgagctgctgagggcgtatcgcatccccgcctatgaactcgagaactacgaagcggacgatattatcggaacgcttgccgcccgcgctgagcaggaagggtttgaggtgaaagtcatttccggcgaccgcgatctgacccagctcgcctccccccatgtgacggtggacattacgaaaaaagggattaccgatatcgaaccgtacacgccggaggcggtccgcgaaaaatacggcttaactccggaacaaatcgttgatttgaaaggattgatgggcgacaaatcggacaacattcccggagtgccgggcatcggggaaaagacggcggtcaagctgctcaagcaattcggcacggtcgaaaacgtgcttgcctccattgacgagatcaaaggcgaaaagttgaaagaaacgctgcgccaacaccgggagatggcgctgttaagcaaaaagctcgccgccattcgccgcgacgccccggtcgagctctcgcttgatgacatcgtctatcaaggggaagaccgggagaaagtggtcgctttatttaaagagcttgggtttcaatcgtttttagagaaaatggaatcgccgtcatcagaagaggaaaaaccgcttgccaagatggcatttacgcttgctgaccgcgtgacggaggagatgcttgccgacaaggcggcgcttgtcgttgaagtggtcgaggaaaattatcatgatgcgccgatcgtcggcatcgctgtggtcaacgaacatggacggtttttcctgcgcccggagacggcgcttgccgatccgcagtttgtcgcctggcttggtgatgaaacgaagaaaaaaagcatgtttgactcaaagcgcgcggcagtcgccttgaaatggaaaggaattgagctatgcggcgtttcctttgatttattgctggccgcctatttgcttgatccggcgcaaggtgttgatgatgtggctgccgcagcaaaaatgaagcaatacgaagcggtgcgctcggatgaagcggtgtatggcaaaggggcgaagcgggccgtgccggatgagccagtgctcgccgagcatctcgtccgcaaggcggcggcgatttgggcgctcgaacgtccgtttttggatgagctgcgccgcaacgaacaagatcggttgctcgtcgagctcgagcagccgttgtcttcgattttggcggaaatggaatttgccggagtgaaagtggatacgaagcggctcgaacagatgggcgaagagctcgccgagcagctgcgcacggtcgagcagcgcatttatgagctcgccggccaagaattcaacatcaattcaccgaaacagctcggcgtcattttatttgaaaaactgcagctgcccgtcttgaaaaaaacgaaaaccggctactccacttcggcggatgtgcttgaaaaacttgcgccttatcacgagatcgtggaaaacattttgcattaccgccagcttggcaagttgcagtcgacgtatattgaaggattgctgaaagtcgtgcgacccgatacaaagaaggtgcatacgattttcaatcaggcgttgacgcaaaccggacggctcagctcgacggagccgaacttgcaaaacattccgattcggcttgaggaaggacggaaaatccgccaagcgttcgtgccgtcggagtctgattggctcattttcgctgccgactactcgcaaattgagttgcgcgtcctcgcccatattgcggaagatgacaatttaatggaagcgttccgccgcgatttggatatccatacgaaaacagcgatggacattttccaagtgagcgaggacgaagtgacgcccaacatgcgccgtcaggcgaaggcggtcaactttgggatcgtttacgggatcagtgattacggcttggcgcaaaacttaaatatttcacgcaaagaggccgctgaattcatcgagcgctacttcgaaagcttccctggcgtgaagcggtatatggaaaacattgtgcaagaagcaaaacagaaagggtatgtgacgacgctgctgcatcggcgccgctatttgccggatatcacgagccgcaacttcaacgtccgcagcggtgctgaacggatggcgatgaacacgccgattcaagggagcgccgctgacattattaaaaaggcgatgatcgatctgaacgctagactgaaggaagagcggctgcaagcgcgccttttgctacaggtgcatgacgagctcattttggaggcgccgaaagaagagatggagcggctgtgccggctcgttccggaagtgatggagcaagcggtcacacttcgcgtgccgctcaaagtcgattaccattatggctcgacgtggtatgacgcgaaataaaaaggatcc

SEQ ID NO: 2560 - DNA, 2712 bp, Artificial Sequence
  Description of Artificial Sequence: Synthetic DNA sequence of Bacillus caldolyticus EA1 DNA polymerase F810Q
atgaaatacctgctgccgaccgctgctgctggtctgctgctcctcgctgcccagccggcgatggccatgggattgaaaaaaaagcttgttttaatcgacggcagcagcgtggcgtaccgcgcctttttcgccttgccgcttttgcataacgacaaaggcatccatacgaacgccgtctacgggtttacgatgatgttgaataaaattttggcggaagaagagccaactcatatgcttgtcgcgtttgacgccgggaaaacgacgttccggcatgaagcgtttcaagagtataaaggtgggcgccagcagacgccaccggagctgtcggagcagtttccgctgttgcgcgagctgctgagggcgtatcgcatccccgcctatgaactcgagaactacgaagcggacgatattatcggaacgcttgccgcccgcgctgagcaggaagggtttgaggtgaaagtcatttccggcgaccgcgatctgacccagctcgcctccccccatgtgacggtggacattacgaaaaaagggattaccgatatcgaaccgtacacgccggaggcggtccgcgaaaaatacggcttaactccggaacaaatcgttgatttgaaaggattgatgggcgacaaatcggacaacattcccggagtgccgggcatcggggaaaagacggcggtcaagctgctcaagcaattcggcacggtcgaaaacgtgcttgcctccattgacgagatcaaaggcgaaaagttgaaagaaacgctgcgccaacaccgggagatggcgctgttaagcaaaaagctcgccgccattcgccgcgacgccccggtcgagctctcgcttgatgacatcgtctatcaaggggaagaccgggagaaagtggtcgctttatttaaagagcttgggtttcaatcgtttttagagaaaatggaatcgccgtcatcagaagaggaaaaaccgcttgccaagatggcatttacgcttgctgaccgcgtgacggaggagatgcttgccgacaaggcggcgcttgtcgttgaagtggtcgaggaaaattatcatgatgcgccgatcgtcggcatcgctgtggtcaacgaacatggacggtttttcctgcgcccggagacggcgcttgccgatccgcagtttgtcgcctggcttggtgatgaaacgaagaaaaaaagcatgtttgactcaaagcgcgcggcagtcgccttgaaatggaaaggaattgagctatgcggcgtttcctttgatttattgctggccgcctatttgcttgatccggcgcaaggtgttgatgatgtggctgccgcagcaaaaatgaagcaatacgaagcggtgcgctcggatgaagcggtgtatggcaaaggggcgaagcgggccgtgccggatgagccagtgctcgccgagcatctcgtccgcaaggcggcggcgatttgggcgctcgaacgtccgtttttggatgagctgcgccgcaacgaacaagatcggttgctcgtcgagctcgagcagccgttgtcttcgattttggcggaaatggaatttgccggagtgaaagtggatacgaagcggctcgaacagatgggcgaagagctcgccgagcagctgcgcacggtcgagcagcgcatttatgagctcgccggccaagaattcaacatcaattcaccgaaacagctcggcgtcattttatttgaaaaactgcagctgcccgtcttgaaaaaaacgaaaaccggctactccacttcggcggatgtgcttgaaaaacttgcgccttatcacgagatcgtggaaaacattttgcattaccgccagcttggcaagttgcagtcgacgtatattgaaggattgctgaaagtcgtgcgacccgatacaaagaaggtgcatacgattttcaatcaggcgttgacgcaaaccggacggctcagctcgacggagccgaacttgcaaaacattccgattcggcttgaggaaggacggaaaatccgccaagcgttcgtgccgtcggagtctgattggctcattttcgctgccgactactcgcaaattgagttgcgcgtcctcgcccatattgcggaagatgacaatttaatggaagcgttccgccgcgatttggatatccatacgaaaacagcgatggacattttccaagtgagcgaggacgaagtgacgcccaacatgcgccgtcaggcgaaggcggtcaactttgggatcgtttacgggatcagtgattacggcttggcgcaaaacttaaatatttcacgcaaagaggccgctgaattcatcgagcgctacttcgaaagcttccctggcgtgaagcggtatatggaaaacattgtgcaagaagcaaaacagaaagggtatgtgacgacgctgctgcatcggcgccgctatttgccggatatcacgagccgcaacttcaacgtccgcagccaagctgaacggatggcgatgaacacgccgattcaagggagcgccgctgacattattaaaaaggcgatgatcgatctgaacgctagactgaaggaagagcggctgcaagcgcgccttttgctacaggtgcatgacgagctcattttggaggcgccgaaagaagagatggagcggctgtgccggctcgttccggaagtgatggagcaagcggtcacacttcgcgtgccgctcaaagtcgattaccattatggctcgacgtggtatgacgcgaaataaaaaggatcc

SEQ ID NO: 2561 - DNA, 2712 bp, Artificial Sequence
  Description of Artificial Sequence: Synthetic DNA sequence of Bacillus caldolyticus EA1 DNA polymerase F810H
atgaaatacctgctgccgaccgctgctgctggtctgctgctcctcgctgcccagccggcgatggccatgggattgaaaaaaaagcttgttttaatcgacggcagcagcgtggcgtaccgcgcctttttcgccttgccgcttttgcataacgacaaaggcatccatacgaacgccgtctacgggtttacgatgatgttgaataaaattttggcggaagaagagccaactcatatgcttgtcgcgtttgacgccgggaaaacgacgttccggcatgaagcgtttcaagagtataaaggtgggcgccagcagacgccaccggagctgtcggagcagtttccgctgttgcgcgagctgctgagggcgtatcgcatccccgcctatgaactcgagaactacgaagcggacgatattatcggaacgcttgccgcccgcgctgagcaggaagggtttgaggtgaaagtcatttccggcgaccgcgatctgacccagctcgcctccccccatgtgacggtggacattacgaaaaaagggattaccgatatcgaaccgtacacgccggaggcggtccgcgaaaaatacggcttaactccggaacaaatcgttgatttgaaaggattgatgggcgacaaatcggacaacattcccggagtgccgggcatcggggaaaagacggcggtcaagctgctcaagcaattcggcacggtcgaaaacgtgcttgcctccattgacgagatcaaaggcgaaaagttgaaagaaacgctgcgccaacaccgggagatggcgctgttaagcaaaaagctcgccgccattcgccgcgacgccccggtcgagctctcgcttgatgacatcgtctatcaaggggaagaccgggagaaagtggtcgctttatttaaagagcttgggtttcaatcgtttttagagaaaatggaatcgccgtcatcagaagaggaaaaaccgcttgccaagatggcatttacgcttgctgaccgcgtgacggaggagatgcttgccgacaaggcggcgcttgtcgttgaagtggtcgaggaaaattatcatgatgcgccgatcgtcggcatcgctgtggtcaacgaacatggacggtttttcctgcgcccggagacggcgcttgccgatccgcagtttgtcgcctggcttggtgatgaaacgaagaaaaaaagcatgtttgactcaaagcgcgcggcagtcgccttgaaatggaaaggaattgagctatgcggcgtttcctttgatttattgctggccgcctatttgcttgatccggcgcaaggtgttgatgatgtggctgccgcagcaaaaatgaagcaatacgaagcggtgcgctcggatgaagcggtgtatggcaaaggggcgaagcgggccgtgccggatgagccagtgctcgccgagcatctcgtccgcaaggcggcggcgatttgggcgctcgaacgtccgtttttggatgagctgcgccgcaacgaacaagatcggttgctcgtcgagctcgagcagccgttgtcttcgattttggcggaaatggaatttgccggagtgaaagtggatacgaagcggctcgaacagatgggcgaagagctcgccgagcagctgcgcacggtcgagcagcgcatttatgagctcgccggccaagaattcaacatcaattcaccgaaacagctcggcgtcattttatttgaaaaactgcagctgcccgtcttgaaaaaaacgaaaaccggctactccacttcggcggatgtgcttgaaaaacttgcgccttatcacgagatcgtggaaaacattttgcattaccgccagcttggcaagttgcagtcgacgtatattgaaggattgctgaaagtcgtgcgacccgatacaaagaaggtgcatacgattttcaatcaggcgttgacgcaaaccggacggctcagctcgacggagccgaacttgcaaaacattccgattcggcttgaggaaggacggaaaatccgccaagcgttcgtgccgtcggagtctgattggctcattttcgctgccgactactcgcaaattgagttgcgcgtcctcgcccatattgcggaagatgacaatttaatggaagcgttccgccgcgatttggatatccatacgaaaacagcgatggacattttccaagtgagcgaggacgaagtgacgcccaacatgcgccgtcaggcgaaggcggtcaactttgggatcgtttacgggatcagtgattacggcttggcgcaaaacttaaatatttcacgcaaagaggccgctgaattcatcgagcgctacttcgaaagcttccctggcgtgaagcggtatatggaaaacattgtgcaagaagcaaaacagaaagggtatgtgacgacgctgctgcatcggcgccgctatttgccggatatcacgagccgcaacttcaacgtccgcagccatgctgaacggatggcgatgaacacgccgattcaagggagcgccgctgacattattaaaaaggcgatgatcgatctgaacgctagactgaaggaagagcggctgcaagcgcgccttttgctacaggtgcatgacgagctcattttggaggcgccgaaagaagagatggagcggctgtgccggctcgttccggaagtgatggagcaagcggtcacacttcgcgtgccgctcaaagtcgattaccattatggctcgacgtggtatgacgcgaaataaaaaggatcc

SEQ ID NO: 2562 - DNA, 2712 bp, Artificial Sequence
  Description of Artificial Sequence: Synthetic DNA sequence of Bacillus caldolyticus EA1 DNA polymerase F810I
atgaaatacctgctgccgaccgctgctgctggtctgctgctcctcgctgcccagccggcgatggccatgggattgaaaaaaaagcttgttttaatcgacggcagcagcgtggcgtaccgcgcctttttcgccttgccgcttttgcataacgacaaaggcatccatacgaacgccgtctacgggtttacgatgatgttgaataaaattttggcggaagaagagccaactcatatgcttgtcgcgtttgacgccgggaaaacgacgttccggcatgaagcgtttcaagagtataaaggtgggcgccagcagacgccaccggagctgtcggagcagtttccgctgttgcgcgagctgctgagggcgtatcgcatccccgcctatgaactcgagaactacgaagcggacgatattatcggaacgcttgccgcccgcgctgagcaggaagggtttgaggtgaaagtcatttccggcgaccgcgatctgacccagctcgcctccccccatgtgacggtggacattacgaaaaaagggattaccgatatcgaaccgtacacgccggaggcggtccgcgaaaaatacggcttaactccggaacaaatcgttgatttgaaaggattgatgggcgacaaatcggacaacattcccggagtgccgggcatcggggaaaagacggcggtcaagctgctcaagcaattcggcacggtcgaaaacgtgcttgcctccattgacgagatcaaaggcgaaaagttgaaagaaacgctgcgccaacaccgggagatggcgctgttaagcaaaaagctcgccgccattcgccgcgacgccccggtcgagctctcgcttgatgacatcgtctatcaaggggaagaccgggagaaagtggtcgctttatttaaagagcttgggtttcaatcgtttttagagaaaatggaatcgccgtcatcagaagaggaaaaaccgcttgccaagatggcatttacgcttgctgaccgcgtgacggaggagatgcttgccgacaaggcggcgcttgtcgttgaagtggtcgaggaaaattatcatgatgcgccgatcgtcggcatcgctgtggtcaacgaacatggacggtttttcctgcgcccggagacggcgcttgccgatccgcagtttgtcgcctggcttggtgatgaaacgaagaaaaaaagcatgtttgactcaaagcgcgcggcagtcgccttgaaatggaaaggaattgagctatgcggcgtttcctttgatttattgctggccgcctatttgcttgatccggcgcaaggtgttgatgatgtggctgccgcagcaaaaatgaagcaatacgaagcggtgcgctcggatgaagcggtgtatggcaaaggggcgaagcgggccgtgccggatgagccagtgctcgccgagcatctcgtccgcaaggcggcggcgatttgggcgctcgaacgtccgtttttggatgagctgcgccgcaacgaacaagatcggttgctcgtcgagctcgagcagccgttgtcttcgattttggcggaaatggaatttgccggagtgaaagtggatacgaagcggctcgaacagatgggcgaagagctcgccgagcagctgcgcacggtcgagcagcgcatttatgagctcgccggccaagaattcaacatcaattcaccgaaacagctcggcgtcattttatttgaaaaactgcagctgcccgtcttgaaaaaaacgaaaaccggctactccacttcggcggatgtgcttgaaaaacttgcgccttatcacgagatcgtggaaaacattttgcattaccgccagcttggcaagttgcagtcgacgtatattgaaggattgctgaaagtcgtgcgacccgatacaaagaaggtgcatacgattttcaatcaggcgttgacgcaaaccggacggctcagctcgacggagccgaacttgcaaaacattccgattcggcttgaggaaggacggaaaatccgccaagcgttcgtgccgtcggagtctgattggctcattttcgctgccgactactcgcaaattgagttgcgcgtcctcgcccatattgcggaagatgacaatttaatggaagcgttccgccgcgatttggatatccatacgaaaacagcgatggacattttccaagtgagcgaggacgaagtgacgcccaacatgcgccgtcaggcgaaggcggtcaactttgggatcgtttacgggatcagtgattacggcttggcgcaaaacttaaatatttcacgcaaagaggccgctgaattcatcgagcgctacttcgaaagcttccctggcgtgaagcggtatatggaaaacattgtgcaagaagcaaaacagaaagggtatgtgacgacgctgctgcatcggcgccgctatttgccggatatcacgagccgcaacttcaacgtccgcagcattgctgaacggatggcgatgaacacgccgattcaagggagcgccgctgacattattaaaaaggcgatgatcgatctgaacgctagactgaaggaagagcggctgcaagcgcgccttttgctacaggtgcatgacgagctcattttggaggcgccgaaagaagagatggagcggctgtgccggctcgttccggaagtgatggagcaagcggtcacacttcgcgtgccgctcaaagtcgattaccattatggctcgacgtggtatgacgcgaaataaaaaggatcc

SEQ ID NO: 2563 - DNA, 2712 bp, Artificial Sequence
  Description of Artificial Sequence: Synthetic DNA sequence of Bacillus caldolyticus EA1 DNA polymerase F810L
atgaaatacctgctgccgaccgctgctgctggtctgctgctcctcgctgcccagccggcgatggccatgggattgaaaaaaaagcttgttttaatcgacggcagcagcgtggcgtaccgcgcctttttcgccttgccgcttttgcataacgacaaaggcatccatacgaacgccgtctacgggtttacgatgatgttgaataaaattttggcggaagaagagccaactcatatgcttgtcgcgtttgacgccgggaaaacgacgttccggcatgaagcgtttcaagagtataaaggtgggcgccagcagacgccaccggagctgtcggagcagtttccgctgttgcgcgagctgctgagggcgtatcgcatccccgcctatgaactcgagaactacgaagcggacgatattatcggaacgcttgccgcccgcgctgagcaggaagggtttgaggtgaaagtcatttccggcgaccgcgatctgacccagctcgcctccccccatgtgacggtggacattacgaaaaaagggattaccgatatcgaaccgtacacgccggaggcggtccgcgaaaaatacggcttaactccggaacaaatcgttgatttgaaaggattgatgggcgacaaatcggacaacattcccggagtgccgggcatcggggaaaagacggcggtcaagctgctcaagcaattcggcacggtcgaaaacgtgcttgcctccattgacgagatcaaaggcgaaaagttgaaagaaacgctgcgccaacaccgggagatggcgctgttaagcaaaaagctcgccgccattcgccgcgacgccccggtcgagctctcgcttgatgacatcgtctatcaaggggaagaccgggagaaagtggtcgctttatttaaagagcttgggtttcaatcgtttttagagaaaatggaatcgccgtcatcagaagaggaaaaaccgcttgccaagatggcatttacgcttgctgaccgcgtgacggaggagatgcttgccgacaaggcggcgcttgtcgttgaagtggtcgaggaaaattatcatgatgcgccgatcgtcggcatcgctgtggtcaacgaacatggacggtttttcctgcgcccggagacggcgcttgccgatccgcagtttgtcgcctggcttggtgatgaaacgaagaaaaaaagcatgtttgactcaaagcgcgcggcagtcgccttgaaatggaaaggaattgagctatgcggcgtttcctttgatttattgctggccgcctatttgcttgatccggcgcaaggtgttgatgatgtggctgccgcagcaaaaatgaagcaatacgaagcggtgcgctcggatgaagcggtgtatggcaaaggggcgaagcgggccgtgccggatgagccagtgctcgccgagcatctcgtccgcaaggcggcggcgatttgggcgctcgaacgtccgtttttggatgagctgcgccgcaacgaacaagatcggttgctcgtcgagctcgagcagccgttgtcttcgattttggcggaaatggaatttgccggagtgaaagtggatacgaagcggctcgaacagatgggcgaagagctcgccgagcagctgcgcacggtcgagcagcgcatttatgagctcgccggccaagaattcaacatcaattcaccgaaacagctcggcgtcattttatttgaaaaactgcagctgcccgtcttgaaaaaaacgaaaaccggctactccacttcggcggatgtgcttgaaaaacttgcgccttatcacgagatcgtggaaaacattttgcattaccgccagcttggcaagttgcagtcgacgtatattgaaggattgctgaaagtcgtgcgacccgatacaaagaaggtgcatacgattttcaatcaggcgttgacgcaaaccggacggctcagctcgacggagccgaacttgcaaaacattccgattcggcttgaggaaggacggaaaatccgccaagcgttcgtgccgtcggagtctgattggctcattttcgctgccgactactcgcaaattgagttgcgcgtcctcgcccatattgcggaagatgacaatttaatggaagcgttccgccgcgatttggatatccatacgaaaacagcgatggacattttccaagtgagcgaggacgaagtgacgcccaacatgcgccgtcaggcgaaggcggtcaactttgggatcgtttacgggatcagtgattacggcttggcgcaaaacttaaatatttcacgcaaagaggccgctgaattcatcgagcgctacttcgaaagcttccctggcgtgaagcggtatatggaaaacattgtgcaagaagcaaaacagaaagggtatgtgacgacgctgctgcatcggcgccgctatttgccggatatcacgagccgcaacttcaacgtccgcagcttagctgaacggatggcgatgaacacgccgattcaagggagcgccgctgacattattaaaaaggcgatgatcgatctgaacgctagactgaaggaagagcggctgcaagcgcgccttttgctacaggtgcatgacgagctcattttggaggcgccgaaagaagagatggagcggctgtgccggctcgttccggaagtgatggagcaagcggtcacacttcgcgtgccgctcaaagtcgattaccattatggctcgacgtggtatgacgcgaaataaaaaggatcc

SEQ ID NO: 2564 - DNA, 2712 bp, Artificial Sequence
  Description of Artificial Sequence: Synthetic DNA sequence of Bacillus caldolyticus EA1 DNA polymerase F810K
atgaaatacctgctgccgaccgctgctgctggtctgctgctcctcgctgcccagccggcgatggccatgggattgaaaaaaaagcttgttttaatcgacggcagcagcgtggcgtaccgcgcctttttcgccttgccgcttttgcataacgacaaaggcatccatacgaacgccgtctacgggtttacgatgatgttgaataaaattttggcggaagaagagccaactcatatgcttgtcgcgtttgacgccgggaaaacgacgttccggcatgaagcgtttcaagagtataaaggtgggcgccagcagacgccaccggagctgtcggagcagtttccgctgttgcgcgagctgctgagggcgtatcgcatccccgcctatgaactcgagaactacgaagcggacgatattatcggaacgcttgccgcccgcgctgagcaggaagggtttgaggtgaaagtcatttccggcgaccgcgatctgacccagctcgcctccccccatgtgacggtggacattacgaaaaaagggattaccgatatcgaaccgtacacgccggaggcggtccgcgaaaaatacggcttaactccggaacaaatcgttgatttgaaaggattgatgggcgacaaatcggacaacattcccggagtgccgggcatcggggaaaagacggcggtcaagctgctcaagcaattcggcacggtcgaaaacgtgcttgcctccattgacgagatcaaaggcgaaaagttgaaagaaacgctgcgccaacaccgggagatggcgctgttaagcaaaaagctcgccgccattcgccgcgacgccccggtcgagctctcgcttgatgacatcgtctatcaaggggaagaccgggagaaagtggtcgctttatttaaagagcttgggtttcaatcgtttttagagaaaatggaatcgccgtcatcagaagaggaaaaaccgcttgccaagatggcatttacgcttgctgaccgcgtgacggaggagatgcttgccgacaaggcggcgcttgtcgttgaagtggtcgaggaaaattatcatgatgcgccgatcgtcggcatcgctgtggtcaacgaacatggacggtttttcctgcgcccggagacggcgcttgccgatccgcagtttgtcgcctggcttggtgatgaaacgaagaaaaaaagcatgtttgactcaaagcgcgcggcagtcgccttgaaatggaaaggaattgagctatgcggcgtttcctttgatttattgctggccgcctatttgcttgatccggcgcaaggtgttgatgatgtggctgccgcagcaaaaatgaagcaatacgaagcggtgcgctcggatgaagcggtgtatggcaaaggggcgaagcgggccgtgccggatgagccagtgctcgccgagcatctcgtccgcaaggcggcggcgatttgggcgctcgaacgtccgtttttggatgagctgcgccgcaacgaacaagatcggttgctcgtcgagctcgagcagccgttgtcttcgattttggcggaaatggaatttgccggagtgaaagtggatacgaagcggctcgaacagatgggcgaagagctcgccgagcagctgcgcacggtcgagcagcgcatttatgagctcgccggccaagaattcaacatcaattcaccgaaacagctcggcgtcattttatttgaaaaactgcagctgcccgtcttgaaaaaaacgaaaaccggctactccacttcggcggatgtgcttgaaaaacttgcgccttatcacgagatcgtggaaaacattttgcattaccgccagcttggcaagttgcagtcgacgtatattgaaggattgctgaaagtcgtgcgacccgatacaaagaaggtgcatacgattttcaatcaggcgttgacgcaaaccggacggctcagctcgacggagccgaacttgcaaaacattccgattcggcttgaggaaggacggaaaatccgccaagcgttcgtgccgtcggagtctgattggctcattttcgctgccgactactcgcaaattgagttgcgcgtcctcgcccatattgcggaagatgacaatttaatggaagcgttccgccgcgatttggatatccatacgaaaacagcgatggacattttccaagtgagcgaggacgaagtgacgcccaacatgcgccgtcaggcgaaggcggtcaactttgggatcgtttacgggatcagtgattacggcttggcgcaaaacttaaatatttcacgcaaagaggccgctgaattcatcgagcgctacttcgaaagcttccctggcgtgaagcggtatatggaaaacattgtgcaagaagcaaaacagaaagggtatgtgacgacgctgctgcatcggcgccgctatttgccggatatcacgagccgcaacttcaacgtccgcagcaaagctgaacggatggcgatgaacacgccgattcaagggagcgccgctgacattattaaaaaggcgatgatcgatctgaacgctagactgaaggaagagcggctgcaagcgcgccttttgctacaggtgcatgacgagctcattttggaggcgccgaaagaagagatggagcggctgtgccggctcgttccggaagtgatggagcaagcggtcacacttcgcgtgccgctcaaagtcgattaccattatggctcgacgtggtatgacgcgaaataaaaaggatcc

SEQ ID NO: 2565 - DNA, 2712 bp, Artificial Sequence
  Description of Artificial Sequence: Synthetic DNA sequence of Bacillus caldolyticus EA1 DNA polymerase F810E
atgaaatacctgctgccgaccgctgctgctggtctgctgctcctcgctgcccagccggcgatggccatgggattgaaaaaaaagcttgttttaatcgacggcagcagcgtggcgtaccgcgcctttttcgccttgccgcttttgcataacgacaaaggcatccatacgaacgccgtctacgggtttacgatgatgttgaataaaattttggcggaagaagagccaactcatatgcttgtcgcgtttgacgccgggaaaacgacgttccggcatgaagcgtttcaagagtataaaggtgggcgccagcagacgccaccggagctgtcggagcagtttccgctgttgcgcgagctgctgagggcgtatcgcatccccgcctatgaactcgagaactacgaagcggacgatattatcggaacgcttgccgcccgcgctgagcaggaagggtttgaggtgaaagtcatttccggcgaccgcgatctgacccagctcgcctccccccatgtgacggtggacattacgaaaaaagggattaccgatatcgaaccgtacacgccggaggcggtccgcgaaaaatacggcttaactccggaacaaatcgttgatttgaaaggattgatgggcgacaaatcggacaacattcccggagtgccgggcatcggggaaaagacggcggtcaagctgctcaagcaattcggcacggtcgaaaacgtgcttgcctccattgacgagatcaaaggcgaaaagttgaaagaaacgctgcgccaacaccgggagatggcgctgttaagcaaaaagctcgccgccattcgccgcgacgccccggtcgagctctcgcttgatgacatcgtctatcaaggggaagaccgggagaaagtggtcgctttatttaaagagcttgggtttcaatcgtttttagagaaaatggaatcgccgtcatcagaagaggaaaaaccgcttgccaagatggcatttacgcttgctgaccgcgtgacggaggagatgcttgccgacaaggcggcgcttgtcgttgaagtggtcgaggaaaattatcatgatgcgccgatcgtcggcatcgctgtggtcaacgaacatggacggtttttcctgcgcccggagacggcgcttgccgatccgcagtttgtcgcctggcttggtgatgaaacgaagaaaaaaagcatgtttgactcaaagcgcgcggcagtcgccttgaaatggaaaggaattgagctatgcggcgtttcctttgatttattgctggccgcctatttgcttgatccggcgcaaggtgttgatgatgtggctgccgcagcaaaaatgaagcaatacgaagcggtgcgctcggatgaagcggtgtatggcaaaggggcgaagcgggccgtgccggatgagccagtgctcgccgagcatctcgtccgcaaggcggcggcgatttgggcgctcgaacgtccgtttttggatgagctgcgccgcaacgaacaagatcggttgctcgtcgagctcgagcagccgttgtcttcgattttggcggaaatggaatttgccggagtgaaagtggatacgaagcggctcgaacagatgggcgaagagctcgccgagcagctgcgcacggtcgagcagcgcatttatgagctcgccggccaagaattcaacatcaattcaccgaaacagctcggcgtcattttatttgaaaaactgcagctgcccgtcttgaaaaaaacgaaaaccggctactccacttcggcggatgtgcttgaaaaacttgcgccttatcacgagatcgtggaaaacattttgcattaccgccagcttggcaagttgcagtcgacgtatattgaaggattgctgaaagtcgtgcgacccgatacaaagaaggtgcatacgattttcaatcaggcgttgacgcaaaccggacggctcagctcgacggagccgaacttgcaaaacattccgattcggcttgaggaaggacggaaaatccgccaagcgttcgtgccgtcggagtctgattggctcattttcgctgccgactactcgcaaattgagttgcgcgtcctcgcccatattgcggaagatgacaatttaatggaagcgttccgccgcgatttggatatccatacgaaaacagcgatggacattttccaagtgagcgaggacgaagtgacgcccaacatgcgccgtcaggcgaaggcggtcaactttgggatcgtttacgggatcagtgattacggcttggcgcaaaacttaaatatttcacgcaaagaggccgctgaattcatcgagcgctacttcgaaagcttccctggcgtgaagcggtatatggaaaacattgtgcaagaagcaaaacagaaagggtatgtgacgacgctgctgcatcggcgccgctatttgccggatatcacgagccgcaacttcaacgtccgcagcgaagctgaacggatggcgatgaacacgccgattcaagggagcgccgctgacattattaaaaaggcgatgatcgatctgaacgctagactgaaggaagagcggctgcaagcgcgccttttgctacaggtgcatgacgagctcattttggaggcgccgaaagaagagatggagcggctgtgccggctcgttccggaagtgatggagcaagcggtcacacttcgcgtgccgctcaaagtcgattaccattatggctcgacgtggtatgacgcgaaataaaaaggatcc

SEQ ID NO: 2566 - DNA, 2712 bp, Artificial Sequence
  Description of Artificial Sequence: Synthetic DNA sequence of Bacillus caldolyticus EA1 DNA polymerase F810D
atgaaatacctgctgccgaccgctgctgctggtctgctgctcctcgctgcccagccggcgatggccatgggattgaaaaaaaagcttgttttaatcgacggcagcagcgtggcgtaccgcgcctttttcgccttgccgcttttgcataacgacaaaggcatccatacgaacgccgtctacgggtttacgatgatgttgaataaaattttggcggaagaagagccaactcatatgcttgtcgcgtttgacgccgggaaaacgacgttccggcatgaagcgtttcaagagtataaaggtgggcgccagcagacgccaccggagctgtcggagcagtttccgctgttgcgcgagctgctgagggcgtatcgcatccccgcctatgaactcgagaactacgaagcggacgatattatcggaacgcttgccgcccgcgctgagcaggaagggtttgaggtgaaagtcatttccggcgaccgcgatctgacccagctcgcctccccccatgtgacggtggacattacgaaaaaagggattaccgatatcgaaccgtacacgccggaggcggtccgcgaaaaatacggcttaactccggaacaaatcgttgatttgaaaggattgatgggcgacaaatcggacaacattcccggagtgccgggcatcggggaaaagacggcggtcaagctgctcaagcaattcggcacggtcgaaaacgtgcttgcctccattgacgagatcaaaggcgaaaagttgaaagaaacgctgcgccaacaccgggagatggcgctgttaagcaaaaagctcgccgccattcgccgcgacgccccggtcgagctctcgcttgatgacatcgtctatcaaggggaagaccgggagaaagtggtcgctttatttaaagagcttgggtttcaatcgtttttagagaaaatggaatcgccgtcatcagaagaggaaaaaccgcttgccaagatggcatttacgcttgctgaccgcgtgacggaggagatgcttgccgacaaggcggcgcttgtcgttgaagtggtcgaggaaaattatcatgatgcgccgatcgtcggcatcgctgtggtcaacgaacatggacggtttttcctgcgcccggagacggcgcttgccgatccgcagtttgtcgcctggcttggtgatgaaacgaagaaaaaaagcatgtttgactcaaagcgcgcggcagtcgccttgaaatggaaaggaattgagctatgcggcgtttcctttgatttattgctggccgcctatttgcttgatccggcgcaaggtgttgatgatgtggctgccgcagcaaaaatgaagcaatacgaagcggtgcgctcggatgaagcggtgtatggcaaaggggcgaagcgggccgtgccggatgagccagtgctcgccgagcatctcgtccgcaaggcggcggcgatttgggcgctcgaacgtccgtttttggatgagctgcgccgcaacgaacaagatcggttgctcgtcgagctcgagcagccgttgtcttcgattttggcggaaatggaatttgccggagtgaaagtggatacgaagcggctcgaacagatgggcgaagagctcgccgagcagctgcgcacggtcgagcagcgcatttatgagctcgccggccaagaattcaacatcaattcaccgaaacagctcggcgtcattttatttgaaaaactgcagctgcccgtcttgaaaaaaacgaaaaccggctactccacttcggcggatgtgcttgaaaaacttgcgccttatcacgagatcgtggaaaacattttgcattaccgccagcttggcaagttgcagtcgacgtatattgaaggattgctgaaagtcgtgcgacccgatacaaagaaggtgcatacgattttcaatcaggcgttgacgcaaaccggacggctcagctcgacggagccgaacttgcaaaacattccgattcggcttgaggaaggacggaaaatccgccaagcgttcgtgccgtcggagtctgattggctcattttcgctgccgactactcgcaaattgagttgcgcgtcctcgcccatattgcggaagatgacaatttaatggaagcgttccgccgcgatttggatatccatacgaaaacagcgatggacattttccaagtgagcgaggacgaagtgacgcccaacatgcgccgtcaggcgaaggcggtcaactttgggatcgtttacgggatcagtgattacggcttggcgcaaaacttaaatatttcacgcaaagaggccgctgaattcatcgagcgctacttcgaaagcttccctggcgtgaagcggtatatggaaaacattgtgcaagaagcaaaacagaaagggtatgtgacgacgctgctgcatcggcgccgctatttgccggatatcacgagccgcaacttcaacgtccgcagcgatgctgaacggatggcgatgaacacgccgattcaagggagcgccgctgacattattaaaaaggcgatgatcgatctgaacgctagactgaaggaagagcggctgcaagcgcgccttttgctacaggtgcatgacgagctcattttggaggcgccgaaagaagagatggagcggctgtgccggctcgttccggaagtgatggagcaagcggtcacacttcgcgtgccgctcaaagtcgattaccattatggctcgacgtggtatgacgcgaaataaaaaggatcc

SEQ ID NO: 2567 - DNA, 2712 bp, Artificial Sequence
  Description of Artificial Sequence: Synthetic DNA sequence of Bacillus caldolyticus EA1 DNA polymerase F810S
atgaaatacctgctgccgaccgctgctgctggtctgctgctcctcgctgcccagccggcgatggccatgggattgaaaaaaaagcttgttttaatcgacggcagcagcgtggcgtaccgcgcctttttcgccttgccgcttttgcataacgacaaaggcatccatacgaacgccgtctacgggtttacgatgatgttgaataaaattttggcggaagaagagccaactcatatgcttgtcgcgtttgacgccgggaaaacgacgttccggcatgaagcgtttcaagagtataaaggtgggcgccagcagacgccaccggagctgtcggagcagtttccgctgttgcgcgagctgctgagggcgtatcgcatccccgcctatgaactcgagaactacgaagcggacgatattatcggaacgcttgccgcccgcgctgagcaggaagggtttgaggtgaaagtcatttccggcgaccgcgatctgacccagctcgcctccccccatgtgacggtggacattacgaaaaaagggattaccgatatcgaaccgtacacgccggaggcggtccgcgaaaaatacggcttaactccggaacaaatcgttgatttgaaaggattgatgggcgacaaatcggacaacattcccggagtgccgggcatcggggaaaagacggcggtcaagctgctcaagcaattcggcacggtcgaaaacgtgcttgcctccattgacgagatcaaaggcgaaaagttgaaagaaacgctgcgccaacaccgggagatggcgctgttaagcaaaaagctcgccgccattcgccgcgacgccccggtcgagctctcgcttgatgacatcgtctatcaaggggaagaccgggagaaagtggtcgctttatttaaagagcttgggtttcaatcgtttttagagaaaatggaatcgccgtcatcagaagaggaaaaaccgcttgccaagatggcatttacgcttgctgaccgcgtgacggaggagatgcttgccgacaaggcggcgcttgtcgttgaagtggtcgaggaaaattatcatgatgcgccgatcgtcggcatcgctgtggtcaacgaacatggacggtttttcctgcgcccggagacggcgcttgccgatccgcagtttgtcgcctggcttggtgatgaaacgaagaaaaaaagcatgtttgactcaaagcgcgcggcagtcgccttgaaatggaaaggaattgagctatgcggcgtttcctttgatttattgctggccgcctatttgcttgatccggcgcaaggtgttgatgatgtggctgccgcagcaaaaatgaagcaatacgaagcggtgcgctcggatgaagcggtgtatggcaaaggggcgaagcgggccgtgccggatgagccagtgctcgccgagcatctcgtccgcaaggcggcggcgatttgggcgctcgaacgtccgtttttggatgagctgcgccgcaacgaacaagatcggttgctcgtcgagctcgagcagccgttgtcttcgattttggcggaaatggaatttgccggagtgaaagtggatacgaagcggctcgaacagatgggcgaagagctcgccgagcagctgcgcacggtcgagcagcgcatttatgagctcgccggccaagaattcaacatcaattcaccgaaacagctcggcgtcattttatttgaaaaactgcagctgcccgtcttgaaaaaaacgaaaaccggctactccacttcggcggatgtgcttgaaaaacttgcgccttatcacgagatcgtggaaaacattttgcattaccgccagcttggcaagttgcagtcgacgtatattgaaggattgctgaaagtcgtgcgacccgatacaaagaaggtgcatacgattttcaatcaggcgttgacgcaaaccggacggctcagctcgacggagccgaacttgcaaaacattccgattcggcttgaggaaggacggaaaatccgccaagcgttcgtgccgtcggagtctgattggctcattttcgctgccgactactcgcaaattgagttgcgcgtcctcgcccatattgcggaagatgacaatttaatggaagcgttccgccgcgatttggatatccatacgaaaacagcgatggacattttccaagtgagcgaggacgaagtgacgcccaacatgcgccgtcaggcgaaggcggtcaactttgggatcgtttacgggatcagtgattacggcttggcgcaaaacttaaatatttcacgcaaagaggccgctgaattcatcgagcgctacttcgaaagcttccctggcgtgaagcggtatatggaaaacattgtgcaagaagcaaaacagaaagggtatgtgacgacgctgctgcatcggcgccgctatttgccggatatcacgagccgcaacttcaacgtccgcagctctgctgaacggatggcgatgaacacgccgattcaagggagcgccgctgacattattaaaaaggcgatgatcgatctgaacgctagactgaaggaagagcggctgcaagcgcgccttttgctacaggtgcatgacgagctcattttggaggcgccgaaagaagagatggagcggctgtgccggctcgttccggaagtgatggagcaagcggtcacacttcgcgtgccgctcaaagtcgattaccattatggctcgacgtggtatgacgcgaaataaaaaggatcc

SEQ ID NO: 2568 - DNA, 2712 bp, Artificial Sequence
  Description of Artificial Sequence: Synthetic DNA sequence of Bacillus caldolyticus EA1 DNA polymerase F810Y
atgaaatacctgctgccgaccgctgctgctggtctgctgctcctcgctgcccagccggcgatggccatgggattgaaaaaaaagcttgttttaatcgacggcagcagcgtggcgtaccgcgcctttttcgccttgccgcttttgcataacgacaaaggcatccatacgaacgccgtctacgggtttacgatgatgttgaataaaattttggcggaagaagagccaactcatatgcttgtcgcgtttgacgccgggaaaacgacgttccggcatgaagcgtttcaagagtataaaggtgggcgccagcagacgccaccggagctgtcggagcagtttccgctgttgcgcgagctgctgagggcgtatcgcatccccgcctatgaactcgagaactacgaagcggacgatattatcggaacgcttgccgcccgcgctgagcaggaagggtttgaggtgaaagtcatttccggcgaccgcgatctgacccagctcgcctccccccatgtgacggtggacattacgaaaaaagggattaccgatatcgaaccgtacacgccggaggcggtccgcgaaaaatacggcttaactccggaacaaatcgttgatttgaaaggattgatgggcgacaaatcggacaacattcccggagtgccgggcatcggggaaaagacggcggtcaagctgctcaagcaattcggcacggtcgaaaacgtgcttgcctccattgacgagatcaaaggcgaaaagttgaaagaaacgctgcgccaacaccgggagatggcgctgttaagcaaaaagctcgccgccattcgccgcgacgccccggtcgagctctcgcttgatgacatcgtctatcaaggggaagaccgggagaaagtggtcgctttatttaaagagcttgggtttcaatcgtttttagagaaaatggaatcgccgtcatcagaagaggaaaaaccgcttgccaagatggcatttacgcttgctgaccgcgtgacggaggagatgcttgccgacaaggcggcgcttgtcgttgaagtggtcgaggaaaattatcatgatgcgccgatcgtcggcatcgctgtggtcaacgaacatggacggtttttcctgcgcccggagacggcgcttgccgatccgcagtttgtcgcctggcttggtgatgaaacgaagaaaaaaagcatgtttgactcaaagcgcgcggcagtcgccttgaaatggaaaggaattgagctatgcggcgtttcctttgatttattgctggccgcctatttgcttgatccggcgcaaggtgttgatgatgtggctgccgcagcaaaaatgaagcaatacgaagcggtgcgctcggatgaagcggtgtatggcaaaggggcgaagcgggccgtgccggatgagccagtgctcgccgagcatctcgtccgcaaggcggcggcgatttgggcgctcgaacgtccgtttttggatgagctgcgccgcaacgaacaagatcggttgctcgtcgagctcgagcagccgttgtcttcgattttggcggaaatggaatttgccggagtgaaagtggatacgaagcggctcgaacagatgggcgaagagctcgccgagcagctgcgcacggtcgagcagcgcatttatgagctcgccggccaagaattcaacatcaattcaccgaaacagctcggcgtcattttatttgaaaaactgcagctgcccgtcttgaaaaaaacgaaaaccggctactccacttcggcggatgtgcttgaaaaacttgcgccttatcacgagatcgtggaaaacattttgcattaccgccagcttggcaagttgcagtcgacgtatattgaaggattgctgaaagtcgtgcgacccgatacaaagaaggtgcatacgattttcaatcaggcgttgacgcaaaccggacggctcagctcgacggagccgaacttgcaaaacattccgattcggcttgaggaaggacggaaaatccgccaagcgttcgtgccgtcggagtctgattggctcattttcgctgccgactactcgcaaattgagttgcgcgtcctcgcccatattgcggaagatgacaatttaatggaagcgttccgccgcgatttggatatccatacgaaaacagcgatggacattttccaagtgagcgaggacgaagtgacgcccaacatgcgccgtcaggcgaaggcggtcaactttgggatcgtttacgggatcagtgattacggcttggcgcaaaacttaaatatttcacgcaaagaggccgctgaattcatcgagcgctacttcgaaagcttccctggcgtgaagcggtatatggaaaacattgtgcaagaagcaaaacagaaagggtatgtgacgacgctgctgcatcggcgccgctatttgccggatatcacgagccgcaacttcaacgtccgcagctatgctgaacggatggcgatgaacacgccgattcaagggagcgccgctgacattattaaaaaggcgatgatcgatctgaacgctagactgaaggaagagcggctgcaagcgcgccttttgctacaggtgcatgacgagctcattttggaggcgccgaaagaagagatggagcggctgtgccggctcgttccggaagtgatggagcaagcggtcacacttcgcgtgccgctcaaagtcgattaccattatggctcgacgtggtatgacgcgaaataaaaaggatcc

SEQ ID NO: 2569 - DNA, 2712 bp, Artificial Sequence
  Description of Artificial Sequence: Synthetic DNA sequence of Bacillus caldolyticus EA1 DNA polymerase F810W
atgaaatacctgctgccgaccgctgctgctggtctgctgctcctcgctgcccagccggcgatggccatgggattgaaaaaaaagcttgttttaatcgacggcagcagcgtggcgtaccgcgcctttttcgccttgccgcttttgcataacgacaaaggcatccatacgaacgccgtctacgggtttacgatgatgttgaataaaattttggcggaagaagagccaactcatatgcttgtcgcgtttgacgccgggaaaacgacgttccggcatgaagcgtttcaagagtataaaggtgggcgccagcagacgccaccggagctgtcggagcagtttccgctgttgcgcgagctgctgagggcgtatcgcatccccgcctatgaactcgagaactacgaagcggacgatattatcggaacgcttgccgcccgcgctgagcaggaagggtttgaggtgaaagtcatttccggcgaccgcgatctgacccagctcgcctccccccatgtgacggtggacattacgaaaaaagggattaccgatatcgaaccgtacacgccggaggcggtccgcgaaaaatacggcttaactccggaacaaatcgttgatttgaaaggattgatgggcgacaaatcggacaacattcccggagtgccgggcatcggggaaaagacggcggtcaagctgctcaagcaattcggcacggtcgaaaacgtgcttgcctccattgacgagatcaaaggcgaaaagttgaaagaaacgctgcgccaacaccgggagatggcgctgttaagcaaaaagctcgccgccattcgccgcgacgccccggtcgagctctcgcttgatgacatcgtctatcaaggggaagaccgggagaaagtggtcgctttatttaaagagcttgggtttcaatcgtttttagagaaaatggaatcgccgtcatcagaagaggaaaaaccgcttgccaagatggcatttacgcttgctgaccgcgtgacggaggagatgcttgccgacaaggcggcgcttgtcgttgaagtggtcgaggaaaattatcatgatgcgccgatcgtcggcatcgctgtggtcaacgaacatggacggtttttcctgcgcccggagacggcgcttgccgatccgcagtttgtcgcctggcttggtgatgaaacgaagaaaaaaagcatgtttgactcaaagcgcgcggcagtcgccttgaaatggaaaggaattgagctatgcggcgtttcctttgatttattgctggccgcctatttgcttgatccggcgcaaggtgttgatgatgtggctgccgcagcaaaaatgaagcaatacgaagcggtgcgctcggatgaagcggtgtatggcaaaggggcgaagcgggccgtgccggatgagccagtgctcgccgagcatctcgtccgcaaggcggcggcgatttgggcgctcgaacgtccgtttttggatgagctgcgccgcaacgaacaagatcggttgctcgtcgagctcgagcagccgttgtcttcgattttggcggaaatggaatttgccggagtgaaagtggatacgaagcggctcgaacagatgggcgaagagctcgccgagcagctgcgcacggtcgagcagcgcatttatgagctcgccggccaagaattcaacatcaattcaccgaaacagctcggcgtcattttatttgaaaaactgcagctgcccgtcttgaaaaaaacgaaaaccggctactccacttcggcggatgtgcttgaaaaacttgcgccttatcacgagatcgtggaaaacattttgcattaccgccagcttggcaagttgcagtcgacgtatattgaaggattgctgaaagtcgtgcgacccgatacaaagaaggtgcatacgattttcaatcaggcgttgacgcaaaccggacggctcagctcgacggagccgaacttgcaaaacattccgattcggcttgaggaaggacggaaaatccgccaagcgttcgtgccgtcggagtctgattggctcattttcgctgccgactactcgcaaattgagttgcgcgtcctcgcccatattgcggaagatgacaatttaatggaagcgttccgccgcgatttggatatccatacgaaaacagcgatggacattttccaagtgagcgaggacgaagtgacgcccaacatgcgccgtcaggcgaaggcggtcaactttgggatcgtttacgggatcagtgattacggcttggcgcaaaacttaaatatttcacgcaaagaggccgctgaattcatcgagcgctacttcgaaagcttccctggcgtgaagcggtatatggaaaacattgtgcaagaagcaaaacagaaagggtatgtgacgacgctgctgcatcggcgccgctatttgccggatatcacgagccgcaacttcaacgtccgcagctgggctgaacggatggcgatgaacacgccgattcaagggagcgccgctgacattattaaaaaggcgatgatcgatctgaacgctagactgaaggaagagcggctgcaagcgcgccttttgctacaggtgcatgacgagctcattttggaggcgccgaaagaagagatggagcggctgtgccggctcgttccggaagtgatggagcaagcggtcacacttcgcgtgccgctcaaagtcgattaccattatggctcgacgtggtatgacgcgaaataaaaaggatcc

SEQ ID NO: 2570 - DNA, 2712 bp, Artificial Sequence
  Description of Artificial Sequence: Synthetic DNA sequence of Bacillus caldolyticus EA1 DNA polymerase F810P
atgaaatacctgctgccgaccgctgctgctggtctgctgctcctcgctgcccagccggcgatggccatgggattgaaaaaaaagcttgttttaatcgacggcagcagcgtggcgtaccgcgcctttttcgccttgccgcttttgcataacgacaaaggcatccatacgaacgccgtctacgggtttacgatgatgttgaataaaattttggcggaagaagagccaactcatatgcttgtcgcgtttgacgccgggaaaacgacgttccggcatgaagcgtttcaagagtataaaggtgggcgccagcagacgccaccggagctgtcggagcagtttccgctgttgcgcgagctgctgagggcgtatcgcatccccgcctatgaactcgagaactacgaagcggacgatattatcggaacgcttgccgcccgcgctgagcaggaagggtttgaggtgaaagtcatttccggcgaccgcgatctgacccagctcgcctccccccatgtgacggtggacattacgaaaaaagggattaccgatatcgaaccgtacacgccggaggcggtccgcgaaaaatacggcttaactccggaacaaatcgttgatttgaaaggattgatgggcgacaaatcggacaacattcccggagtgccgggcatcggggaaaagacggcggtcaagctgctcaagcaattcggcacggtcgaaaacgtgcttgcctccattgacgagatcaaaggcgaaaagttgaaagaaacgctgcgccaacaccgggagatggcgctgttaagcaaaaagctcgccgccattcgccgcgacgccccggtcgagctctcgcttgatgacatcgtctatcaaggggaagaccgggagaaagtggtcgctttatttaaagagcttgggtttcaatcgtttttagagaaaatggaatcgccgtcatcagaagaggaaaaaccgcttgccaagatggcatttacgcttgctgaccgcgtgacggaggagatgcttgccgacaaggcggcgcttgtcgttgaagtggtcgaggaaaattatcatgatgcgccgatcgtcggcatcgctgtggtcaacgaacatggacggtttttcctgcgcccggagacggcgcttgccgatccgcagtttgtcgcctggcttggtgatgaaacgaagaaaaaaagcatgtttgactcaaagcgcgcggcagtcgccttgaaatggaaaggaattgagctatgcggcgtttcctttgatttattgctggccgcctatttgcttgatccggcgcaaggtgttgatgatgtggctgccgcagcaaaaatgaagcaatacgaagcggtgcgctcggatgaagcggtgtatggcaaaggggcgaagcgggccgtgccggatgagccagtgctcgccgagcatctcgtccgcaaggcggcggcgatttgggcgctcgaacgtccgtttttggatgagctgcgccgcaacgaacaagatcggttgctcgtcgagctcgagcagccgttgtcttcgattttggcggaaatggaatttgccggagtgaaagtggatacgaagcggctcgaacagatgggcgaagagctcgccgagcagctgcgcacggtcgagcagcgcatttatgagctcgccggccaagaattcaacatcaattcaccgaaacagctcggcgtcattttatttgaaaaactgcagctgcccgtcttgaaaaaaacgaaaaccggctactccacttcggcggatgtgcttgaaaaacttgcgccttatcacgagatcgtggaaaacattttgcattaccgccagcttggcaagttgcagtcgacgtatattgaaggattgctgaaagtcgtgcgacccgatacaaagaaggtgcatacgattttcaatcaggcgttgacgcaaaccggacggctcagctcgacggagccgaacttgcaaaacattccgattcggcttgaggaaggacggaaaatccgccaagcgttcgtgccgtcggagtctgattggctcattttcgctgccgactactcgcaaattgagttgcgcgtcctcgcccatattgcggaagatgacaatttaatggaagcgttccgccgcgatttggatatccatacgaaaacagcgatggacattttccaagtgagcgaggacgaagtgacgcccaacatgcgccgtcaggcgaaggcggtcaactttgggatcgtttacgggatcagtgattacggcttggcgcaaaacttaaatatttcacgcaaagaggccgctgaattcatcgagcgctacttcgaaagcttccctggcgtgaagcggtatatggaaaacattgtgcaagaagcaaaacagaaagggtatgtgacgacgctgctgcatcggcgccgctatttgccggatatcacgagccgcaacttcaacgtccgcagccctgctgaacggatggcgatgaacacgccgattcaagggagcgccgctgacattattaaaaaggcgatgatcgatctgaacgctagactgaaggaagagcggctgcaagcgcgccttttgctacaggtgcatgacgagctcattttggaggcgccgaaagaagagatggagcggctgtgccggctcgttccggaagtgatggagcaagcggtcacacttcgcgtgccgctcaaagtcgattaccattatggctcgacgtggtatgacgcgaaataaaaaggatcc

SEQ ID NO: 2571 - DNA, 2712 bp, Artificial Sequence
  Description of Artificial Sequence: Synthetic DNA sequence of Bacillus caldolyticus EA1 DNA polymerase F810M
atgaaatacctgctgccgaccgctgctgctggtctgctgctcctcgctgcccagccggcgatggccatgggattgaaaaaaaagcttgttttaatcgacggcagcagcgtggcgtaccgcgcctttttcgccttgccgcttttgcataacgacaaaggcatccatacgaacgccgtctacgggtttacgatgatgttgaataaaattttggcggaagaagagccaactcatatgcttgtcgcgtttgacgccgggaaaacgacgttccggcatgaagcgtttcaagagtataaaggtgggcgccagcagacgccaccggagctgtcggagcagtttccgctgttgcgcgagctgctgagggcgtatcgcatccccgcctatgaactcgagaactacgaagcggacgatattatcggaacgcttgccgcccgcgctgagcaggaagggtttgaggtgaaagtcatttccggcgaccgcgatctgacccagctcgcctccccccatgtgacggtggacattacgaaaaaagggattaccgatatcgaaccgtacacgccggaggcggtccgcgaaaaatacggcttaactccggaacaaatcgttgatttgaaaggattgatgggcgacaaatcggacaacattcccggagtgccgggcatcggggaaaagacggcggtcaagctgctcaagcaattcggcacggtcgaaaacgtgcttgcctccattgacgagatcaaaggcgaaaagttgaaagaaacgctgcgccaacaccgggagatggcgctgttaagcaaaaagctcgccgccattcgccgcgacgccccggtcgagctctcgcttgatgacatcgtctatcaaggggaagaccgggagaaagtggtcgctttatttaaagagcttgggtttcaatcgtttttagagaaaatggaatcgccgtcatcagaagaggaaaaaccgcttgccaagatggcatttacgcttgctgaccgcgtgacggaggagatgcttgccgacaaggcggcgcttgtcgttgaagtggtcgaggaaaattatcatgatgcgccgatcgtcggcatcgctgtggtcaacgaacatggacggtttttcctgcgcccggagacggcgcttgccgatccgcagtttgtcgcctggcttggtgatgaaacgaagaaaaaaagcatgtttgactcaaagcgcgcggcagtcgccttgaaatggaaaggaattgagctatgcggcgtttcctttgatttattgctggccgcctatttgcttgatccggcgcaaggtgttgatgatgtggctgccgcagcaaaaatgaagcaatacgaagcggtgcgctcggatgaagcggtgtatggcaaaggggcgaagcgggccgtgccggatgagccagtgctcgccgagcatctcgtccgcaaggcggcggcgatttgggcgctcgaacgtccgtttttggatgagctgcgccgcaacgaacaagatcggttgctcgtcgagctcgagcagccgttgtcttcgattttggcggaaatggaatttgccggagtgaaagtggatacgaagcggctcgaacagatgggcgaagagctcgccgagcagctgcgcacggtcgagcagcgcatttatgagctcgccggccaagaattcaacatcaattcaccgaaacagctcggcgtcattttatttgaaaaactgcagctgcccgtcttgaaaaaaacgaaaaccggctactccacttcggcggatgtgcttgaaaaacttgcgccttatcacgagatcgtggaaaacattttgcattaccgccagcttggcaagttgcagtcgacgtatattgaaggattgctgaaagtcgtgcgacccgatacaaagaaggtgcatacgattttcaatcaggcgttgacgcaaaccggacggctcagctcgacggagccgaacttgcaaaacattccgattcggcttgaggaaggacggaaaatccgccaagcgttcgtgccgtcggagtctgattggctcattttcgctgccgactactcgcaaattgagttgcgcgtcctcgcccatattgcggaagatgacaatttaatggaagcgttccgccgcgatttggatatccatacgaaaacagcgatggacattttccaagtgagcgaggacgaagtgacgcccaacatgcgccgtcaggcgaaggcggtcaactttgggatcgtttacgggatcagtgattacggcttggcgcaaaacttaaatatttcacgcaaagaggccgctgaattcatcgagcgctacttcgaaagcttccctggcgtgaagcggtatatggaaaacattgtgcaagaagcaaaacagaaagggtatgtgacgacgctgctgcatcggcgccgctatttgccggatatcacgagccgcaacttcaacgtccgcagcatggctgaacggatggcgatgaacacgccgattcaagggagcgccgctgacattattaaaaaggcgatgatcgatctgaacgctagactgaaggaagagcggctgcaagcgcgccttttgctacaggtgcatgacgagctcattttggaggcgccgaaagaagagatggagcggctgtgccggctcgttccggaagtgatggagcaagcggtcacacttcgcgtgccgctcaaagtcgattaccattatggctcgacgtggtatgacgcgaaataaaaaggatcc

SEQ ID NO: 2572 - DNA, 2712 bp, Artificial Sequence
  Description of Artificial Sequence: Synthetic DNA sequence of Bacillus caldolyticus EA1 DNA polymerase F810T
atgaaatacctgctgccgaccgctgctgctggtctgctgctcctcgctgcccagccggcgatggccatgggattgaaaaaaaagcttgttttaatcgacggcagcagcgtggcgtaccgcgcctttttcgccttgccgcttttgcataacgacaaaggcatccatacgaacgccgtctacgggtttacgatgatgttgaataaaattttggcggaagaagagccaactcatatgcttgtcgcgtttgacgccgggaaaacgacgttccggcatgaagcgtttcaagagtataaaggtgggcgccagcagacgccaccggagctgtcggagcagtttccgctgttgcgcgagctgctgagggcgtatcgcatccccgcctatgaactcgagaactacgaagcggacgatattatcggaacgcttgccgcccgcgctgagcaggaagggtttgaggtgaaagtcatttccggcgaccgcgatctgacccagctcgcctccccccatgtgacggtggacattacgaaaaaagggattaccgatatcgaaccgtacacgccggaggcggtccgcgaaaaatacggcttaactccggaacaaatcgttgatttgaaaggattgatgggcgacaaatcggacaacattcccggagtgccgggcatcggggaaaagacggcggtcaagctgctcaagcaattcggcacggtcgaaaacgtgcttgcctccattgacgagatcaaaggcgaaaagttgaaagaaacgctgcgccaacaccgggagatggcgctgttaagcaaaaagctcgccgccattcgccgcgacgccccggtcgagctctcgcttgatgacatcgtctatcaaggggaagaccgggagaaagtggtcgctttatttaaagagcttgggtttcaatcgtttttagagaaaatggaatcgccgtcatcagaagaggaaaaaccgcttgccaagatggcatttacgcttgctgaccgcgtgacggaggagatgcttgccgacaaggcggcgcttgtcgttgaagtggtcgaggaaaattatcatgatgcgccgatcgtcggcatcgctgtggtcaacgaacatggacggtttttcctgcgcccggagacggcgcttgccgatccgcagtttgtcgcctggcttggtgatgaaacgaagaaaaaaagcatgtttgactcaaagcgcgcggcagtcgccttgaaatggaaaggaattgagctatgcggcgtttcctttgatttattgctggccgcctatttgcttgatccggcgcaaggtgttgatgatgtggctgccgcagcaaaaatgaagcaatacgaagcggtgcgctcggatgaagcggtgtatggcaaaggggcgaagcgggccgtgccggatgagccagtgctcgccgagcatctcgtccgcaaggcggcggcgatttgggcgctcgaacgtccgtttttggatgagctgcgccgcaacgaacaagatcggttgctcgtcgagctcgagcagccgttgtcttcgattttggcggaaatggaatttgccggagtgaaagtggatacgaagcggctcgaacagatgggcgaagagctcgccgagcagctgcgcacggtcgagcagcgcatttatgagctcgccggccaagaattcaacatcaattcaccgaaacagctcggcgtcattttatttgaaaaactgcagctgcccgtcttgaaaaaaacgaaaaccggctactccacttcggcggatgtgcttgaaaaacttgcgccttatcacgagatcgtggaaaacattttgcattaccgccagcttggcaagttgcagtcgacgtatattgaaggattgctgaaagtcgtgcgacccgatacaaagaaggtgcatacgattttcaatcaggcgttgacgcaaaccggacggctcagctcgacggagccgaacttgcaaaacattccgattcggcttgaggaaggacggaaaatccgccaagcgttcgtgccgtcggagtctgattggctcattttcgctgccgactactcgcaaattgagttgcgcgtcctcgcccatattgcggaagatgacaatttaatggaagcgttccgccgcgatttggatatccatacgaaaacagcgatggacattttccaagtgagcgaggacgaagtgacgcccaacatgcgccgtcaggcgaaggcggtcaactttgggatcgtttacgggatcagtgattacggcttggcgcaaaacttaaatatttcacgcaaagaggccgctgaattcatcgagcgctacttcgaaagcttccctggcgtgaagcggtatatggaaaacattgtgcaagaagcaaaacagaaagggtatgtgacgacgctgctgcatcggcgccgctatttgccggatatcacgagccgcaacttcaacgtccgcagcactgctgaacggatggcgatgaacacgccgattcaagggagcgccgctgacattattaaaaaggcgatgatcgatctgaacgctagactgaaggaagagcggctgcaagcgcgccttttgctacaggtgcatgacgagctcattttggaggcgccgaaagaagagatggagcggctgtgccggctcgttccggaagtgatggagcaagcggtcacacttcgcgtgccgctcaaagtcgattaccattatggctcgacgtggtatgacgcgaaataaaaaggatcc

SEQ ID NO: 2573 - DNA, 2712 bp, Artificial Sequence
  Description of Artificial Sequence: Synthetic DNA sequence of Bacillus caldolyticus EA1 DNA polymerase F810N
atgaaatacctgctgccgaccgctgctgctggtctgctgctcctcgctgcccagccggcgatggccatgggattgaaaaaaaagcttgttttaatcgacggcagcagcgtggcgtaccgcgcctttttcgccttgccgcttttgcataacgacaaaggcatccatacgaacgccgtctacgggtttacgatgatgttgaataaaattttggcggaagaagagccaactcatatgcttgtcgcgtttgacgccgggaaaacgacgttccggcatgaagcgtttcaagagtataaaggtgggcgccagcagacgccaccggagctgtcggagcagtttccgctgttgcgcgagctgctgagggcgtatcgcatccccgcctatgaactcgagaactacgaagcggacgatattatcggaacgcttgccgcccgcgctgagcaggaagggtttgaggtgaaagtcatttccggcgaccgcgatctgacccagctcgcctccccccatgtgacggtggacattacgaaaaaagggattaccgatatcgaaccgtacacgccggaggcggtccgcgaaaaatacggcttaactccggaacaaatcgttgatttgaaaggattgatgggcgacaaatcggacaacattcccggagtgccgggcatcggggaaaagacggcggtcaagctgctcaagcaattcggcacggtcgaaaacgtgcttgcctccattgacgagatcaaaggcgaaaagttgaaagaaacgctgcgccaacaccgggagatggcgctgttaagcaaaaagctcgccgccattcgccgcgacgccccggtcgagctctcgcttgatgacatcgtctatcaaggggaagaccgggagaaagtggtcgctttatttaaagagcttgggtttcaatcgtttttagagaaaatggaatcgccgtcatcagaagaggaaaaaccgcttgccaagatggcatttacgcttgctgaccgcgtgacggaggagatgcttgccgacaaggcggcgcttgtcgttgaagtggtcgaggaaaattatcatgatgcgccgatcgtcggcatcgctgtggtcaacgaacatggacggtttttcctgcgcccggagacggcgcttgccgatccgcagtttgtcgcctggcttggtgatgaaacgaagaaaaaaagcatgtttgactcaaagcgcgcggcagtcgccttgaaatggaaaggaattgagctatgcggcgtttcctttgatttattgctggccgcctatttgcttgatccggcgcaaggtgttgatgatgtggctgccgcagcaaaaatgaagcaatacgaagcggtgcgctcggatgaagcggtgtatggcaaaggggcgaagcgggccgtgccggatgagccagtgctcgccgagcatctcgtccgcaaggcggcggcgatttgggcgctcgaacgtccgtttttggatgagctgcgccgcaacgaacaagatcggttgctcgtcgagctcgagcagccgttgtcttcgattttggcggaaatggaatttgccggagtgaaagtggatacgaagcggctcgaacagatgggcgaagagctcgccgagcagctgcgcacggtcgagcagcgcatttatgagctcgccggccaagaattcaacatcaattcaccgaaacagctcggcgtcattttatttgaaaaactgcagctgcccgtcttgaaaaaaacgaaaaccggctactccacttcggcggatgtgcttgaaaaacttgcgccttatcacgagatcgtggaaaacattttgcattaccgccagcttggcaagttgcagtcgacgtatattgaaggattgctgaaagtcgtgcgacccgatacaaagaaggtgcatacgattttcaatcaggcgttgacgcaaaccggacggctcagctcgacggagccgaacttgcaaaacattccgattcggcttgaggaaggacggaaaatccgccaagcgttcgtgccgtcggagtctgattggctcattttcgctgccgactactcgcaaattgagttgcgcgtcctcgcccatattgcggaagatgacaatttaatggaagcgttccgccgcgatttggatatccatacgaaaacagcgatggacattttccaagtgagcgaggacgaagtgacgcccaacatgcgccgtcaggcgaaggcggtcaactttgggatcgtttacgggatcagtgattacggcttggcgcaaaacttaaatatttcacgcaaagaggccgctgaattcatcgagcgctacttcgaaagcttccctggcgtgaagcggtatatggaaaacattgtgcaagaagcaaaacagaaagggtatgtgacgacgctgctgcatcggcgccgctatttgccggatatcacgagccgcaacttcaacgtccgcagcaatgctgaacggatggcgatgaacacgccgattcaagggagcgccgctgacattattaaaaaggcgatgatcgatctgaacgctagactgaaggaagagcggctgcaagcgcgccttttgctacaggtgcatgacgagctcattttggaggcgccgaaagaagagatggagcggctgtgccggctcgttccggaagtgatggagcaagcggtcacacttcgcgtgccgctcaaagtcgattaccattatggctcgacgtggtatgacgcgaaataaaaaggatcc

SEQ ID NO: 2574 - DNA, 2712 bp, Artificial Sequence
  Description of Artificial Sequence: Synthetic DNA sequence of Bacillus caldolyticus EA1 DNA polymerase F810V
atgaaatacctgctgccgaccgctgctgctggtctgctgctcctcgctgcccagccggcgatggccatgggattgaaaaaaaagcttgttttaatcgacggcagcagcgtggcgtaccgcgcctttttcgccttgccgcttttgcataacgacaaaggcatccatacgaacgccgtctacgggtttacgatgatgttgaataaaattttggcggaagaagagccaactcatatgcttgtcgcgtttgacgccgggaaaacgacgttccggcatgaagcgtttcaagagtataaaggtgggcgccagcagacgccaccggagctgtcggagcagtttccgctgttgcgcgagctgctgagggcgtatcgcatccccgcctatgaactcgagaactacgaagcggacgatattatcggaacgcttgccgcccgcgctgagcaggaagggtttgaggtgaaagtcatttccggcgaccgcgatctgacccagctcgcctccccccatgtgacggtggacattacgaaaaaagggattaccgatatcgaaccgtacacgccggaggcggtccgcgaaaaatacggcttaactccggaacaaatcgttgatttgaaaggattgatgggcgacaaatcggacaacattcccggagtgccgggcatcggggaaaagacggcggtcaagctgctcaagcaattcggcacggtcgaaaacgtgcttgcctccattgacgagatcaaaggcgaaaagttgaaagaaacgctgcgccaacaccgggagatggcgctgttaagcaaaaagctcgccgccattcgccgcgacgccccggtcgagctctcgcttgatgacatcgtctatcaaggggaagaccgggagaaagtggtcgctttatttaaagagcttgggtttcaatcgtttttagagaaaatggaatcgccgtcatcagaagaggaaaaaccgcttgccaagatggcatttacgcttgctgaccgcgtgacggaggagatgcttgccgacaaggcggcgcttgtcgttgaagtggtcgaggaaaattatcatgatgcgccgatcgtcggcatcgctgtggtcaacgaacatggacggtttttcctgcgcccggagacggcgcttgccgatccgcagtttgtcgcctggcttggtgatgaaacgaagaaaaaaagcatgtttgactcaaagcgcgcggcagtcgccttgaaatggaaaggaattgagctatgcggcgtttcctttgatttattgctggccgcctatttgcttgatccggcgcaaggtgttgatgatgtggctgccgcagcaaaaatgaagcaatacgaagcggtgcgctcggatgaagcggtgtatggcaaaggggcgaagcgggccgtgccggatgagccagtgctcgccgagcatctcgtccgcaaggcggcggcgatttgggcgctcgaacgtccgtttttggatgagctgcgccgcaacgaacaagatcggttgctcgtcgagctcgagcagccgttgtcttcgattttggcggaaatggaatttgccggagtgaaagtggatacgaagcggctcgaacagatgggcgaagagctcgccgagcagctgcgcacggtcgagcagcgcatttatgagctcgccggccaagaattcaacatcaattcaccgaaacagctcggcgtcattttatttgaaaaactgcagctgcccgtcttgaaaaaaacgaaaaccggctactccacttcggcggatgtgcttgaaaaacttgcgccttatcacgagatcgtggaaaacattttgcattaccgccagcttggcaagttgcagtcgacgtatattgaaggattgctgaaagtcgtgcgacccgatacaaagaaggtgcatacgattttcaatcaggcgttgacgcaaaccggacggctcagctcgacggagccgaacttgcaaaacattccgattcggcttgaggaaggacggaaaatccgccaagcgttcgtgccgtcggagtctgattggctcattttcgctgccgactactcgcaaattgagttgcgcgtcctcgcccatattgcggaagatgacaatttaatggaagcgttccgccgcgatttggatatccatacgaaaacagcgatggacattttccaagtgagcgaggacgaagtgacgcccaacatgcgccgtcaggcgaaggcggtcaactttgggatcgtttacgggatcagtgattacggcttggcgcaaaacttaaatatttcacgcaaagaggccgctgaattcatcgagcgctacttcgaaagcttccctggcgtgaagcggtatatggaaaacattgtgcaagaagcaaaacagaaagggtatgtgacgacgctgctgcatcggcgccgctatttgccggatatcacgagccgcaacttcaacgtccgcagcgtcgctgaacggatggcgatgaacacgccgattcaagggagcgccgctgacattattaaaaaggcgatgatcgatctgaacgctagactgaaggaagagcggctgcaagcgcgccttttgctacaggtgcatgacgagctcattttggaggcgccgaaagaagagatggagcggctgtgccggctcgttccggaagtgatggagcaagcggtcacacttcgcgtgccgctcaaagtcgattaccattatggctcgacgtggtatgacgcgaaataaaaaggatcc

SEQ ID NO: 2575 - DNA, 2712 bp, Artificial Sequence
  Description of Artificial Sequence: Synthetic DNA sequence of Bacillus caldolyticus EA1 DNA polymerase A811R
atgaaatacctgctgccgaccgctgctgctggtctgctgctcctcgctgcccagccggcgatggccatgggattgaaaaaaaagcttgttttaatcgacggcagcagcgtggcgtaccgcgcctttttcgccttgccgcttttgcataacgacaaaggcatccatacgaacgccgtctacgggtttacgatgatgttgaataaaattttggcggaagaagagccaactcatatgcttgtcgcgtttgacgccgggaaaacgacgttccggcatgaagcgtttcaagagtataaaggtgggcgccagcagacgccaccggagctgtcggagcagtttccgctgttgcgcgagctgctgagggcgtatcgcatccccgcctatgaactcgagaactacgaagcggacgatattatcggaacgcttgccgcccgcgctgagcaggaagggtttgaggtgaaagtcatttccggcgaccgcgatctgacccagctcgcctccccccatgtgacggtggacattacgaaaaaagggattaccgatatcgaaccgtacacgccggaggcggtccgcgaaaaatacggcttaactccggaacaaatcgttgatttgaaaggattgatgggcgacaaatcggacaacattcccggagtgccgggcatcggggaaaagacggcggtcaagctgctcaagcaattcggcacggtcgaaaacgtgcttgcctccattgacgagatcaaaggcgaaaagttgaaagaaacgctgcgccaacaccgggagatggcgctgttaagcaaaaagctcgccgccattcgccgcgacgccccggtcgagctctcgcttgatgacatcgtctatcaaggggaagaccgggagaaagtggtcgctttatttaaagagcttgggtttcaatcgtttttagagaaaatggaatcgccgtcatcagaagaggaaaaaccgcttgccaagatggcatttacgcttgctgaccgcgtgacggaggagatgcttgccgacaaggcggcgcttgtcgttgaagtggtcgaggaaaattatcatgatgcgccgatcgtcggcatcgctgtggtcaacgaacatggacggtttttcctgcgcccggagacggcgcttgccgatccgcagtttgtcgcctggcttggtgatgaaacgaagaaaaaaagcatgtttgactcaaagcgcgcggcagtcgccttgaaatggaaaggaattgagctatgcggcgtttcctttgatttattgctggccgcctatttgcttgatccggcgcaaggtgttgatgatgtggctgccgcagcaaaaatgaagcaatacgaagcggtgcgctcggatgaagcggtgtatggcaaaggggcgaagcgggccgtgccggatgagccagtgctcgccgagcatctcgtccgcaaggcggcggcgatttgggcgctcgaacgtccgtttttggatgagctgcgccgcaacgaacaagatcggttgctcgtcgagctcgagcagccgttgtcttcgattttggcggaaatggaatttgccggagtgaaagtggatacgaagcggctcgaacagatgggcgaagagctcgccgagcagctgcgcacggtcgagcagcgcatttatgagctcgccggccaagaattcaacatcaattcaccgaaacagctcggcgtcattttatttgaaaaactgcagctgcccgtcttgaaaaaaacgaaaaccggctactccacttcggcggatgtgcttgaaaaacttgcgccttatcacgagatcgtggaaaacattttgcattaccgccagcttggcaagttgcagtcgacgtatattgaaggattgctgaaagtcgtgcgacccgatacaaagaaggtgcatacgattttcaatcaggcgttgacgcaaaccggacggctcagctcgacggagccgaacttgcaaaacattccgattcggcttgaggaaggacggaaaatccgccaagcgttcgtgccgtcggagtctgattggctcattttcgctgccgactactcgcaaattgagttgcgcgtcctcgcccatattgcggaagatgacaatttaatggaagcgttccgccgcgatttggatatccatacgaaaacagcgatggacattttccaagtgagcgaggacgaagtgacgcccaacatgcgccgtcaggcgaaggcggtcaactttgggatcgtttacgggatcagtgattacggcttggcgcaaaacttaaatatttcacgcaaagaggccgctgaattcatcgagcgctacttcgaaagcttccctggcgtgaagcggtatatggaaaacattgtgcaagaagcaaaacagaaagggtatgtgacgacgctgctgcatcggcgccgctatttgccggatatcacgagccgcaacttcaacgtccgcagctttcgagaacggatggcgatgaacacgccgattcaagggagcgccgctgacattattaaaaaggcgatgatcgatctgaacgctagactgaaggaagagcggctgcaagcgcgccttttgctacaggtgcatgacgagctcattttggaggcgccgaaagaagagatggagcggctgtgccggctcgttccggaagtgatggagcaagcggtcacacttcgcgtgccgctcaaagtcgattaccattatggctcgacgtggtatgacgcgaaataaaaaggatcc

SEQ ID NO: 2576 - DNA, 2712 bp, Artificial Sequence
  Description of Artificial Sequence: Synthetic DNA sequence of Bacillus caldolyticus EA1 DNA polymerase A811C
atgaaatacctgctgccgaccgctgctgctggtctgctgctcctcgctgcccagccggcgatggccatgggattgaaaaaaaagcttgttttaatcgacggcagcagcgtggcgtaccgcgcctttttcgccttgccgcttttgcataacgacaaaggcatccatacgaacgccgtctacgggtttacgatgatgttgaataaaattttggcggaagaagagccaactcatatgcttgtcgcgtttgacgccgggaaaacgacgttccggcatgaagcgtttcaagagtataaaggtgggcgccagcagacgccaccggagctgtcggagcagtttccgctgttgcgcgagctgctgagggcgtatcgcatccccgcctatgaactcgagaactacgaagcggacgatattatcggaacgcttgccgcccgcgctgagcaggaagggtttgaggtgaaagtcatttccggcgaccgcgatctgacccagctcgcctccccccatgtgacggtggacattacgaaaaaagggattaccgatatcgaaccgtacacgccggaggcggtccgcgaaaaatacggcttaactccggaacaaatcgttgatttgaaaggattgatgggcgacaaatcggacaacattcccggagtgccgggcatcggggaaaagacggcggtcaagctgctcaagcaattcggcacggtcgaaaacgtgcttgcctccattgacgagatcaaaggcgaaaagttgaaagaaacgctgcgccaacaccgggagatggcgctgttaagcaaaaagctcgccgccattcgccgcgacgccccggtcgagctctcgcttgatgacatcgtctatcaaggggaagaccgggagaaagtggtcgctttatttaaagagcttgggtttcaatcgtttttagagaaaatggaatcgccgtcatcagaagaggaaaaaccgcttgccaagatggcatttacgcttgctgaccgcgtgacggaggagatgcttgccgacaaggcggcgcttgtcgttgaagtggtcgaggaaaattatcatgatgcgccgatcgtcggcatcgctgtggtcaacgaacatggacggtttttcctgcgcccggagacggcgcttgccgatccgcagtttgtcgcctggcttggtgatgaaacgaagaaaaaaagcatgtttgactcaaagcgcgcggcagtcgccttgaaatggaaaggaattgagctatgcggcgtttcctttgatttattgctggccgcctatttgcttgatccggcgcaaggtgttgatgatgtggctgccgcagcaaaaatgaagcaatacgaagcggtgcgctcggatgaagcggtgtatggcaaaggggcgaagcgggccgtgccggatgagccagtgctcgccgagcatctcgtccgcaaggcggcggcgatttgggcgctcgaacgtccgtttttggatgagctgcgccgcaacgaacaagatcggttgctcgtcgagctcgagcagccgttgtcttcgattttggcggaaatggaatttgccggagtgaaagtggatacgaagcggctcgaacagatgggcgaagagctcgccgagcagctgcgcacggtcgagcagcgcatttatgagctcgccggccaagaattcaacatcaattcaccgaaacagctcggcgtcattttatttgaaaaactgcagctgcccgtcttgaaaaaaacgaaaaccggctactccacttcggcggatgtgcttgaaaaacttgcgccttatcacgagatcgtggaaaacattttgcattaccgccagcttggcaagttgcagtcgacgtatattgaaggattgctgaaagtcgtgcgacccgatacaaagaaggtgcatacgattttcaatcaggcgttgacgcaaaccggacggctcagctcgacggagccgaacttgcaaaacattccgattcggcttgaggaaggacggaaaatccgccaagcgttcgtgccgtcggagtctgattggctcattttcgctgccgactactcgcaaattgagttgcgcgtcctcgcccatattgcggaagatgacaatttaatggaagcgttccgccgcgatttggatatccatacgaaaacagcgatggacattttccaagtgagcgaggacgaagtgacgcccaacatgcgccgtcaggcgaaggcggtcaactttgggatcgtttacgggatcagtgattacggcttggcgcaaaacttaaatatttcacgcaaagaggccgctgaattcatcgagcgctacttcgaaagcttccctggcgtgaagcggtatatggaaaacattgtgcaagaagcaaaacagaaagggtatgtgacgacgctgctgcatcggcgccgctatttgccggatatcacgagccgcaacttcaacgtccgcagcttttgtgaacggatggcgatgaacacgccgattcaagggagcgccgctgacattattaaaaaggcgatgatcgatctgaacgctagactgaaggaagagcggctgcaagcgcgccttttgctacaggtgcatgacgagctcattttggaggcgccgaaagaagagatggagcggctgtgccggctcgttccggaagtgatggagcaagcggtcacacttcgcgtgccgctcaaagtcgattaccattatggctcgacgtggtatgacgcgaaataaaaaggatcc

SEQ ID NO: 2577 - DNA, 2712 bp, Artificial Sequence
  Description of Artificial Sequence: Synthetic DNA sequence of Bacillus caldolyticus EA1 DNA polymerase A811G
atgaaatacctgctgccgaccgctgctgctggtctgctgctcctcgctgcccagccggcgatggccatgggattgaaaaaaaagcttgttttaatcgacggcagcagcgtggcgtaccgcgcctttttcgccttgccgcttttgcataacgacaaaggcatccatacgaacgccgtctacgggtttacgatgatgttgaataaaattttggcggaagaagagccaactcatatgcttgtcgcgtttgacgccgggaaaacgacgttccggcatgaagcgtttcaagagtataaaggtgggcgccagcagacgccaccggagctgtcggagcagtttccgctgttgcgcgagctgctgagggcgtatcgcatccccgcctatgaactcgagaactacgaagcggacgatattatcggaacgcttgccgcccgcgctgagcaggaagggtttgaggtgaaagtcatttccggcgaccgcgatctgacccagctcgcctccccccatgtgacggtggacattacgaaaaaagggattaccgatatcgaaccgtacacgccggaggcggtccgcgaaaaatacggcttaactccggaacaaatcgttgatttgaaaggattgatgggcgacaaatcggacaacattcccggagtgccgggcatcggggaaaagacggcggtcaagctgctcaagcaattcggcacggtcgaaaacgtgcttgcctccattgacgagatcaaaggcgaaaagttgaaagaaacgctgcgccaacaccgggagatggcgctgttaagcaaaaagctcgccgccattcgccgcgacgccccggtcgagctctcgcttgatgacatcgtctatcaaggggaagaccgggagaaagtggtcgctttatttaaagagcttgggtttcaatcgtttttagagaaaatggaatcgccgtcatcagaagaggaaaaaccgcttgccaagatggcatttacgcttgctgaccgcgtgacggaggagatgcttgccgacaaggcggcgcttgtcgttgaagtggtcgaggaaaattatcatgatgcgccgatcgtcggcatcgctgtggtcaacgaacatggacggtttttcctgcgcccggagacggcgcttgccgatccgcagtttgtcgcctggcttggtgatgaaacgaagaaaaaaagcatgtttgactcaaagcgcgcggcagtcgccttgaaatggaaaggaattgagctatgcggcgtttcctttgatttattgctggccgcctatttgcttgatccggcgcaaggtgttgatgatgtggctgccgcagcaaaaatgaagcaatacgaagcggtgcgctcggatgaagcggtgtatggcaaaggggcgaagcgggccgtgccggatgagccagtgctcgccgagcatctcgtccgcaaggcggcggcgatttgggcgctcgaacgtccgtttttggatgagctgcgccgcaacgaacaagatcggttgctcgtcgagctcgagcagccgttgtcttcgattttggcggaaatggaatttgccggagtgaaagtggatacgaagcggctcgaacagatgggcgaagagctcgccgagcagctgcgcacggtcgagcagcgcatttatgagctcgccggccaagaattcaacatcaattcaccgaaacagctcggcgtcattttatttgaaaaactgcagctgcccgtcttgaaaaaaacgaaaaccggctactccacttcggcggatgtgcttgaaaaacttgcgccttatcacgagatcgtggaaaacattttgcattaccgccagcttggcaagttgcagtcgacgtatattgaaggattgctgaaagtcgtgcgacccgatacaaagaaggtgcatacgattttcaatcaggcgttgacgcaaaccggacggctcagctcgacggagccgaacttgcaaaacattccgattcggcttgaggaaggacggaaaatccgccaagcgttcgtgccgtcggagtctgattggctcattttcgctgccgactactcgcaaattgagttgcgcgtcctcgcccatattgcggaagatgacaatttaatggaagcgttccgccgcgatttggatatccatacgaaaacagcgatggacattttccaagtgagcgaggacgaagtgacgcccaacatgcgccgtcaggcgaaggcggtcaactttgggatcgtttacgggatcagtgattacggcttggcgcaaaacttaaatatttcacgcaaagaggccgctgaattcatcgagcgctacttcgaaagcttccctggcgtgaagcggtatatggaaaacattgtgcaagaagcaaaacagaaagggtatgtgacgacgctgctgcatcggcgccgctatttgccggatatcacgagccgcaacttcaacgtccgcagctttggtgaacggatggcgatgaacacgccgattcaagggagcgccgctgacattattaaaaaggcgatgatcgatctgaacgctagactgaaggaagagcggctgcaagcgcgccttttgctacaggtgcatgacgagctcattttggaggcgccgaaagaagagatggagcggctgtgccggctcgttccggaagtgatggagcaagcggtcacacttcgcgtgccgctcaaagtcgattaccattatggctcgacgtggtatgacgcgaaataaaaaggatcc

SEQ ID NO: 2578 - DNA, 2712 bp, Artificial Sequence
  Description of Artificial Sequence: Synthetic DNA sequence of Bacillus caldolyticus EA1 DNA polymerase A811Q
atgaaatacctgctgccgaccgctgctgctggtctgctgctcctcgctgcccagccggcgatggccatgggattgaaaaaaaagcttgttttaatcgacggcagcagcgtggcgtaccgcgcctttttcgccttgccgcttttgcataacgacaaaggcatccatacgaacgccgtctacgggtttacgatgatgttgaataaaattttggcggaagaagagccaactcatatgcttgtcgcgtttgacgccgggaaaacgacgttccggcatgaagcgtttcaagagtataaaggtgggcgccagcagacgccaccggagctgtcggagcagtttccgctgttgcgcgagctgctgagggcgtatcgcatccccgcctatgaactcgagaactacgaagcggacgatattatcggaacgcttgccgcccgcgctgagcaggaagggtttgaggtgaaagtcatttccggcgaccgcgatctgacccagctcgcctccccccatgtgacggtggacattacgaaaaaagggattaccgatatcgaaccgtacacgccggaggcggtccgcgaaaaatacggcttaactccggaacaaatcgttgatttgaaaggattgatgggcgacaaatcggacaacattcccggagtgccgggcatcggggaaaagacggcggtcaagctgctcaagcaattcggcacggtcgaaaacgtgcttgcctccattgacgagatcaaaggcgaaaagttgaaagaaacgctgcgccaacaccgggagatggcgctgttaagcaaaaagctcgccgccattcgccgcgacgccccggtcgagctctcgcttgatgacatcgtctatcaaggggaagaccgggagaaagtggtcgctttatttaaagagcttgggtttcaatcgtttttagagaaaatggaatcgccgtcatcagaagaggaaaaaccgcttgccaagatggcatttacgcttgctgaccgcgtgacggaggagatgcttgccgacaaggcggcgcttgtcgttgaagtggtcgaggaaaattatcatgatgcgccgatcgtcggcatcgctgtggtcaacgaacatggacggtttttcctgcgcccggagacggcgcttgccgatccgcagtttgtcgcctggcttggtgatgaaacgaagaaaaaaagcatgtttgactcaaagcgcgcggcagtcgccttgaaatggaaaggaattgagctatgcggcgtttcctttgatttattgctggccgcctatttgcttgatccggcgcaaggtgttgatgatgtggctgccgcagcaaaaatgaagcaatacgaagcggtgcgctcggatgaagcggtgtatggcaaaggggcgaagcgggccgtgccggatgagccagtgctcgccgagcatctcgtccgcaaggcggcggcgatttgggcgctcgaacgtccgtttttggatgagctgcgccgcaacgaacaagatcggttgctcgtcgagctcgagcagccgttgtcttcgattttggcggaaatggaatttgccggagtgaaagtggatacgaagcggctcgaacagatgggcgaagagctcgccgagcagctgcgcacggtcgagcagcgcatttatgagctcgccggccaagaattcaacatcaattcaccgaaacagctcggcgtcattttatttgaaaaactgcagctgcccgtcttgaaaaaaacgaaaaccggctactccacttcggcggatgtgcttgaaaaacttgcgccttatcacgagatcgtggaaaacattttgcattaccgccagcttggcaagttgcagtcgacgtatattgaaggattgctgaaagtcgtgcgacccgatacaaagaaggtgcatacgattttcaatcaggcgttgacgcaaaccggacggctcagctcgacggagccgaacttgcaaaacattccgattcggcttgaggaaggacggaaaatccgccaagcgttcgtgccgtcggagtctgattggctcattttcgctgccgactactcgcaaattgagttgcgcgtcctcgcccatattgcggaagatgacaatttaatggaagcgttccgccgcgatttggatatccatacgaaaacagcgatggacattttccaagtgagcgaggacgaagtgacgcccaacatgcgccgtcaggcgaaggcggtcaactttgggatcgtttacgggatcagtgattacggcttggcgcaaaacttaaatatttcacgcaaagaggccgctgaattcatcgagcgctacttcgaaagcttccctggcgtgaagcggtatatggaaaacattgtgcaagaagcaaaacagaaagggtatgtgacgacgctgctgcatcggcgccgctatttgccggatatcacgagccgcaacttcaacgtccgcagctttcaagaacggatggcgatgaacacgccgattcaagggagcgccgctgacattattaaaaaggcgatgatcgatctgaacgctagactgaaggaagagcggctgcaagcgcgccttttgctacaggtgcatgacgagctcattttggaggcgccgaaagaagagatggagcggctgtgccggctcgttccggaagtgatggagcaagcggtcacacttcgcgtgccgctcaaagtcgattaccattatggctcgacgtggtatgacgcgaaataaaaaggatcc

SEQ ID NO: 2579 - DNA, 2712 bp, Artificial Sequence
  Description of Artificial Sequence: Synthetic DNA sequence of Bacillus caldolyticus EA1 DNA polymerase A811H
atgaaatacctgctgccgaccgctgctgctggtctgctgctcctcgctgcccagccggcgatggccatgggattgaaaaaaaagcttgttttaatcgacggcagcagcgtggcgtaccgcgcctttttcgccttgccgcttttgcataacgacaaaggcatccatacgaacgccgtctacgggtttacgatgatgttgaataaaattttggcggaagaagagccaactcatatgcttgtcgcgtttgacgccgggaaaacgacgttccggcatgaagcgtttcaagagtataaaggtgggcgccagcagacgccaccggagctgtcggagcagtttccgctgttgcgcgagctgctgagggcgtatcgcatccccgcctatgaactcgagaactacgaagcggacgatattatcggaacgcttgccgcccgcgctgagcaggaagggtttgaggtgaaagtcatttccggcgaccgcgatctgacccagctcgcctccccccatgtgacggtggacattacgaaaaaagggattaccgatatcgaaccgtacacgccggaggcggtccgcgaaaaatacggcttaactccggaacaaatcgttgatttgaaaggattgatgggcgacaaatcggacaacattcccggagtgccgggcatcggggaaaagacggcggtcaagctgctcaagcaattcggcacggtcgaaaacgtgcttgcctccattgacgagatcaaaggcgaaaagttgaaagaaacgctgcgccaacaccgggagatggcgctgttaagcaaaaagctcgccgccattcgccgcgacgccccggtcgagctctcgcttgatgacatcgtctatcaaggggaagaccgggagaaagtggtcgctttatttaaagagcttgggtttcaatcgtttttagagaaaatggaatcgccgtcatcagaagaggaaaaaccgcttgccaagatggcatttacgcttgctgaccgcgtgacggaggagatgcttgccgacaaggcggcgcttgtcgttgaagtggtcgaggaaaattatcatgatgcgccgatcgtcggcatcgctgtggtcaacgaacatggacggtttttcctgcgcccggagacggcgcttgccgatccgcagtttgtcgcctggcttggtgatgaaacgaagaaaaaaagcatgtttgactcaaagcgcgcggcagtcgccttgaaatggaaaggaattgagctatgcggcgtttcctttgatttattgctggccgcctatttgcttgatccggcgcaaggtgttgatgatgtggctgccgcagcaaaaatgaagcaatacgaagcggtgcgctcggatgaagcggtgtatggcaaaggggcgaagcgggccgtgccggatgagccagtgctcgccgagcatctcgtccgcaaggcggcggcgatttgggcgctcgaacgtccgtttttggatgagctgcgccgcaacgaacaagatcggttgctcgtcgagctcgagcagccgttgtcttcgattttggcggaaatggaatttgccggagtgaaagtggatacgaagcggctcgaacagatgggcgaagagctcgccgagcagctgcgcacggtcgagcagcgcatttatgagctcgccggccaagaattcaacatcaattcaccgaaacagctcggcgtcattttatttgaaaaactgcagctgcccgtcttgaaaaaaacgaaaaccggctactccacttcggcggatgtgcttgaaaaacttgcgccttatcacgagatcgtggaaaacattttgcattaccgccagcttggcaagttgcagtcgacgtatattgaaggattgctgaaagtcgtgcgacccgatacaaagaaggtgcatacgattttcaatcaggcgttgacgcaaaccggacggctcagctcgacggagccgaacttgcaaaacattccgattcggcttgaggaaggacggaaaatccgccaagcgttcgtgccgtcggagtctgattggctcattttcgctgccgactactcgcaaattgagttgcgcgtcctcgcccatattgcggaagatgacaatttaatggaagcgttccgccgcgatttggatatccatacgaaaacagcgatggacattttccaagtgagcgaggacgaagtgacgcccaacatgcgccgtcaggcgaaggcggtcaactttgggatcgtttacgggatcagtgattacggcttggcgcaaaacttaaatatttcacgcaaagaggccgctgaattcatcgagcgctacttcgaaagcttccctggcgtgaagcggtatatggaaaacattgtgcaagaagcaaaacagaaagggtatgtgacgacgctgctgcatcggcgccgctatttgccggatatcacgagccgcaacttcaacgtccgcagctttcatgaacggatggcgatgaacacgccgattcaagggagcgccgctgacattattaaaaaggcgatgatcgatctgaacgctagactgaaggaagagcggctgcaagcgcgccttttgctacaggtgcatgacgagctcattttggaggcgccgaaagaagagatggagcggctgtgccggctcgttccggaagtgatggagcaagcggtcacacttcgcgtgccgctcaaagtcgattaccattatggctcgacgtggtatgacgcgaaataaaaaggatcc

SEQ ID NO: 2580 - DNA, 2712 bp, Artificial Sequence
  Description of Artificial Sequence: Synthetic DNA sequence of Bacillus caldolyticus EA1 DNA polymerase A811I
atgaaatacctgctgccgaccgctgctgctggtctgctgctcctcgctgcccagccggcgatggccatgggattgaaaaaaaagcttgttttaatcgacggcagcagcgtggcgtaccgcgcctttttcgccttgccgcttttgcataacgacaaaggcatccatacgaacgccgtctacgggtttacgatgatgttgaataaaattttggcggaagaagagccaactcatatgcttgtcgcgtttgacgccgggaaaacgacgttccggcatgaagcgtttcaagagtataaaggtgggcgccagcagacgccaccggagctgtcggagcagtttccgctgttgcgcgagctgctgagggcgtatcgcatccccgcctatgaactcgagaactacgaagcggacgatattatcggaacgcttgccgcccgcgctgagcaggaagggtttgaggtgaaagtcatttccggcgaccgcgatctgacccagctcgcctccccccatgtgacggtggacattacgaaaaaagggattaccgatatcgaaccgtacacgccggaggcggtccgcgaaaaatacggcttaactccggaacaaatcgttgatttgaaaggattgatgggcgacaaatcggacaacattcccggagtgccgggcatcggggaaaagacggcggtcaagctgctcaagcaattcggcacggtcgaaaacgtgcttgcctccattgacgagatcaaaggcgaaaagttgaaagaaacgctgcgccaacaccgggagatggcgctgttaagcaaaaagctcgccgccattcgccgcgacgccccggtcgagctctcgcttgatgacatcgtctatcaaggggaagaccgggagaaagtggtcgctttatttaaagagcttgggtttcaatcgtttttagagaaaatggaatcgccgtcatcagaagaggaaaaaccgcttgccaagatggcatttacgcttgctgaccgcgtgacggaggagatgcttgccgacaaggcggcgcttgtcgttgaagtggtcgaggaaaattatcatgatgcgccgatcgtcggcatcgctgtggtcaacgaacatggacggtttttcctgcgcccggagacggcgcttgccgatccgcagtttgtcgcctggcttggtgatgaaacgaagaaaaaaagcatgtttgactcaaagcgcgcggcagtcgccttgaaatggaaaggaattgagctatgcggcgtttcctttgatttattgctggccgcctatttgcttgatccggcgcaaggtgttgatgatgtggctgccgcagcaaaaatgaagcaatacgaagcggtgcgctcggatgaagcggtgtatggcaaaggggcgaagcgggccgtgccggatgagccagtgctcgccgagcatctcgtccgcaaggcggcggcgatttgggcgctcgaacgtccgtttttggatgagctgcgccgcaacgaacaagatcggttgctcgtcgagctcgagcagccgttgtcttcgattttggcggaaatggaatttgccggagtgaaagtggatacgaagcggctcgaacagatgggcgaagagctcgccgagcagctgcgcacggtcgagcagcgcatttatgagctcgccggccaagaattcaacatcaattcaccgaaacagctcggcgtcattttatttgaaaaactgcagctgcccgtcttgaaaaaaacgaaaaccggctactccacttcggcggatgtgcttgaaaaacttgcgccttatcacgagatcgtggaaaacattttgcattaccgccagcttggcaagttgcagtcgacgtatattgaaggattgctgaaagtcgtgcgacccgatacaaagaaggtgcatacgattttcaatcaggcgttgacgcaaaccggacggctcagctcgacggagccgaacttgcaaaacattccgattcggcttgaggaaggacggaaaatccgccaagcgttcgtgccgtcggagtctgattggctcattttcgctgccgactactcgcaaattgagttgcgcgtcctcgcccatattgcggaagatgacaatttaatggaagcgttccgccgcgatttggatatccatacgaaaacagcgatggacattttccaagtgagcgaggacgaagtgacgcccaacatgcgccgtcaggcgaaggcggtcaactttgggatcgtttacgggatcagtgattacggcttggcgcaaaacttaaatatttcacgcaaagaggccgctgaattcatcgagcgctacttcgaaagcttccctggcgtgaagcggtatatggaaaacattgtgcaagaagcaaaacagaaagggtatgtgacgacgctgctgcatcggcgccgctatttgccggatatcacgagccgcaacttcaacgtccgcagctttattgaacggatggcgatgaacacgccgattcaagggagcgccgctgacattattaaaaaggcgatgatcgatctgaacgctagactgaaggaagagcggctgcaagcgcgccttttgctacaggtgcatgacgagctcattttggaggcgccgaaagaagagatggagcggctgtgccggctcgttccggaagtgatggagcaagcggtcacacttcgcgtgccgctcaaagtcgattaccattatggctcgacgtggtatgacgcgaaataaaaaggatcc

SEQ ID NO: 2581 - DNA, 2712 bp, Artificial Sequence
  Description of Artificial Sequence: Synthetic DNA sequence of Bacillus caldolyticus EA1 DNA polymerase A811L
atgaaatacctgctgccgaccgctgctgctggtctgctgctcctcgctgcccagccggcgatggccatgggattgaaaaaaaagcttgttttaatcgacggcagcagcgtggcgtaccgcgcctttttcgccttgccgcttttgcataacgacaaaggcatccatacgaacgccgtctacgggtttacgatgatgttgaataaaattttggcggaagaagagccaactcatatgcttgtcgcgtttgacgccgggaaaacgacgttccggcatgaagcgtttcaagagtataaaggtgggcgccagcagacgccaccggagctgtcggagcagtttccgctgttgcgcgagctgctgagggcgtatcgcatccccgcctatgaactcgagaactacgaagcggacgatattatcggaacgcttgccgcccgcgctgagcaggaagggtttgaggtgaaagtcatttccggcgaccgcgatctgacccagctcgcctccccccatgtgacggtggacattacgaaaaaagggattaccgatatcgaaccgtacacgccggaggcggtccgcgaaaaatacggcttaactccggaacaaatcgttgatttgaaaggattgatgggcgacaaatcggacaacattcccggagtgccgggcatcggggaaaagacggcggtcaagctgctcaagcaattcggcacggtcgaaaacgtgcttgcctccattgacgagatcaaaggcgaaaagttgaaagaaacgctgcgccaacaccgggagatggcgctgttaagcaaaaagctcgccgccattcgccgcgacgccccggtcgagctctcgcttgatgacatcgtctatcaaggggaagaccgggagaaagtggtcgctttatttaaagagcttgggtttcaatcgtttttagagaaaatggaatcgccgtcatcagaagaggaaaaaccgcttgccaagatggcatttacgcttgctgaccgcgtgacggaggagatgcttgccgacaaggcggcgcttgtcgttgaagtggtcgaggaaaattatcatgatgcgccgatcgtcggcatcgctgtggtcaacgaacatggacggtttttcctgcgcccggagacggcgcttgccgatccgcagtttgtcgcctggcttggtgatgaaacgaagaaaaaaagcatgtttgactcaaagcgcgcggcagtcgccttgaaatggaaaggaattgagctatgcggcgtttcctttgatttattgctggccgcctatttgcttgatccggcgcaaggtgttgatgatgtggctgccgcagcaaaaatgaagcaatacgaagcggtgcgctcggatgaagcggtgtatggcaaaggggcgaagcgggccgtgccggatgagccagtgctcgccgagcatctcgtccgcaaggcggcggcgatttgggcgctcgaacgtccgtttttggatgagctgcgccgcaacgaacaagatcggttgctcgtcgagctcgagcagccgttgtcttcgattttggcggaaatggaatttgccggagtgaaagtggatacgaagcggctcgaacagatgggcgaagagctcgccgagcagctgcgcacggtcgagcagcgcatttatgagctcgccggccaagaattcaacatcaattcaccgaaacagctcggcgtcattttatttgaaaaactgcagctgcccgtcttgaaaaaaacgaaaaccggctactccacttcggcggatgtgcttgaaaaacttgcgccttatcacgagatcgtggaaaacattttgcattaccgccagcttggcaagttgcagtcgacgtatattgaaggattgctgaaagtcgtgcgacccgatacaaagaaggtgcatacgattttcaatcaggcgttgacgcaaaccggacggctcagctcgacggagccgaacttgcaaaacattccgattcggcttgaggaaggacggaaaatccgccaagcgttcgtgccgtcggagtctgattggctcattttcgctgccgactactcgcaaattgagttgcgcgtcctcgcccatattgcggaagatgacaatttaatggaagcgttccgccgcgatttggatatccatacgaaaacagcgatggacattttccaagtgagcgaggacgaagtgacgcccaacatgcgccgtcaggcgaaggcggtcaactttgggatcgtttacgggatcagtgattacggcttggcgcaaaacttaaatatttcacgcaaagaggccgctgaattcatcgagcgctacttcgaaagcttccctggcgtgaagcggtatatggaaaacattgtgcaagaagcaaaacagaaagggtatgtgacgacgctgctgcatcggcgccgctatttgccggatatcacgagccgcaacttcaacgtccgcagctttttagaacggatggcgatgaacacgccgattcaagggagcgccgctgacattattaaaaaggcgatgatcgatctgaacgctagactgaaggaagagcggctgcaagcgcgccttttgctacaggtgcatgacgagctcattttggaggcgccgaaagaagagatggagcggctgtgccggctcgttccggaagtgatggagcaagcggtcacacttcgcgtgccgctcaaagtcgattaccattatggctcgacgtggtatgacgcgaaataaaaaggatcc

SEQ ID NO: 2582 - DNA, 2712 bp, Artificial Sequence
  Description of Artificial Sequence: Synthetic DNA sequence of Bacillus caldolyticus EA1 DNA polymerase A811K
atgaaatacctgctgccgaccgctgctgctggtctgctgctcctcgctgcccagccggcgatggccatgggattgaaaaaaaagcttgttttaatcgacggcagcagcgtggcgtaccgcgcctttttcgccttgccgcttttgcataacgacaaaggcatccatacgaacgccgtctacgggtttacgatgatgttgaataaaattttggcggaagaagagccaactcatatgcttgtcgcgtttgacgccgggaaaacgacgttccggcatgaagcgtttcaagagtataaaggtgggcgccagcagacgccaccggagctgtcggagcagtttccgctgttgcgcgagctgctgagggcgtatcgcatccccgcctatgaactcgagaactacgaagcggacgatattatcggaacgcttgccgcccgcgctgagcaggaagggtttgaggtgaaagtcatttccggcgaccgcgatctgacccagctcgcctccccccatgtgacggtggacattacgaaaaaagggattaccgatatcgaaccgtacacgccggaggcggtccgcgaaaaatacggcttaactccggaacaaatcgttgatttgaaaggattgatgggcgacaaatcggacaacattcccggagtgccgggcatcggggaaaagacggcggtcaagctgctcaagcaattcggcacggtcgaaaacgtgcttgcctccattgacgagatcaaaggcgaaaagttgaaagaaacgctgcgccaacaccgggagatggcgctgttaagcaaaaagctcgccgccattcgccgcgacgccccggtcgagctctcgcttgatgacatcgtctatcaaggggaagaccgggagaaagtggtcgctttatttaaagagcttgggtttcaatcgtttttagagaaaatggaatcgccgtcatcagaagaggaaaaaccgcttgccaagatggcatttacgcttgctgaccgcgtgacggaggagatgcttgccgacaaggcggcgcttgtcgttgaagtggtcgaggaaaattatcatgatgcgccgatcgtcggcatcgctgtggtcaacgaacatggacggtttttcctgcgcccggagacggcgcttgccgatccgcagtttgtcgcctggcttggtgatgaaacgaagaaaaaaagcatgtttgactcaaagcgcgcggcagtcgccttgaaatggaaaggaattgagctatgcggcgtttcctttgatttattgctggccgcctatttgcttgatccggcgcaaggtgttgatgatgtggctgccgcagcaaaaatgaagcaatacgaagcggtgcgctcggatgaagcggtgtatggcaaaggggcgaagcgggccgtgccggatgagccagtgctcgccgagcatctcgtccgcaaggcggcggcgatttgggcgctcgaacgtccgtttttggatgagctgcgccgcaacgaacaagatcggttgctcgtcgagctcgagcagccgttgtcttcgattttggcggaaatggaatttgccggagtgaaagtggatacgaagcggctcgaacagatgggcgaagagctcgccgagcagctgcgcacggtcgagcagcgcatttatgagctcgccggccaagaattcaacatcaattcaccgaaacagctcggcgtcattttatttgaaaaactgcagctgcccgtcttgaaaaaaacgaaaaccggctactccacttcggcggatgtgcttgaaaaacttgcgccttatcacgagatcgtggaaaacattttgcattaccgccagcttggcaagttgcagtcgacgtatattgaaggattgctgaaagtcgtgcgacccgatacaaagaaggtgcatacgattttcaatcaggcgttgacgcaaaccggacggctcagctcgacggagccgaacttgcaaaacattccgattcggcttgaggaaggacggaaaatccgccaagcgttcgtgccgtcggagtctgattggctcattttcgctgccgactactcgcaaattgagttgcgcgtcctcgcccatattgcggaagatgacaatttaatggaagcgttccgccgcgatttggatatccatacgaaaacagcgatggacattttccaagtgagcgaggacgaagtgacgcccaacatgcgccgtcaggcgaaggcggtcaactttgggatcgtttacgggatcagtgattacggcttggcgcaaaacttaaatatttcacgcaaagaggccgctgaattcatcgagcgctacttcgaaagcttccctggcgtgaagcggtatatggaaaacattgtgcaagaagcaaaacagaaagggtatgtgacgacgctgctgcatcggcgccgctatttgccggatatcacgagccgcaacttcaacgtccgcagctttaaagaacggatggcgatgaacacgccgattcaagggagcgccgctgacattattaaaaaggcgatgatcgatctgaacgctagactgaaggaagagcggctgcaagcgcgccttttgctacaggtgcatgacgagctcattttggaggcgccgaaagaagagatggagcggctgtgccggctcgttccggaagtgatggagcaagcggtcacacttcgcgtgccgctcaaagtcgattaccattatggctcgacgtggtatgacgcgaaataaaaaggatcc

SEQ ID NO: 2583 - DNA, 2712 bp, Artificial Sequence
  Description of Artificial Sequence: Synthetic DNA sequence of Bacillus caldolyticus EA1 DNA polymerase A811E
atgaaatacctgctgccgaccgctgctgctggtctgctgctcctcgctgcccagccggcgatggccatgggattgaaaaaaaagcttgttttaatcgacggcagcagcgtggcgtaccgcgcctttttcgccttgccgcttttgcataacgacaaaggcatccatacgaacgccgtctacgggtttacgatgatgttgaataaaattttggcggaagaagagccaactcatatgcttgtcgcgtttgacgccgggaaaacgacgttccggcatgaagcgtttcaagagtataaaggtgggcgccagcagacgccaccggagctgtcggagcagtttccgctgttgcgcgagctgctgagggcgtatcgcatccccgcctatgaactcgagaactacgaagcggacgatattatcggaacgcttgccgcccgcgctgagcaggaagggtttgaggtgaaagtcatttccggcgaccgcgatctgacccagctcgcctccccccatgtgacggtggacattacgaaaaaagggattaccgatatcgaaccgtacacgccggaggcggtccgcgaaaaatacggcttaactccggaacaaatcgttgatttgaaaggattgatgggcgacaaatcggacaacattcccggagtgccgggcatcggggaaaagacggcggtcaagctgctcaagcaattcggcacggtcgaaaacgtgcttgcctccattgacgagatcaaaggcgaaaagttgaaagaaacgctgcgccaacaccgggagatggcgctgttaagcaaaaagctcgccgccattcgccgcgacgccccggtcgagctctcgcttgatgacatcgtctatcaaggggaagaccgggagaaagtggtcgctttatttaaagagcttgggtttcaatcgtttttagagaaaatggaatcgccgtcatcagaagaggaaaaaccgcttgccaagatggcatttacgcttgctgaccgcgtgacggaggagatgcttgccgacaaggcggcgcttgtcgttgaagtggtcgaggaaaattatcatgatgcgccgatcgtcggcatcgctgtggtcaacgaacatggacggtttttcctgcgcccggagacggcgcttgccgatccgcagtttgtcgcctggcttggtgatgaaacgaagaaaaaaagcatgtttgactcaaagcgcgcggcagtcgccttgaaatggaaaggaattgagctatgcggcgtttcctttgatttattgctggccgcctatttgcttgatccggcgcaaggtgttgatgatgtggctgccgcagcaaaaatgaagcaatacgaagcggtgcgctcggatgaagcggtgtatggcaaaggggcgaagcgggccgtgccggatgagccagtgctcgccgagcatctcgtccgcaaggcggcggcgatttgggcgctcgaacgtccgtttttggatgagctgcgccgcaacgaacaagatcggttgctcgtcgagctcgagcagccgttgtcttcgattttggcggaaatggaatttgccggagtgaaagtggatacgaagcggctcgaacagatgggcgaagagctcgccgagcagctgcgcacggtcgagcagcgcatttatgagctcgccggccaagaattcaacatcaattcaccgaaacagctcggcgtcattttatttgaaaaactgcagctgcccgtcttgaaaaaaacgaaaaccggctactccacttcggcggatgtgcttgaaaaacttgcgccttatcacgagatcgtggaaaacattttgcattaccgccagcttggcaagttgcagtcgacgtatattgaaggattgctgaaagtcgtgcgacccgatacaaagaaggtgcatacgattttcaatcaggcgttgacgcaaaccggacggctcagctcgacggagccgaacttgcaaaacattccgattcggcttgaggaaggacggaaaatccgccaagcgttcgtgccgtcggagtctgattggctcattttcgctgccgactactcgcaaattgagttgcgcgtcctcgcccatattgcggaagatgacaatttaatggaagcgttccgccgcgatttggatatccatacgaaaacagcgatggacattttccaagtgagcgaggacgaagtgacgcccaacatgcgccgtcaggcgaaggcggtcaactttgggatcgtttacgggatcagtgattacggcttggcgcaaaacttaaatatttcacgcaaagaggccgctgaattcatcgagcgctacttcgaaagcttccctggcgtgaagcggtatatggaaaacattgtgcaagaagcaaaacagaaagggtatgtgacgacgctgctgcatcggcgccgctatttgccggatatcacgagccgcaacttcaacgtccgcagctttgaagaacggatggcgatgaacacgccgattcaagggagcgccgctgacattattaaaaaggcgatgatcgatctgaacgctagactgaaggaagagcggctgcaagcgcgccttttgctacaggtgcatgacgagctcattttggaggcgccgaaagaagagatggagcggctgtgccggctcgttccggaagtgatggagcaagcggtcacacttcgcgtgccgctcaaagtcgattaccattatggctcgacgtggtatgacgcgaaataaaaaggatcc

SEQ ID NO: 2584 - DNA, 2712 bp, Artificial Sequence
  Description of Artificial Sequence: Synthetic DNA sequence of Bacillus caldolyticus EA1 DNA polymerase A811D
atgaaatacctgctgccgaccgctgctgctggtctgctgctcctcgctgcccagccggcgatggccatgggattgaaaaaaaagcttgttttaatcgacggcagcagcgtggcgtaccgcgcctttttcgccttgccgcttttgcataacgacaaaggcatccatacgaacgccgtctacgggtttacgatgatgttgaataaaattttggcggaagaagagccaactcatatgcttgtcgcgtttgacgccgggaaaacgacgttccggcatgaagcgtttcaagagtataaaggtgggcgccagcagacgccaccggagctgtcggagcagtttccgctgttgcgcgagctgctgagggcgtatcgcatccccgcctatgaactcgagaactacgaagcggacgatattatcggaacgcttgccgcccgcgctgagcaggaagggtttgaggtgaaagtcatttccggcgaccgcgatctgacccagctcgcctccccccatgtgacggtggacattacgaaaaaagggattaccgatatcgaaccgtacacgccggaggcggtccgcgaaaaatacggcttaactccggaacaaatcgttgatttgaaaggattgatgggcgacaaatcggacaacattcccggagtgccgggcatcggggaaaagacggcggtcaagctgctcaagcaattcggcacggtcgaaaacgtgcttgcctccattgacgagatcaaaggcgaaaagttgaaagaaacgctgcgccaacaccgggagatggcgctgttaagcaaaaagctcgccgccattcgccgcgacgccccggtcgagctctcgcttgatgacatcgtctatcaaggggaagaccgggagaaagtggtcgctttatttaaagagcttgggtttcaatcgtttttagagaaaatggaatcgccgtcatcagaagaggaaaaaccgcttgccaagatggcatttacgcttgctgaccgcgtgacggaggagatgcttgccgacaaggcggcgcttgtcgttgaagtggtcgaggaaaattatcatgatgcgccgatcgtcggcatcgctgtggtcaacgaacatggacggtttttcctgcgcccggagacggcgcttgccgatccgcagtttgtcgcctggcttggtgatgaaacgaagaaaaaaagcatgtttgactcaaagcgcgcggcagtcgccttgaaatggaaaggaattgagctatgcggcgtttcctttgatttattgctggccgcctatttgcttgatccggcgcaaggtgttgatgatgtggctgccgcagcaaaaatgaagcaatacgaagcggtgcgctcggatgaagcggtgtatggcaaaggggcgaagcgggccgtgccggatgagccagtgctcgccgagcatctcgtccgcaaggcggcggcgatttgggcgctcgaacgtccgtttttggatgagctgcgccgcaacgaacaagatcggttgctcgtcgagctcgagcagccgttgtcttcgattttggcggaaatggaatttgccggagtgaaagtggatacgaagcggctcgaacagatgggcgaagagctcgccgagcagctgcgcacggtcgagcagcgcatttatgagctcgccggccaagaattcaacatcaattcaccgaaacagctcggcgtcattttatttgaaaaactgcagctgcccgtcttgaaaaaaacgaaaaccggctactccacttcggcggatgtgcttgaaaaacttgcgccttatcacgagatcgtggaaaacattttgcattaccgccagcttggcaagttgcagtcgacgtatattgaaggattgctgaaagtcgtgcgacccgatacaaagaaggtgcatacgattttcaatcaggcgttgacgcaaaccggacggctcagctcgacggagccgaacttgcaaaacattccgattcggcttgaggaaggacggaaaatccgccaagcgttcgtgccgtcggagtctgattggctcattttcgctgccgactactcgcaaattgagttgcgcgtcctcgcccatattgcggaagatgacaatttaatggaagcgttccgccgcgatttggatatccatacgaaaacagcgatggacattttccaagtgagcgaggacgaagtgacgcccaacatgcgccgtcaggcgaaggcggtcaactttgggatcgtttacgggatcagtgattacggcttggcgcaaaacttaaatatttcacgcaaagaggccgctgaattcatcgagcgctacttcgaaagcttccctggcgtgaagcggtatatggaaaacattgtgcaagaagcaaaacagaaagggtatgtgacgacgctgctgcatcggcgccgctatttgccggatatcacgagccgcaacttcaacgtccgcagctttgatgaacggatggcgatgaacacgccgattcaagggagcgccgctgacattattaaaaaggcgatgatcgatctgaacgctagactgaaggaagagcggctgcaagcgcgccttttgctacaggtgcatgacgagctcattttggaggcgccgaaagaagagatggagcggctgtgccggctcgttccggaagtgatggagcaagcggtcacacttcgcgtgccgctcaaagtcgattaccattatggctcgacgtggtatgacgcgaaataaaaaggatcc

SEQ ID NO: 2585 - DNA, 2712 bp, Artificial Sequence
  Description of Artificial Sequence: Synthetic DNA sequence of Bacillus caldolyticus EA1 DNA polymerase A811F
atgaaatacctgctgccgaccgctgctgctggtctgctgctcctcgctgcccagccggcgatggccatgggattgaaaaaaaagcttgttttaatcgacggcagcagcgtggcgtaccgcgcctttttcgccttgccgcttttgcataacgacaaaggcatccatacgaacgccgtctacgggtttacgatgatgttgaataaaattttggcggaagaagagccaactcatatgcttgtcgcgtttgacgccgggaaaacgacgttccggcatgaagcgtttcaagagtataaaggtgggcgccagcagacgccaccggagctgtcggagcagtttccgctgttgcgcgagctgctgagggcgtatcgcatccccgcctatgaactcgagaactacgaagcggacgatattatcggaacgcttgccgcccgcgctgagcaggaagggtttgaggtgaaagtcatttccggcgaccgcgatctgacccagctcgcctccccccatgtgacggtggacattacgaaaaaagggattaccgatatcgaaccgtacacgccggaggcggtccgcgaaaaatacggcttaactccggaacaaatcgttgatttgaaaggattgatgggcgacaaatcggacaacattcccggagtgccgggcatcggggaaaagacggcggtcaagctgctcaagcaattcggcacggtcgaaaacgtgcttgcctccattgacgagatcaaaggcgaaaagttgaaagaaacgctgcgccaacaccgggagatggcgctgttaagcaaaaagctcgccgccattcgccgcgacgccccggtcgagctctcgcttgatgacatcgtctatcaaggggaagaccgggagaaagtggtcgctttatttaaagagcttgggtttcaatcgtttttagagaaaatggaatcgccgtcatcagaagaggaaaaaccgcttgccaagatggcatttacgcttgctgaccgcgtgacggaggagatgcttgccgacaaggcggcgcttgtcgttgaagtggtcgaggaaaattatcatgatgcgccgatcgtcggcatcgctgtggtcaacgaacatggacggtttttcctgcgcccggagacggcgcttgccgatccgcagtttgtcgcctggcttggtgatgaaacgaagaaaaaaagcatgtttgactcaaagcgcgcggcagtcgccttgaaatggaaaggaattgagctatgcggcgtttcctttgatttattgctggccgcctatttgcttgatccggcgcaaggtgttgatgatgtggctgccgcagcaaaaatgaagcaatacgaagcggtgcgctcggatgaagcggtgtatggcaaaggggcgaagcgggccgtgccggatgagccagtgctcgccgagcatctcgtccgcaaggcggcggcgatttgggcgctcgaacgtccgtttttggatgagctgcgccgcaacgaacaagatcggttgctcgtcgagctcgagcagccgttgtcttcgattttggcggaaatggaatttgccggagtgaaagtggatacgaagcggctcgaacagatgggcgaagagctcgccgagcagctgcgcacggtcgagcagcgcatttatgagctcgccggccaagaattcaacatcaattcaccgaaacagctcggcgtcattttatttgaaaaactgcagctgcccgtcttgaaaaaaacgaaaaccggctactccacttcggcggatgtgcttgaaaaacttgcgccttatcacgagatcgtggaaaacattttgcattaccgccagcttggcaagttgcagtcgacgtatattgaaggattgctgaaagtcgtgcgacccgatacaaagaaggtgcatacgattttcaatcaggcgttgacgcaaaccggacggctcagctcgacggagccgaacttgcaaaacattccgattcggcttgaggaaggacggaaaatccgccaagcgttcgtgccgtcggagtctgattggctcattttcgctgccgactactcgcaaattgagttgcgcgtcctcgcccatattgcggaagatgacaatttaatggaagcgttccgccgcgatttggatatccatacgaaaacagcgatggacattttccaagtgagcgaggacgaagtgacgcccaacatgcgccgtcaggcgaaggcggtcaactttgggatcgtttacgggatcagtgattacggcttggcgcaaaacttaaatatttcacgcaaagaggccgctgaattcatcgagcgctacttcgaaagcttccctggcgtgaagcggtatatggaaaacattgtgcaagaagcaaaacagaaagggtatgtgacgacgctgctgcatcggcgccgctatttgccggatatcacgagccgcaacttcaacgtccgcagcttttttgaacggatggcgatgaacacgccgattcaagggagcgccgctgacattattaaaaaggcgatgatcgatctgaacgctagactgaaggaagagcggctgcaagcgcgccttttgctacaggtgcatgacgagctcattttggaggcgccgaaagaagagatggagcggctgtgccggctcgttccggaagtgatggagcaagcggtcacacttcgcgtgccgctcaaagtcgattaccattatggctcgacgtggtatgacgcgaaataaaaaggatcc

SEQ ID NO: 2586 - DNA, 2712 bp, Artificial Sequence
  Description of Artificial Sequence: Synthetic DNA sequence of Bacillus caldolyticus EA1 DNA polymerase A811S
atgaaatacctgctgccgaccgctgctgctggtctgctgctcctcgctgcccagccggcgatggccatgggattgaaaaaaaagcttgttttaatcgacggcagcagcgtggcgtaccgcgcctttttcgccttgccgcttttgcataacgacaaaggcatccatacgaacgccgtctacgggtttacgatgatgttgaataaaattttggcggaagaagagccaactcatatgcttgtcgcgtttgacgccgggaaaacgacgttccggcatgaagcgtttcaagagtataaaggtgggcgccagcagacgccaccggagctgtcggagcagtttccgctgttgcgcgagctgctgagggcgtatcgcatccccgcctatgaactcgagaactacgaagcggacgatattatcggaacgcttgccgcccgcgctgagcaggaagggtttgaggtgaaagtcatttccggcgaccgcgatctgacccagctcgcctccccccatgtgacggtggacattacgaaaaaagggattaccgatatcgaaccgtacacgccggaggcggtccgcgaaaaatacggcttaactccggaacaaatcgttgatttgaaaggattgatgggcgacaaatcggacaacattcccggagtgccgggcatcggggaaaagacggcggtcaagctgctcaagcaattcggcacggtcgaaaacgtgcttgcctccattgacgagatcaaaggcgaaaagttgaaagaaacgctgcgccaacaccgggagatggcgctgttaagcaaaaagctcgccgccattcgccgcgacgccccggtcgagctctcgcttgatgacatcgtctatcaaggggaagaccgggagaaagtggtcgctttatttaaagagcttgggtttcaatcgtttttagagaaaatggaatcgccgtcatcagaagaggaaaaaccgcttgccaagatggcatttacgcttgctgaccgcgtgacggaggagatgcttgccgacaaggcggcgcttgtcgttgaagtggtcgaggaaaattatcatgatgcgccgatcgtcggcatcgctgtggtcaacgaacatggacggtttttcctgcgcccggagacggcgcttgccgatccgcagtttgtcgcctggcttggtgatgaaacgaagaaaaaaagcatgtttgactcaaagcgcgcggcagtcgccttgaaatggaaaggaattgagctatgcggcgtttcctttgatttattgctggccgcctatttgcttgatccggcgcaaggtgttgatgatgtggctgccgcagcaaaaatgaagcaatacgaagcggtgcgctcggatgaagcggtgtatggcaaaggggcgaagcgggccgtgccggatgagccagtgctcgccgagcatctcgtccgcaaggcggcggcgatttgggcgctcgaacgtccgtttttggatgagctgcgccgcaacgaacaagatcggttgctcgtcgagctcgagcagccgttgtcttcgattttggcggaaatggaatttgccggagtgaaagtggatacgaagcggctcgaacagatgggcgaagagctcgccgagcagctgcgcacggtcgagcagcgcatttatgagctcgccggccaagaattcaacatcaattcaccgaaacagctcggcgtcattttatttgaaaaactgcagctgcccgtcttgaaaaaaacgaaaaccggctactccacttcggcggatgtgcttgaaaaacttgcgccttatcacgagatcgtggaaaacattttgcattaccgccagcttggcaagttgcagtcgacgtatattgaaggattgctgaaagtcgtgcgacccgatacaaagaaggtgcatacgattttcaatcaggcgttgacgcaaaccggacggctcagctcgacggagccgaacttgcaaaacattccgattcggcttgaggaaggacggaaaatccgccaagcgttcgtgccgtcggagtctgattggctcattttcgctgccgactactcgcaaattgagttgcgcgtcctcgcccatattgcggaagatgacaatttaatggaagcgttccgccgcgatttggatatccatacgaaaacagcgatggacattttccaagtgagcgaggacgaagtgacgcccaacatgcgccgtcaggcgaaggcggtcaactttgggatcgtttacgggatcagtgattacggcttggcgcaaaacttaaatatttcacgcaaagaggccgctgaattcatcgagcgctacttcgaaagcttccctggcgtgaagcggtatatggaaaacattgtgcaagaagcaaaacagaaagggtatgtgacgacgctgctgcatcggcgccgctatttgccggatatcacgagccgcaacttcaacgtccgcagcttttctgaacggatggcgatgaacacgccgattcaagggagcgccgctgacattattaaaaaggcgatgatcgatctgaacgctagactgaaggaagagcggctgcaagcgcgccttttgctacaggtgcatgacgagctcattttggaggcgccgaaagaagagatggagcggctgtgccggctcgttccggaagtgatggagcaagcggtcacacttcgcgtgccgctcaaagtcgattaccattatggctcgacgtggtatgacgcgaaataaaaaggatcc

SEQ ID NO: 2587 - DNA, 2712 bp, Artificial Sequence
  Description of Artificial Sequence: Synthetic DNA sequence of Bacillus caldolyticus EA1 DNA polymerase A811Y
atgaaatacctgctgccgaccgctgctgctggtctgctgctcctcgctgcccagccggcgatggccatgggattgaaaaaaaagcttgttttaatcgacggcagcagcgtggcgtaccgcgcctttttcgccttgccgcttttgcataacgacaaaggcatccatacgaacgccgtctacgggtttacgatgatgttgaataaaattttggcggaagaagagccaactcatatgcttgtcgcgtttgacgccgggaaaacgacgttccggcatgaagcgtttcaagagtataaaggtgggcgccagcagacgccaccggagctgtcggagcagtttccgctgttgcgcgagctgctgagggcgtatcgcatccccgcctatgaactcgagaactacgaagcggacgatattatcggaacgcttgccgcccgcgctgagcaggaagggtttgaggtgaaagtcatttccggcgaccgcgatctgacccagctcgcctccccccatgtgacggtggacattacgaaaaaagggattaccgatatcgaaccgtacacgccggaggcggtccgcgaaaaatacggcttaactccggaacaaatcgttgatttgaaaggattgatgggcgacaaatcggacaacattcccggagtgccgggcatcggggaaaagacggcggtcaagctgctcaagcaattcggcacggtcgaaaacgtgcttgcctccattgacgagatcaaaggcgaaaagttgaaagaaacgctgcgccaacaccgggagatggcgctgttaagcaaaaagctcgccgccattcgccgcgacgccccggtcgagctctcgcttgatgacatcgtctatcaaggggaagaccgggagaaagtggtcgctttatttaaagagcttgggtttcaatcgtttttagagaaaatggaatcgccgtcatcagaagaggaaaaaccgcttgccaagatggcatttacgcttgctgaccgcgtgacggaggagatgcttgccgacaaggcggcgcttgtcgttgaagtggtcgaggaaaattatcatgatgcgccgatcgtcggcatcgctgtggtcaacgaacatggacggtttttcctgcgcccggagacggcgcttgccgatccgcagtttgtcgcctggcttggtgatgaaacgaagaaaaaaagcatgtttgactcaaagcgcgcggcagtcgccttgaaatggaaaggaattgagctatgcggcgtttcctttgatttattgctggccgcctatttgcttgatccggcgcaaggtgttgatgatgtggctgccgcagcaaaaatgaagcaatacgaagcggtgcgctcggatgaagcggtgtatggcaaaggggcgaagcgggccgtgccggatgagccagtgctcgccgagcatctcgtccgcaaggcggcggcgatttgggcgctcgaacgtccgtttttggatgagctgcgccgcaacgaacaagatcggttgctcgtcgagctcgagcagccgttgtcttcgattttggcggaaatggaatttgccggagtgaaagtggatacgaagcggctcgaacagatgggcgaagagctcgccgagcagctgcgcacggtcgagcagcgcatttatgagctcgccggccaagaattcaacatcaattcaccgaaacagctcggcgtcattttatttgaaaaactgcagctgcccgtcttgaaaaaaacgaaaaccggctactccacttcggcggatgtgcttgaaaaacttgcgccttatcacgagatcgtggaaaacattttgcattaccgccagcttggcaagttgcagtcgacgtatattgaaggattgctgaaagtcgtgcgacccgatacaaagaaggtgcatacgattttcaatcaggcgttgacgcaaaccggacggctcagctcgacggagccgaacttgcaaaacattccgattcggcttgaggaaggacggaaaatccgccaagcgttcgtgccgtcggagtctgattggctcattttcgctgccgactactcgcaaattgagttgcgcgtcctcgcccatattgcggaagatgacaatttaatggaagcgttccgccgcgatttggatatccatacgaaaacagcgatggacattttccaagtgagcgaggacgaagtgacgcccaacatgcgccgtcaggcgaaggcggtcaactttgggatcgtttacgggatcagtgattacggcttggcgcaaaacttaaatatttcacgcaaagaggccgctgaattcatcgagcgctacttcgaaagcttccctggcgtgaagcggtatatggaaaacattgtgcaagaagcaaaacagaaagggtatgtgacgacgctgctgcatcggcgccgctatttgccggatatcacgagccgcaacttcaacgtccgcagcttttatgaacggatggcgatgaacacgccgattcaagggagcgccgctgacattattaaaaaggcgatgatcgatctgaacgctagactgaaggaagagcggctgcaagcgcgccttttgctacaggtgcatgacgagctcattttggaggcgccgaaagaagagatggagcggctgtgccggctcgttccggaagtgatggagcaagcggtcacacttcgcgtgccgctcaaagtcgattaccattatggctcgacgtggtatgacgcgaaataaaaaggatcc

SEQ ID NO: 2588 - DNA, 2712 bp, Artificial Sequence
  Description of Artificial Sequence: Synthetic DNA sequence of Bacillus caldolyticus EA1 DNA polymerase A811W
atgaaatacctgctgccgaccgctgctgctggtctgctgctcctcgctgcccagccggcgatggccatgggattgaaaaaaaagcttgttttaatcgacggcagcagcgtggcgtaccgcgcctttttcgccttgccgcttttgcataacgacaaaggcatccatacgaacgccgtctacgggtttacgatgatgttgaataaaattttggcggaagaagagccaactcatatgcttgtcgcgtttgacgccgggaaaacgacgttccggcatgaagcgtttcaagagtataaaggtgggcgccagcagacgccaccggagctgtcggagcagtttccgctgttgcgcgagctgctgagggcgtatcgcatccccgcctatgaactcgagaactacgaagcggacgatattatcggaacgcttgccgcccgcgctgagcaggaagggtttgaggtgaaagtcatttccggcgaccgcgatctgacccagctcgcctccccccatgtgacggtggacattacgaaaaaagggattaccgatatcgaaccgtacacgccggaggcggtccgcgaaaaatacggcttaactccggaacaaatcgttgatttgaaaggattgatgggcgacaaatcggacaacattcccggagtgccgggcatcggggaaaagacggcggtcaagctgctcaagcaattcggcacggtcgaaaacgtgcttgcctccattgacgagatcaaaggcgaaaagttgaaagaaacgctgcgccaacaccgggagatggcgctgttaagcaaaaagctcgccgccattcgccgcgacgccccggtcgagctctcgcttgatgacatcgtctatcaaggggaagaccgggagaaagtggtcgctttatttaaagagcttgggtttcaatcgtttttagagaaaatggaatcgccgtcatcagaagaggaaaaaccgcttgccaagatggcatttacgcttgctgaccgcgtgacggaggagatgcttgccgacaaggcggcgcttgtcgttgaagtggtcgaggaaaattatcatgatgcgccgatcgtcggcatcgctgtggtcaacgaacatggacggtttttcctgcgcccggagacggcgcttgccgatccgcagtttgtcgcctggcttggtgatgaaacgaagaaaaaaagcatgtttgactcaaagcgcgcggcagtcgccttgaaatggaaaggaattgagctatgcggcgtttcctttgatttattgctggccgcctatttgcttgatccggcgcaaggtgttgatgatgtggctgccgcagcaaaaatgaagcaatacgaagcggtgcgctcggatgaagcggtgtatggcaaaggggcgaagcgggccgtgccggatgagccagtgctcgccgagcatctcgtccgcaaggcggcggcgatttgggcgctcgaacgtccgtttttggatgagctgcgccgcaacgaacaagatcggttgctcgtcgagctcgagcagccgttgtcttcgattttggcggaaatggaatttgccggagtgaaagtggatacgaagcggctcgaacagatgggcgaagagctcgccgagcagctgcgcacggtcgagcagcgcatttatgagctcgccggccaagaattcaacatcaattcaccgaaacagctcggcgtcattttatttgaaaaactgcagctgcccgtcttgaaaaaaacgaaaaccggctactccacttcggcggatgtgcttgaaaaacttgcgccttatcacgagatcgtggaaaacattttgcattaccgccagcttggcaagttgcagtcgacgtatattgaaggattgctgaaagtcgtgcgacccgatacaaagaaggtgcatacgattttcaatcaggcgttgacgcaaaccggacggctcagctcgacggagccgaacttgcaaaacattccgattcggcttgaggaaggacggaaaatccgccaagcgttcgtgccgtcggagtctgattggctcattttcgctgccgactactcgcaaattgagttgcgcgtcctcgcccatattgcggaagatgacaatttaatggaagcgttccgccgcgatttggatatccatacgaaaacagcgatggacattttccaagtgagcgaggacgaagtgacgcccaacatgcgccgtcaggcgaaggcggtcaactttgggatcgtttacgggatcagtgattacggcttggcgcaaaacttaaatatttcacgcaaagaggccgctgaattcatcgagcgctacttcgaaagcttccctggcgtgaagcggtatatggaaaacattgtgcaagaagcaaaacagaaagggtatgtgacgacgctgctgcatcggcgccgctatttgccggatatcacgagccgcaacttcaacgtccgcagcttttgggaacggatggcgatgaacacgccgattcaagggagcgccgctgacattattaaaaaggcgatgatcgatctgaacgctagactgaaggaagagcggctgcaagcgcgccttttgctacaggtgcatgacgagctcattttggaggcgccgaaagaagagatggagcggctgtgccggctcgttccggaagtgatggagcaagcggtcacacttcgcgtgccgctcaaagtcgattaccattatggctcgacgtggtatgacgcgaaataaaaaggatcc

SEQ ID NO: 2589 - DNA, 2712 bp, Artificial Sequence
  Description of Artificial Sequence: Synthetic DNA sequence of Bacillus caldolyticus EA1 DNA polymerase A811P
atgaaatacctgctgccgaccgctgctgctggtctgctgctcctcgctgcccagccggcgatggccatgggattgaaaaaaaagcttgttttaatcgacggcagcagcgtggcgtaccgcgcctttttcgccttgccgcttttgcataacgacaaaggcatccatacgaacgccgtctacgggtttacgatgatgttgaataaaattttggcggaagaagagccaactcatatgcttgtcgcgtttgacgccgggaaaacgacgttccggcatgaagcgtttcaagagtataaaggtgggcgccagcagacgccaccggagctgtcggagcagtttccgctgttgcgcgagctgctgagggcgtatcgcatccccgcctatgaactcgagaactacgaagcggacgatattatcggaacgcttgccgcccgcgctgagcaggaagggtttgaggtgaaagtcatttccggcgaccgcgatctgacccagctcgcctccccccatgtgacggtggacattacgaaaaaagggattaccgatatcgaaccgtacacgccggaggcggtccgcgaaaaatacggcttaactccggaacaaatcgttgatttgaaaggattgatgggcgacaaatcggacaacattcccggagtgccgggcatcggggaaaagacggcggtcaagctgctcaagcaattcggcacggtcgaaaacgtgcttgcctccattgacgagatcaaaggcgaaaagttgaaagaaacgctgcgccaacaccgggagatggcgctgttaagcaaaaagctcgccgccattcgccgcgacgccccggtcgagctctcgcttgatgacatcgtctatcaaggggaagaccgggagaaagtggtcgctttatttaaagagcttgggtttcaatcgtttttagagaaaatggaatcgccgtcatcagaagaggaaaaaccgcttgccaagatggcatttacgcttgctgaccgcgtgacggaggagatgcttgccgacaaggcggcgcttgtcgttgaagtggtcgaggaaaattatcatgatgcgccgatcgtcggcatcgctgtggtcaacgaacatggacggtttttcctgcgcccggagacggcgcttgccgatccgcagtttgtcgcctggcttggtgatgaaacgaagaaaaaaagcatgtttgactcaaagcgcgcggcagtcgccttgaaatggaaaggaattgagctatgcggcgtttcctttgatttattgctggccgcctatttgcttgatccggcgcaaggtgttgatgatgtggctgccgcagcaaaaatgaagcaatacgaagcggtgcgctcggatgaagcggtgtatggcaaaggggcgaagcgggccgtgccggatgagccagtgctcgccgagcatctcgtccgcaaggcggcggcgatttgggcgctcgaacgtccgtttttggatgagctgcgccgcaacgaacaagatcggttgctcgtcgagctcgagcagccgttgtcttcgattttggcggaaatggaatttgccggagtgaaagtggatacgaagcggctcgaacagatgggcgaagagctcgccgagcagctgcgcacggtcgagcagcgcatttatgagctcgccggccaagaattcaacatcaattcaccgaaacagctcggcgtcattttatttgaaaaactgcagctgcccgtcttgaaaaaaacgaaaaccggctactccacttcggcggatgtgcttgaaaaacttgcgccttatcacgagatcgtggaaaacattttgcattaccgccagcttggcaagttgcagtcgacgtatattgaaggattgctgaaagtcgtgcgacccgatacaaagaaggtgcatacgattttcaatcaggcgttgacgcaaaccggacggctcagctcgacggagccgaacttgcaaaacattccgattcggcttgaggaaggacggaaaatccgccaagcgttcgtgccgtcggagtctgattggctcattttcgctgccgactactcgcaaattgagttgcgcgtcctcgcccatattgcggaagatgacaatttaatggaagcgttccgccgcgatttggatatccatacgaaaacagcgatggacattttccaagtgagcgaggacgaagtgacgcccaacatgcgccgtcaggcgaaggcggtcaactttgggatcgtttacgggatcagtgattacggcttggcgcaaaacttaaatatttcacgcaaagaggccgctgaattcatcgagcgctacttcgaaagcttccctggcgtgaagcggtatatggaaaacattgtgcaagaagcaaaacagaaagggtatgtgacgacgctgctgcatcggcgccgctatttgccggatatcacgagccgcaacttcaacgtccgcagctttcctgaacggatggcgatgaacacgccgattcaagggagcgccgctgacattattaaaaaggcgatgatcgatctgaacgctagactgaaggaagagcggctgcaagcgcgccttttgctacaggtgcatgacgagctcattttggaggcgccgaaagaagagatggagcggctgtgccggctcgttccggaagtgatggagcaagcggtcacacttcgcgtgccgctcaaagtcgattaccattatggctcgacgtggtatgacgcgaaataaaaaggatcc

SEQ ID NO: 2590 - DNA, 2712 bp, Artificial Sequence
  Description of Artificial Sequence: Synthetic DNA sequence of Bacillus caldolyticus EA1 DNA polymerase A811M
atgaaatacctgctgccgaccgctgctgctggtctgctgctcctcgctgcccagccggcgatggccatgggattgaaaaaaaagcttgttttaatcgacggcagcagcgtggcgtaccgcgcctttttcgccttgccgcttttgcataacgacaaaggcatccatacgaacgccgtctacgggtttacgatgatgttgaataaaattttggcggaagaagagccaactcatatgcttgtcgcgtttgacgccgggaaaacgacgttccggcatgaagcgtttcaagagtataaaggtgggcgccagcagacgccaccggagctgtcggagcagtttccgctgttgcgcgagctgctgagggcgtatcgcatccccgcctatgaactcgagaactacgaagcggacgatattatcggaacgcttgccgcccgcgctgagcaggaagggtttgaggtgaaagtcatttccggcgaccgcgatctgacccagctcgcctccccccatgtgacggtggacattacgaaaaaagggattaccgatatcgaaccgtacacgccggaggcggtccgcgaaaaatacggcttaactccggaacaaatcgttgatttgaaaggattgatgggcgacaaatcggacaacattcccggagtgccgggcatcggggaaaagacggcggtcaagctgctcaagcaattcggcacggtcgaaaacgtgcttgcctccattgacgagatcaaaggcgaaaagttgaaagaaacgctgcgccaacaccgggagatggcgctgttaagcaaaaagctcgccgccattcgccgcgacgccccggtcgagctctcgcttgatgacatcgtctatcaaggggaagaccgggagaaagtggtcgctttatttaaagagcttgggtttcaatcgtttttagagaaaatggaatcgccgtcatcagaagaggaaaaaccgcttgccaagatggcatttacgcttgctgaccgcgtgacggaggagatgcttgccgacaaggcggcgcttgtcgttgaagtggtcgaggaaaattatcatgatgcgccgatcgtcggcatcgctgtggtcaacgaacatggacggtttttcctgcgcccggagacggcgcttgccgatccgcagtttgtcgcctggcttggtgatgaaacgaagaaaaaaagcatgtttgactcaaagcgcgcggcagtcgccttgaaatggaaaggaattgagctatgcggcgtttcctttgatttattgctggccgcctatttgcttgatccggcgcaaggtgttgatgatgtggctgccgcagcaaaaatgaagcaatacgaagcggtgcgctcggatgaagcggtgtatggcaaaggggcgaagcgggccgtgccggatgagccagtgctcgccgagcatctcgtccgcaaggcggcggcgatttgggcgctcgaacgtccgtttttggatgagctgcgccgcaacgaacaagatcggttgctcgtcgagctcgagcagccgttgtcttcgattttggcggaaatggaatttgccggagtgaaagtggatacgaagcggctcgaacagatgggcgaagagctcgccgagcagctgcgcacggtcgagcagcgcatttatgagctcgccggccaagaattcaacatcaattcaccgaaacagctcggcgtcattttatttgaaaaactgcagctgcccgtcttgaaaaaaacgaaaaccggctactccacttcggcggatgtgcttgaaaaacttgcgccttatcacgagatcgtggaaaacattttgcattaccgccagcttggcaagttgcagtcgacgtatattgaaggattgctgaaagtcgtgcgacccgatacaaagaaggtgcatacgattttcaatcaggcgttgacgcaaaccggacggctcagctcgacggagccgaacttgcaaaacattccgattcggcttgaggaaggacggaaaatccgccaagcgttcgtgccgtcggagtctgattggctcattttcgctgccgactactcgcaaattgagttgcgcgtcctcgcccatattgcggaagatgacaatttaatggaagcgttccgccgcgatttggatatccatacgaaaacagcgatggacattttccaagtgagcgaggacgaagtgacgcccaacatgcgccgtcaggcgaaggcggtcaactttgggatcgtttacgggatcagtgattacggcttggcgcaaaacttaaatatttcacgcaaagaggccgctgaattcatcgagcgctacttcgaaagcttccctggcgtgaagcggtatatggaaaacattgtgcaagaagcaaaacagaaagggtatgtgacgacgctgctgcatcggcgccgctatttgccggatatcacgagccgcaacttcaacgtccgcagctttatggaacggatggcgatgaacacgccgattcaagggagcgccgctgacattattaaaaaggcgatgatcgatctgaacgctagactgaaggaagagcggctgcaagcgcgccttttgctacaggtgcatgacgagctcattttggaggcgccgaaagaagagatggagcggctgtgccggctcgttccggaagtgatggagcaagcggtcacacttcgcgtgccgctcaaagtcgattaccattatggctcgacgtggtatgacgcgaaataaaaaggatcc

SEQ ID NO: 2591 - DNA, 2712 bp, Artificial Sequence
  Description of Artificial Sequence: Synthetic DNA sequence of Bacillus caldolyticus EA1 DNA polymerase A811T
atgaaatacctgctgccgaccgctgctgctggtctgctgctcctcgctgcccagccggcgatggccatgggattgaaaaaaaagcttgttttaatcgacggcagcagcgtggcgtaccgcgcctttttcgccttgccgcttttgcataacgacaaaggcatccatacgaacgccgtctacgggtttacgatgatgttgaataaaattttggcggaagaagagccaactcatatgcttgtcgcgtttgacgccgggaaaacgacgttccggcatgaagcgtttcaagagtataaaggtgggcgccagcagacgccaccggagctgtcggagcagtttccgctgttgcgcgagctgctgagggcgtatcgcatccccgcctatgaactcgagaactacgaagcggacgatattatcggaacgcttgccgcccgcgctgagcaggaagggtttgaggtgaaagtcatttccggcgaccgcgatctgacccagctcgcctccccccatgtgacggtggacattacgaaaaaagggattaccgatatcgaaccgtacacgccggaggcggtccgcgaaaaatacggcttaactccggaacaaatcgttgatttgaaaggattgatgggcgacaaatcggacaacattcccggagtgccgggcatcggggaaaagacggcggtcaagctgctcaagcaattcggcacggtcgaaaacgtgcttgcctccattgacgagatcaaaggcgaaaagttgaaagaaacgctgcgccaacaccgggagatggcgctgttaagcaaaaagctcgccgccattcgccgcgacgccccggtcgagctctcgcttgatgacatcgtctatcaaggggaagaccgggagaaagtggtcgctttatttaaagagcttgggtttcaatcgtttttagagaaaatggaatcgccgtcatcagaagaggaaaaaccgcttgccaagatggcatttacgcttgctgaccgcgtgacggaggagatgcttgccgacaaggcggcgcttgtcgttgaagtggtcgaggaaaattatcatgatgcgccgatcgtcggcatcgctgtggtcaacgaacatggacggtttttcctgcgcccggagacggcgcttgccgatccgcagtttgtcgcctggcttggtgatgaaacgaagaaaaaaagcatgtttgactcaaagcgcgcggcagtcgccttgaaatggaaaggaattgagctatgcggcgtttcctttgatttattgctggccgcctatttgcttgatccggcgcaaggtgttgatgatgtggctgccgcagcaaaaatgaagcaatacgaagcggtgcgctcggatgaagcggtgtatggcaaaggggcgaagcgggccgtgccggatgagccagtgctcgccgagcatctcgtccgcaaggcggcggcgatttgggcgctcgaacgtccgtttttggatgagctgcgccgcaacgaacaagatcggttgctcgtcgagctcgagcagccgttgtcttcgattttggcggaaatggaatttgccggagtgaaagtggatacgaagcggctcgaacagatgggcgaagagctcgccgagcagctgcgcacggtcgagcagcgcatttatgagctcgccggccaagaattcaacatcaattcaccgaaacagctcggcgtcattttatttgaaaaactgcagctgcccgtcttgaaaaaaacgaaaaccggctactccacttcggcggatgtgcttgaaaaacttgcgccttatcacgagatcgtggaaaacattttgcattaccgccagcttggcaagttgcagtcgacgtatattgaaggattgctgaaagtcgtgcgacccgatacaaagaaggtgcatacgattttcaatcaggcgttgacgcaaaccggacggctcagctcgacggagccgaacttgcaaaacattccgattcggcttgaggaaggacggaaaatccgccaagcgttcgtgccgtcggagtctgattggctcattttcgctgccgactactcgcaaattgagttgcgcgtcctcgcccatattgcggaagatgacaatttaatggaagcgttccgccgcgatttggatatccatacgaaaacagcgatggacattttccaagtgagcgaggacgaagtgacgcccaacatgcgccgtcaggcgaaggcggtcaactttgggatcgtttacgggatcagtgattacggcttggcgcaaaacttaaatatttcacgcaaagaggccgctgaattcatcgagcgctacttcgaaagcttccctggcgtgaagcggtatatggaaaacattgtgcaagaagcaaaacagaaagggtatgtgacgacgctgctgcatcggcgccgctatttgccggatatcacgagccgcaacttcaacgtccgcagctttactgaacggatggcgatgaacacgccgattcaagggagcgccgctgacattattaaaaaggcgatgatcgatctgaacgctagactgaaggaagagcggctgcaagcgcgccttttgctacaggtgcatgacgagctcattttggaggcgccgaaagaagagatggagcggctgtgccggctcgttccggaagtgatggagcaagcggtcacacttcgcgtgccgctcaaagtcgattaccattatggctcgacgtggtatgacgcgaaataaaaaggatcc

SEQ ID NO: 2592 - DNA, 2712 bp, Artificial Sequence
  Description of Artificial Sequence: Synthetic DNA sequence of Bacillus caldolyticus EA1 DNA polymerase A811N
atgaaatacctgctgccgaccgctgctgctggtctgctgctcctcgctgcccagccggcgatggccatgggattgaaaaaaaagcttgttttaatcgacggcagcagcgtggcgtaccgcgcctttttcgccttgccgcttttgcataacgacaaaggcatccatacgaacgccgtctacgggtttacgatgatgttgaataaaattttggcggaagaagagccaactcatatgcttgtcgcgtttgacgccgggaaaacgacgttccggcatgaagcgtttcaagagtataaaggtgggcgccagcagacgccaccggagctgtcggagcagtttccgctgttgcgcgagctgctgagggcgtatcgcatccccgcctatgaactcgagaactacgaagcggacgatattatcggaacgcttgccgcccgcgctgagcaggaagggtttgaggtgaaagtcatttccggcgaccgcgatctgacccagctcgcctccccccatgtgacggtggacattacgaaaaaagggattaccgatatcgaaccgtacacgccggaggcggtccgcgaaaaatacggcttaactccggaacaaatcgttgatttgaaaggattgatgggcgacaaatcggacaacattcccggagtgccgggcatcggggaaaagacggcggtcaagctgctcaagcaattcggcacggtcgaaaacgtgcttgcctccattgacgagatcaaaggcgaaaagttgaaagaaacgctgcgccaacaccgggagatggcgctgttaagcaaaaagctcgccgccattcgccgcgacgccccggtcgagctctcgcttgatgacatcgtctatcaaggggaagaccgggagaaagtggtcgctttatttaaagagcttgggtttcaatcgtttttagagaaaatggaatcgccgtcatcagaagaggaaaaaccgcttgccaagatggcatttacgcttgctgaccgcgtgacggaggagatgcttgccgacaaggcggcgcttgtcgttgaagtggtcgaggaaaattatcatgatgcgccgatcgtcggcatcgctgtggtcaacgaacatggacggtttttcctgcgcccggagacggcgcttgccgatccgcagtttgtcgcctggcttggtgatgaaacgaagaaaaaaagcatgtttgactcaaagcgcgcggcagtcgccttgaaatggaaaggaattgagctatgcggcgtttcctttgatttattgctggccgcctatttgcttgatccggcgcaaggtgttgatgatgtggctgccgcagcaaaaatgaagcaatacgaagcggtgcgctcggatgaagcggtgtatggcaaaggggcgaagcgggccgtgccggatgagccagtgctcgccgagcatctcgtccgcaaggcggcggcgatttgggcgctcgaacgtccgtttttggatgagctgcgccgcaacgaacaagatcggttgctcgtcgagctcgagcagccgttgtcttcgattttggcggaaatggaatttgccggagtgaaagtggatacgaagcggctcgaacagatgggcgaagagctcgccgagcagctgcgcacggtcgagcagcgcatttatgagctcgccggccaagaattcaacatcaattcaccgaaacagctcggcgtcattttatttgaaaaactgcagctgcccgtcttgaaaaaaacgaaaaccggctactccacttcggcggatgtgcttgaaaaacttgcgccttatcacgagatcgtggaaaacattttgcattaccgccagcttggcaagttgcagtcgacgtatattgaaggattgctgaaagtcgtgcgacccgatacaaagaaggtgcatacgattttcaatcaggcgttgacgcaaaccggacggctcagctcgacggagccgaacttgcaaaacattccgattcggcttgaggaaggacggaaaatccgccaagcgttcgtgccgtcggagtctgattggctcattttcgctgccgactactcgcaaattgagttgcgcgtcctcgcccatattgcggaagatgacaatttaatggaagcgttccgccgcgatttggatatccatacgaaaacagcgatggacattttccaagtgagcgaggacgaagtgacgcccaacatgcgccgtcaggcgaaggcggtcaactttgggatcgtttacgggatcagtgattacggcttggcgcaaaacttaaatatttcacgcaaagaggccgctgaattcatcgagcgctacttcgaaagcttccctggcgtgaagcggtatatggaaaacattgtgcaagaagcaaaacagaaagggtatgtgacgacgctgctgcatcggcgccgctatttgccggatatcacgagccgcaacttcaacgtccgcagctttaatgaacggatggcgatgaacacgccgattcaagggagcgccgctgacattattaaaaaggcgatgatcgatctgaacgctagactgaaggaagagcggctgcaagcgcgccttttgctacaggtgcatgacgagctcattttggaggcgccgaaagaagagatggagcggctgtgccggctcgttccggaagtgatggagcaagcggtcacacttcgcgtgccgctcaaagtcgattaccattatggctcgacgtggtatgacgcgaaataaaaaggatcc

SEQ ID NO: 2593 - DNA, 2712 bp, Artificial Sequence
  Description of Artificial Sequence: Synthetic DNA sequence of Bacillus caldolyticus EA1 DNA polymerase A811V
atgaaatacctgctgccgaccgctgctgctggtctgctgctcctcgctgcccagccggcgatggccatgggattgaaaaaaaagcttgttttaatcgacggcagcagcgtggcgtaccgcgcctttttcgccttgccgcttttgcataacgacaaaggcatccatacgaacgccgtctacgggtttacgatgatgttgaataaaattttggcggaagaagagccaactcatatgcttgtcgcgtttgacgccgggaaaacgacgttccggcatgaagcgtttcaagagtataaaggtgggcgccagcagacgccaccggagctgtcggagcagtttccgctgttgcgcgagctgctgagggcgtatcgcatccccgcctatgaactcgagaactacgaagcggacgatattatcggaacgcttgccgcccgcgctgagcaggaagggtttgaggtgaaagtcatttccggcgaccgcgatctgacccagctcgcctccccccatgtgacggtggacattacgaaaaaagggattaccgatatcgaaccgtacacgccggaggcggtccgcgaaaaatacggcttaactccggaacaaatcgttgatttgaaaggattgatgggcgacaaatcggacaacattcccggagtgccgggcatcggggaaaagacggcggtcaagctgctcaagcaattcggcacggtcgaaaacgtgcttgcctccattgacgagatcaaaggcgaaaagttgaaagaaacgctgcgccaacaccgggagatggcgctgttaagcaaaaagctcgccgccattcgccgcgacgccccggtcgagctctcgcttgatgacatcgtctatcaaggggaagaccgggagaaagtggtcgctttatttaaagagcttgggtttcaatcgtttttagagaaaatggaatcgccgtcatcagaagaggaaaaaccgcttgccaagatggcatttacgcttgctgaccgcgtgacggaggagatgcttgccgacaaggcggcgcttgtcgttgaagtggtcgaggaaaattatcatgatgcgccgatcgtcggcatcgctgtggtcaacgaacatggacggtttttcctgcgcccggagacggcgcttgccgatccgcagtttgtcgcctggcttggtgatgaaacgaagaaaaaaagcatgtttgactcaaagcgcgcggcagtcgccttgaaatggaaaggaattgagctatgcggcgtttcctttgatttattgctggccgcctatttgcttgatccggcgcaaggtgttgatgatgtggctgccgcagcaaaaatgaagcaatacgaagcggtgcgctcggatgaagcggtgtatggcaaaggggcgaagcgggccgtgccggatgagccagtgctcgccgagcatctcgtccgcaaggcggcggcgatttgggcgctcgaacgtccgtttttggatgagctgcgccgcaacgaacaagatcggttgctcgtcgagctcgagcagccgttgtcttcgattttggcggaaatggaatttgccggagtgaaagtggatacgaagcggctcgaacagatgggcgaagagctcgccgagcagctgcgcacggtcgagcagcgcatttatgagctcgccggccaagaattcaacatcaattcaccgaaacagctcggcgtcattttatttgaaaaactgcagctgcccgtcttgaaaaaaacgaaaaccggctactccacttcggcggatgtgcttgaaaaacttgcgccttatcacgagatcgtggaaaacattttgcattaccgccagcttggcaagttgcagtcgacgtatattgaaggattgctgaaagtcgtgcgacccgatacaaagaaggtgcatacgattttcaatcaggcgttgacgcaaaccggacggctcagctcgacggagccgaacttgcaaaacattccgattcggcttgaggaaggacggaaaatccgccaagcgttcgtgccgtcggagtctgattggctcattttcgctgccgactactcgcaaattgagttgcgcgtcctcgcccatattgcggaagatgacaatttaatggaagcgttccgccgcgatttggatatccatacgaaaacagcgatggacattttccaagtgagcgaggacgaagtgacgcccaacatgcgccgtcaggcgaaggcggtcaactttgggatcgtttacgggatcagtgattacggcttggcgcaaaacttaaatatttcacgcaaagaggccgctgaattcatcgagcgctacttcgaaagcttccctggcgtgaagcggtatatggaaaacattgtgcaagaagcaaaacagaaagggtatgtgacgacgctgctgcatcggcgccgctatttgccggatatcacgagccgcaacttcaacgtccgcagctttgtcgaacggatggcgatgaacacgccgattcaagggagcgccgctgacattattaaaaaggcgatgatcgatctgaacgctagactgaaggaagagcggctgcaagcgcgccttttgctacaggtgcatgacgagctcattttggaggcgccgaaagaagagatggagcggctgtgccggctcgttccggaagtgatggagcaagcggtcacacttcgcgtgccgctcaaagtcgattaccattatggctcgacgtggtatgacgcgaaataaaaaggatcc

SEQ ID NO: 2594 - DNA, 2712 bp, Artificial Sequence
  Description of Artificial Sequence: Synthetic DNA sequence of Bacillus caldolyticus EA1 DNA polymerase E812A
atgaaatacctgctgccgaccgctgctgctggtctgctgctcctcgctgcccagccggcgatggccatgggattgaaaaaaaagcttgttttaatcgacggcagcagcgtggcgtaccgcgcctttttcgccttgccgcttttgcataacgacaaaggcatccatacgaacgccgtctacgggtttacgatgatgttgaataaaattttggcggaagaagagccaactcatatgcttgtcgcgtttgacgccgggaaaacgacgttccggcatgaagcgtttcaagagtataaaggtgggcgccagcagacgccaccggagctgtcggagcagtttccgctgttgcgcgagctgctgagggcgtatcgcatccccgcctatgaactcgagaactacgaagcggacgatattatcggaacgcttgccgcccgcgctgagcaggaagggtttgaggtgaaagtcatttccggcgaccgcgatctgacccagctcgcctccccccatgtgacggtggacattacgaaaaaagggattaccgatatcgaaccgtacacgccggaggcggtccgcgaaaaatacggcttaactccggaacaaatcgttgatttgaaaggattgatgggcgacaaatcggacaacattcccggagtgccgggcatcggggaaaagacggcggtcaagctgctcaagcaattcggcacggtcgaaaacgtgcttgcctccattgacgagatcaaaggcgaaaagttgaaagaaacgctgcgccaacaccgggagatggcgctgttaagcaaaaagctcgccgccattcgccgcgacgccccggtcgagctctcgcttgatgacatcgtctatcaaggggaagaccgggagaaagtggtcgctttatttaaagagcttgggtttcaatcgtttttagagaaaatggaatcgccgtcatcagaagaggaaaaaccgcttgccaagatggcatttacgcttgctgaccgcgtgacggaggagatgcttgccgacaaggcggcgcttgtcgttgaagtggtcgaggaaaattatcatgatgcgccgatcgtcggcatcgctgtggtcaacgaacatggacggtttttcctgcgcccggagacggcgcttgccgatccgcagtttgtcgcctggcttggtgatgaaacgaagaaaaaaagcatgtttgactcaaagcgcgcggcagtcgccttgaaatggaaaggaattgagctatgcggcgtttcctttgatttattgctggccgcctatttgcttgatccggcgcaaggtgttgatgatgtggctgccgcagcaaaaatgaagcaatacgaagcggtgcgctcggatgaagcggtgtatggcaaaggggcgaagcgggccgtgccggatgagccagtgctcgccgagcatctcgtccgcaaggcggcggcgatttgggcgctcgaacgtccgtttttggatgagctgcgccgcaacgaacaagatcggttgctcgtcgagctcgagcagccgttgtcttcgattttggcggaaatggaatttgccggagtgaaagtggatacgaagcggctcgaacagatgggcgaagagctcgccgagcagctgcgcacggtcgagcagcgcatttatgagctcgccggccaagaattcaacatcaattcaccgaaacagctcggcgtcattttatttgaaaaactgcagctgcccgtcttgaaaaaaacgaaaaccggctactccacttcggcggatgtgcttgaaaaacttgcgccttatcacgagatcgtggaaaacattttgcattaccgccagcttggcaagttgcagtcgacgtatattgaaggattgctgaaagtcgtgcgacccgatacaaagaaggtgcatacgattttcaatcaggcgttgacgcaaaccggacggctcagctcgacggagccgaacttgcaaaacattccgattcggcttgaggaaggacggaaaatccgccaagcgttcgtgccgtcggagtctgattggctcattttcgctgccgactactcgcaaattgagttgcgcgtcctcgcccatattgcggaagatgacaatttaatggaagcgttccgccgcgatttggatatccatacgaaaacagcgatggacattttccaagtgagcgaggacgaagtgacgcccaacatgcgccgtcaggcgaaggcggtcaactttgggatcgtttacgggatcagtgattacggcttggcgcaaaacttaaatatttcacgcaaagaggccgctgaattcatcgagcgctacttcgaaagcttccctggcgtgaagcggtatatggaaaacattgtgcaagaagcaaaacagaaagggtatgtgacgacgctgctgcatcggcgccgctatttgccggatatcacgagccgcaacttcaacgtccgcagctttgctgctcggatggcgatgaacacgccgattcaagggagcgccgctgacattattaaaaaggcgatgatcgatctgaacgctagactgaaggaagagcggctgcaagcgcgccttttgctacaggtgcatgacgagctcattttggaggcgccgaaagaagagatggagcggctgtgccggctcgttccggaagtgatggagcaagcggtcacacttcgcgtgccgctcaaagtcgattaccattatggctcgacgtggtatgacgcgaaataaaaaggatcc

SEQ ID NO: 2595 - DNA, 2712 bp, Artificial Sequence
  Description of Artificial Sequence: Synthetic DNA sequence of Bacillus caldolyticus EA1 DNA polymerase E812R
atgaaatacctgctgccgaccgctgctgctggtctgctgctcctcgctgcccagccggcgatggccatgggattgaaaaaaaagcttgttttaatcgacggcagcagcgtggcgtaccgcgcctttttcgccttgccgcttttgcataacgacaaaggcatccatacgaacgccgtctacgggtttacgatgatgttgaataaaattttggcggaagaagagccaactcatatgcttgtcgcgtttgacgccgggaaaacgacgttccggcatgaagcgtttcaagagtataaaggtgggcgccagcagacgccaccggagctgtcggagcagtttccgctgttgcgcgagctgctgagggcgtatcgcatccccgcctatgaactcgagaactacgaagcggacgatattatcggaacgcttgccgcccgcgctgagcaggaagggtttgaggtgaaagtcatttccggcgaccgcgatctgacccagctcgcctccccccatgtgacggtggacattacgaaaaaagggattaccgatatcgaaccgtacacgccggaggcggtccgcgaaaaatacggcttaactccggaacaaatcgttgatttgaaaggattgatgggcgacaaatcggacaacattcccggagtgccgggcatcggggaaaagacggcggtcaagctgctcaagcaattcggcacggtcgaaaacgtgcttgcctccattgacgagatcaaaggcgaaaagttgaaagaaacgctgcgccaacaccgggagatggcgctgttaagcaaaaagctcgccgccattcgccgcgacgccccggtcgagctctcgcttgatgacatcgtctatcaaggggaagaccgggagaaagtggtcgctttatttaaagagcttgggtttcaatcgtttttagagaaaatggaatcgccgtcatcagaagaggaaaaaccgcttgccaagatggcatttacgcttgctgaccgcgtgacggaggagatgcttgccgacaaggcggcgcttgtcgttgaagtggtcgaggaaaattatcatgatgcgccgatcgtcggcatcgctgtggtcaacgaacatggacggtttttcctgcgcccggagacggcgcttgccgatccgcagtttgtcgcctggcttggtgatgaaacgaagaaaaaaagcatgtttgactcaaagcgcgcggcagtcgccttgaaatggaaaggaattgagctatgcggcgtttcctttgatttattgctggccgcctatttgcttgatccggcgcaaggtgttgatgatgtggctgccgcagcaaaaatgaagcaatacgaagcggtgcgctcggatgaagcggtgtatggcaaaggggcgaagcgggccgtgccggatgagccagtgctcgccgagcatctcgtccgcaaggcggcggcgatttgggcgctcgaacgtccgtttttggatgagctgcgccgcaacgaacaagatcggttgctcgtcgagctcgagcagccgttgtcttcgattttggcggaaatggaatttgccggagtgaaagtggatacgaagcggctcgaacagatgggcgaagagctcgccgagcagctgcgcacggtcgagcagcgcatttatgagctcgccggccaagaattcaacatcaattcaccgaaacagctcggcgtcattttatttgaaaaactgcagctgcccgtcttgaaaaaaacgaaaaccggctactccacttcggcggatgtgcttgaaaaacttgcgccttatcacgagatcgtggaaaacattttgcattaccgccagcttggcaagttgcagtcgacgtatattgaaggattgctgaaagtcgtgcgacccgatacaaagaaggtgcatacgattttcaatcaggcgttgacgcaaaccggacggctcagctcgacggagccgaacttgcaaaacattccgattcggcttgaggaaggacggaaaatccgccaagcgttcgtgccgtcggagtctgattggctcattttcgctgccgactactcgcaaattgagttgcgcgtcctcgcccatattgcggaagatgacaatttaatggaagcgttccgccgcgatttggatatccatacgaaaacagcgatggacattttccaagtgagcgaggacgaagtgacgcccaacatgcgccgtcaggcgaaggcggtcaactttgggatcgtttacgggatcagtgattacggcttggcgcaaaacttaaatatttcacgcaaagaggccgctgaattcatcgagcgctacttcgaaagcttccctggcgtgaagcggtatatggaaaacattgtgcaagaagcaaaacagaaagggtatgtgacgacgctgctgcatcggcgccgctatttgccggatatcacgagccgcaacttcaacgtccgcagctttgctcgacggatggcgatgaacacgccgattcaagggagcgccgctgacattattaaaaaggcgatgatcgatctgaacgctagactgaaggaagagcggctgcaagcgcgccttttgctacaggtgcatgacgagctcattttggaggcgccgaaagaagagatggagcggctgtgccggctcgttccggaagtgatggagcaagcggtcacacttcgcgtgccgctcaaagtcgattaccattatggctcgacgtggtatgacgcgaaataaaaaggatcc

SEQ ID NO: 2596 - DNA, 2712 bp, Artificial Sequence
  Description of Artificial Sequence: Synthetic DNA sequence of Bacillus caldolyticus EA1 DNA polymerase E812C
atgaaatacctgctgccgaccgctgctgctggtctgctgctcctcgctgcccagccggcgatggccatgggattgaaaaaaaagcttgttttaatcgacggcagcagcgtggcgtaccgcgcctttttcgccttgccgcttttgcataacgacaaaggcatccatacgaacgccgtctacgggtttacgatgatgttgaataaaattttggcggaagaagagccaactcatatgcttgtcgcgtttgacgccgggaaaacgacgttccggcatgaagcgtttcaagagtataaaggtgggcgccagcagacgccaccggagctgtcggagcagtttccgctgttgcgcgagctgctgagggcgtatcgcatccccgcctatgaactcgagaactacgaagcggacgatattatcggaacgcttgccgcccgcgctgagcaggaagggtttgaggtgaaagtcatttccggcgaccgcgatctgacccagctcgcctccccccatgtgacggtggacattacgaaaaaagggattaccgatatcgaaccgtacacgccggaggcggtccgcgaaaaatacggcttaactccggaacaaatcgttgatttgaaaggattgatgggcgacaaatcggacaacattcccggagtgccgggcatcggggaaaagacggcggtcaagctgctcaagcaattcggcacggtcgaaaacgtgcttgcctccattgacgagatcaaaggcgaaaagttgaaagaaacgctgcgccaacaccgggagatggcgctgttaagcaaaaagctcgccgccattcgccgcgacgccccggtcgagctctcgcttgatgacatcgtctatcaaggggaagaccgggagaaagtggtcgctttatttaaagagcttgggtttcaatcgtttttagagaaaatggaatcgccgtcatcagaagaggaaaaaccgcttgccaagatggcatttacgcttgctgaccgcgtgacggaggagatgcttgccgacaaggcggcgcttgtcgttgaagtggtcgaggaaaattatcatgatgcgccgatcgtcggcatcgctgtggtcaacgaacatggacggtttttcctgcgcccggagacggcgcttgccgatccgcagtttgtcgcctggcttggtgatgaaacgaagaaaaaaagcatgtttgactcaaagcgcgcggcagtcgccttgaaatggaaaggaattgagctatgcggcgtttcctttgatttattgctggccgcctatttgcttgatccggcgcaaggtgttgatgatgtggctgccgcagcaaaaatgaagcaatacgaagcggtgcgctcggatgaagcggtgtatggcaaaggggcgaagcgggccgtgccggatgagccagtgctcgccgagcatctcgtccgcaaggcggcggcgatttgggcgctcgaacgtccgtttttggatgagctgcgccgcaacgaacaagatcggttgctcgtcgagctcgagcagccgttgtcttcgattttggcggaaatggaatttgccggagtgaaagtggatacgaagcggctcgaacagatgggcgaagagctcgccgagcagctgcgcacggtcgagcagcgcatttatgagctcgccggccaagaattcaacatcaattcaccgaaacagctcggcgtcattttatttgaaaaactgcagctgcccgtcttgaaaaaaacgaaaaccggctactccacttcggcggatgtgcttgaaaaacttgcgccttatcacgagatcgtggaaaacattttgcattaccgccagcttggcaagttgcagtcgacgtatattgaaggattgctgaaagtcgtgcgacccgatacaaagaaggtgcatacgattttcaatcaggcgttgacgcaaaccggacggctcagctcgacggagccgaacttgcaaaacattccgattcggcttgaggaaggacggaaaatccgccaagcgttcgtgccgtcggagtctgattggctcattttcgctgccgactactcgcaaattgagttgcgcgtcctcgcccatattgcggaagatgacaatttaatggaagcgttccgccgcgatttggatatccatacgaaaacagcgatggacattttccaagtgagcgaggacgaagtgacgcccaacatgcgccgtcaggcgaaggcggtcaactttgggatcgtttacgggatcagtgattacggcttggcgcaaaacttaaatatttcacgcaaagaggccgctgaattcatcgagcgctacttcgaaagcttccctggcgtgaagcggtatatggaaaacattgtgcaagaagcaaaacagaaagggtatgtgacgacgctgctgcatcggcgccgctatttgccggatatcacgagccgcaacttcaacgtccgcagctttgcttgtcggatggcgatgaacacgccgattcaagggagcgccgctgacattattaaaaaggcgatgatcgatctgaacgctagactgaaggaagagcggctgcaagcgcgccttttgctacaggtgcatgacgagctcattttggaggcgccgaaagaagagatggagcggctgtgccggctcgttccggaagtgatggagcaagcggtcacacttcgcgtgccgctcaaagtcgattaccattatggctcgacgtggtatgacgcgaaataaaaaggatcc

SEQ ID NO: 2597 - DNA, 2712 bp, Artificial Sequence
  Description of Artificial Sequence: Synthetic DNA sequence of Bacillus caldolyticus EA1 DNA polymerase E812G
atgaaatacctgctgccgaccgctgctgctggtctgctgctcctcgctgcccagccggcgatggccatgggattgaaaaaaaagcttgttttaatcgacggcagcagcgtggcgtaccgcgcctttttcgccttgccgcttttgcataacgacaaaggcatccatacgaacgccgtctacgggtttacgatgatgttgaataaaattttggcggaagaagagccaactcatatgcttgtcgcgtttgacgccgggaaaacgacgttccggcatgaagcgtttcaagagtataaaggtgggcgccagcagacgccaccggagctgtcggagcagtttccgctgttgcgcgagctgctgagggcgtatcgcatccccgcctatgaactcgagaactacgaagcggacgatattatcggaacgcttgccgcccgcgctgagcaggaagggtttgaggtgaaagtcatttccggcgaccgcgatctgacccagctcgcctccccccatgtgacggtggacattacgaaaaaagggattaccgatatcgaaccgtacacgccggaggcggtccgcgaaaaatacggcttaactccggaacaaatcgttgatttgaaaggattgatgggcgacaaatcggacaacattcccggagtgccgggcatcggggaaaagacggcggtcaagctgctcaagcaattcggcacggtcgaaaacgtgcttgcctccattgacgagatcaaaggcgaaaagttgaaagaaacgctgcgccaacaccgggagatggcgctgttaagcaaaaagctcgccgccattcgccgcgacgccccggtcgagctctcgcttgatgacatcgtctatcaaggggaagaccgggagaaagtggtcgctttatttaaagagcttgggtttcaatcgtttttagagaaaatggaatcgccgtcatcagaagaggaaaaaccgcttgccaagatggcatttacgcttgctgaccgcgtgacggaggagatgcttgccgacaaggcggcgcttgtcgttgaagtggtcgaggaaaattatcatgatgcgccgatcgtcggcatcgctgtggtcaacgaacatggacggtttttcctgcgcccggagacggcgcttgccgatccgcagtttgtcgcctggcttggtgatgaaacgaagaaaaaaagcatgtttgactcaaagcgcgcggcagtcgccttgaaatggaaaggaattgagctatgcggcgtttcctttgatttattgctggccgcctatttgcttgatccggcgcaaggtgttgatgatgtggctgccgcagcaaaaatgaagcaatacgaagcggtgcgctcggatgaagcggtgtatggcaaaggggcgaagcgggccgtgccggatgagccagtgctcgccgagcatctcgtccgcaaggcggcggcgatttgggcgctcgaacgtccgtttttggatgagctgcgccgcaacgaacaagatcggttgctcgtcgagctcgagcagccgttgtcttcgattttggcggaaatggaatttgccggagtgaaagtggatacgaagcggctcgaacagatgggcgaagagctcgccgagcagctgcgcacggtcgagcagcgcatttatgagctcgccggccaagaattcaacatcaattcaccgaaacagctcggcgtcattttatttgaaaaactgcagctgcccgtcttgaaaaaaacgaaaaccggctactccacttcggcggatgtgcttgaaaaacttgcgccttatcacgagatcgtggaaaacattttgcattaccgccagcttggcaagttgcagtcgacgtatattgaaggattgctgaaagtcgtgcgacccgatacaaagaaggtgcatacgattttcaatcaggcgttgacgcaaaccggacggctcagctcgacggagccgaacttgcaaaacattccgattcggcttgaggaaggacggaaaatccgccaagcgttcgtgccgtcggagtctgattggctcattttcgctgccgactactcgcaaattgagttgcgcgtcctcgcccatattgcggaagatgacaatttaatggaagcgttccgccgcgatttggatatccatacgaaaacagcgatggacattttccaagtgagcgaggacgaagtgacgcccaacatgcgccgtcaggcgaaggcggtcaactttgggatcgtttacgggatcagtgattacggcttggcgcaaaacttaaatatttcacgcaaagaggccgctgaattcatcgagcgctacttcgaaagcttccctggcgtgaagcggtatatggaaaacattgtgcaagaagcaaaacagaaagggtatgtgacgacgctgctgcatcggcgccgctatttgccggatatcacgagccgcaacttcaacgtccgcagctttgctggtcggatggcgatgaacacgccgattcaagggagcgccgctgacattattaaaaaggcgatgatcgatctgaacgctagactgaaggaagagcggctgcaagcgcgccttttgctacaggtgcatgacgagctcattttggaggcgccgaaagaagagatggagcggctgtgccggctcgttccggaagtgatggagcaagcggtcacacttcgcgtgccgctcaaagtcgattaccattatggctcgacgtggtatgacgcgaaataaaaaggatcc

SEQ ID NO: 2598 - DNA, 2712 bp, Artificial Sequence
  Description of Artificial Sequence: Synthetic DNA sequence of Bacillus caldolyticus EA1 DNA polymerase E812Q
atgaaatacctgctgccgaccgctgctgctggtctgctgctcctcgctgcccagccggcgatggccatgggattgaaaaaaaagcttgttttaatcgacggcagcagcgtggcgtaccgcgcctttttcgccttgccgcttttgcataacgacaaaggcatccatacgaacgccgtctacgggtttacgatgatgttgaataaaattttggcggaagaagagccaactcatatgcttgtcgcgtttgacgccgggaaaacgacgttccggcatgaagcgtttcaagagtataaaggtgggcgccagcagacgccaccggagctgtcggagcagtttccgctgttgcgcgagctgctgagggcgtatcgcatccccgcctatgaactcgagaactacgaagcggacgatattatcggaacgcttgccgcccgcgctgagcaggaagggtttgaggtgaaagtcatttccggcgaccgcgatctgacccagctcgcctccccccatgtgacggtggacattacgaaaaaagggattaccgatatcgaaccgtacacgccggaggcggtccgcgaaaaatacggcttaactccggaacaaatcgttgatttgaaaggattgatgggcgacaaatcggacaacattcccggagtgccgggcatcggggaaaagacggcggtcaagctgctcaagcaattcggcacggtcgaaaacgtgcttgcctccattgacgagatcaaaggcgaaaagttgaaagaaacgctgcgccaacaccgggagatggcgctgttaagcaaaaagctcgccgccattcgccgcgacgccccggtcgagctctcgcttgatgacatcgtctatcaaggggaagaccgggagaaagtggtcgctttatttaaagagcttgggtttcaatcgtttttagagaaaatggaatcgccgtcatcagaagaggaaaaaccgcttgccaagatggcatttacgcttgctgaccgcgtgacggaggagatgcttgccgacaaggcggcgcttgtcgttgaagtggtcgaggaaaattatcatgatgcgccgatcgtcggcatcgctgtggtcaacgaacatggacggtttttcctgcgcccggagacggcgcttgccgatccgcagtttgtcgcctggcttggtgatgaaacgaagaaaaaaagcatgtttgactcaaagcgcgcggcagtcgccttgaaatggaaaggaattgagctatgcggcgtttcctttgatttattgctggccgcctatttgcttgatccggcgcaaggtgttgatgatgtggctgccgcagcaaaaatgaagcaatacgaagcggtgcgctcggatgaagcggtgtatggcaaaggggcgaagcgggccgtgccggatgagccagtgctcgccgagcatctcgtccgcaaggcggcggcgatttgggcgctcgaacgtccgtttttggatgagctgcgccgcaacgaacaagatcggttgctcgtcgagctcgagcagccgttgtcttcgattttggcggaaatggaatttgccggagtgaaagtggatacgaagcggctcgaacagatgggcgaagagctcgccgagcagctgcgcacggtcgagcagcgcatttatgagctcgccggccaagaattcaacatcaattcaccgaaacagctcggcgtcattttatttgaaaaactgcagctgcccgtcttgaaaaaaacgaaaaccggctactccacttcggcggatgtgcttgaaaaacttgcgccttatcacgagatcgtggaaaacattttgcattaccgccagcttggcaagttgcagtcgacgtatattgaaggattgctgaaagtcgtgcgacccgatacaaagaaggtgcatacgattttcaatcaggcgttgacgcaaaccggacggctcagctcgacggagccgaacttgcaaaacattccgattcggcttgaggaaggacggaaaatccgccaagcgttcgtgccgtcggagtctgattggctcattttcgctgccgactactcgcaaattgagttgcgcgtcctcgcccatattgcggaagatgacaatttaatggaagcgttccgccgcgatttggatatccatacgaaaacagcgatggacattttccaagtgagcgaggacgaagtgacgcccaacatgcgccgtcaggcgaaggcggtcaactttgggatcgtttacgggatcagtgattacggcttggcgcaaaacttaaatatttcacgcaaagaggccgctgaattcatcgagcgctacttcgaaagcttccctggcgtgaagcggtatatggaaaacattgtgcaagaagcaaaacagaaagggtatgtgacgacgctgctgcatcggcgccgctatttgccggatatcacgagccgcaacttcaacgtccgcagctttgctcaacggatggcgatgaacacgccgattcaagggagcgccgctgacattattaaaaaggcgatgatcgatctgaacgctagactgaaggaagagcggctgcaagcgcgccttttgctacaggtgcatgacgagctcattttggaggcgccgaaagaagagatggagcggctgtgccggctcgttccggaagtgatggagcaagcggtcacacttcgcgtgccgctcaaagtcgattaccattatggctcgacgtggtatgacgcgaaataaaaaggatcc

SEQ ID NO: 2599 - DNA, 2712 bp, Artificial Sequence
  Description of Artificial Sequence: Synthetic DNA sequence of Bacillus caldolyticus EA1 DNA polymerase E812H
atgaaatacctgctgccgaccgctgctgctggtctgctgctcctcgctgcccagccggcgatggccatgggattgaaaaaaaagcttgttttaatcgacggcagcagcgtggcgtaccgcgcctttttcgccttgccgcttttgcataacgacaaaggcatccatacgaacgccgtctacgggtttacgatgatgttgaataaaattttggcggaagaagagccaactcatatgcttgtcgcgtttgacgccgggaaaacgacgttccggcatgaagcgtttcaagagtataaaggtgggcgccagcagacgccaccggagctgtcggagcagtttccgctgttgcgcgagctgctgagggcgtatcgcatccccgcctatgaactcgagaactacgaagcggacgatattatcggaacgcttgccgcccgcgctgagcaggaagggtttgaggtgaaagtcatttccggcgaccgcgatctgacccagctcgcctccccccatgtgacggtggacattacgaaaaaagggattaccgatatcgaaccgtacacgccggaggcggtccgcgaaaaatacggcttaactccggaacaaatcgttgatttgaaaggattgatgggcgacaaatcggacaacattcccggagtgccgggcatcggggaaaagacggcggtcaagctgctcaagcaattcggcacggtcgaaaacgtgcttgcctccattgacgagatcaaaggcgaaaagttgaaagaaacgctgcgccaacaccgggagatggcgctgttaagcaaaaagctcgccgccattcgccgcgacgccccggtcgagctctcgcttgatgacatcgtctatcaaggggaagaccgggagaaagtggtcgctttatttaaagagcttgggtttcaatcgtttttagagaaaatggaatcgccgtcatcagaagaggaaaaaccgcttgccaagatggcatttacgcttgctgaccgcgtgacggaggagatgcttgccgacaaggcggcgcttgtcgttgaagtggtcgaggaaaattatcatgatgcgccgatcgtcggcatcgctgtggtcaacgaacatggacggtttttcctgcgcccggagacggcgcttgccgatccgcagtttgtcgcctggcttggtgatgaaacgaagaaaaaaagcatgtttgactcaaagcgcgcggcagtcgccttgaaatggaaaggaattgagctatgcggcgtttcctttgatttattgctggccgcctatttgcttgatccggcgcaaggtgttgatgatgtggctgccgcagcaaaaatgaagcaatacgaagcggtgcgctcggatgaagcggtgtatggcaaaggggcgaagcgggccgtgccggatgagccagtgctcgccgagcatctcgtccgcaaggcggcggcgatttgggcgctcgaacgtccgtttttggatgagctgcgccgcaacgaacaagatcggttgctcgtcgagctcgagcagccgttgtcttcgattttggcggaaatggaatttgccggagtgaaagtggatacgaagcggctcgaacagatgggcgaagagctcgccgagcagctgcgcacggtcgagcagcgcatttatgagctcgccggccaagaattcaacatcaattcaccgaaacagctcggcgtcattttatttgaaaaactgcagctgcccgtcttgaaaaaaacgaaaaccggctactccacttcggcggatgtgcttgaaaaacttgcgccttatcacgagatcgtggaaaacattttgcattaccgccagcttggcaagttgcagtcgacgtatattgaaggattgctgaaagtcgtgcgacccgatacaaagaaggtgcatacgattttcaatcaggcgttgacgcaaaccggacggctcagctcgacggagccgaacttgcaaaacattccgattcggcttgaggaaggacggaaaatccgccaagcgttcgtgccgtcggagtctgattggctcattttcgctgccgactactcgcaaattgagttgcgcgtcctcgcccatattgcggaagatgacaatttaatggaagcgttccgccgcgatttggatatccatacgaaaacagcgatggacattttccaagtgagcgaggacgaagtgacgcccaacatgcgccgtcaggcgaaggcggtcaactttgggatcgtttacgggatcagtgattacggcttggcgcaaaacttaaatatttcacgcaaagaggccgctgaattcatcgagcgctacttcgaaagcttccctggcgtgaagcggtatatggaaaacattgtgcaagaagcaaaacagaaagggtatgtgacgacgctgctgcatcggcgccgctatttgccggatatcacgagccgcaacttcaacgtccgcagctttgctcatcggatggcgatgaacacgccgattcaagggagcgccgctgacattattaaaaaggcgatgatcgatctgaacgctagactgaaggaagagcggctgcaagcgcgccttttgctacaggtgcatgacgagctcattttggaggcgccgaaagaagagatggagcggctgtgccggctcgttccggaagtgatggagcaagcggtcacacttcgcgtgccgctcaaagtcgattaccattatggctcgacgtggtatgacgcgaaataaaaaggatcc

SEQ ID NO: 2600 - DNA, 2712 bp, Artificial Sequence
  Description of Artificial Sequence: Synthetic DNA sequence of Bacillus caldolyticus EA1 DNA polymerase E812I
atgaaatacctgctgccgaccgctgctgctggtctgctgctcctcgctgcccagccggcgatggccatgggattgaaaaaaaagcttgttttaatcgacggcagcagcgtggcgtaccgcgcctttttcgccttgccgcttttgcataacgacaaaggcatccatacgaacgccgtctacgggtttacgatgatgttgaataaaattttggcggaagaagagccaactcatatgcttgtcgcgtttgacgccgggaaaacgacgttccggcatgaagcgtttcaagagtataaaggtgggcgccagcagacgccaccggagctgtcggagcagtttccgctgttgcgcgagctgctgagggcgtatcgcatccccgcctatgaactcgagaactacgaagcggacgatattatcggaacgcttgccgcccgcgctgagcaggaagggtttgaggtgaaagtcatttccggcgaccgcgatctgacccagctcgcctccccccatgtgacggtggacattacgaaaaaagggattaccgatatcgaaccgtacacgccggaggcggtccgcgaaaaatacggcttaactccggaacaaatcgttgatttgaaaggattgatgggcgacaaatcggacaacattcccggagtgccgggcatcggggaaaagacggcggtcaagctgctcaagcaattcggcacggtcgaaaacgtgcttgcctccattgacgagatcaaaggcgaaaagttgaaagaaacgctgcgccaacaccgggagatggcgctgttaagcaaaaagctcgccgccattcgccgcgacgccccggtcgagctctcgcttgatgacatcgtctatcaaggggaagaccgggagaaagtggtcgctttatttaaagagcttgggtttcaatcgtttttagagaaaatggaatcgccgtcatcagaagaggaaaaaccgcttgccaagatggcatttacgcttgctgaccgcgtgacggaggagatgcttgccgacaaggcggcgcttgtcgttgaagtggtcgaggaaaattatcatgatgcgccgatcgtcggcatcgctgtggtcaacgaacatggacggtttttcctgcgcccggagacggcgcttgccgatccgcagtttgtcgcctggcttggtgatgaaacgaagaaaaaaagcatgtttgactcaaagcgcgcggcagtcgccttgaaatggaaaggaattgagctatgcggcgtttcctttgatttattgctggccgcctatttgcttgatccggcgcaaggtgttgatgatgtggctgccgcagcaaaaatgaagcaatacgaagcggtgcgctcggatgaagcggtgtatggcaaaggggcgaagcgggccgtgccggatgagccagtgctcgccgagcatctcgtccgcaaggcggcggcgatttgggcgctcgaacgtccgtttttggatgagctgcgccgcaacgaacaagatcggttgctcgtcgagctcgagcagccgttgtcttcgattttggcggaaatggaatttgccggagtgaaagtggatacgaagcggctcgaacagatgggcgaagagctcgccgagcagctgcgcacggtcgagcagcgcatttatgagctcgccggccaagaattcaacatcaattcaccgaaacagctcggcgtcattttatttgaaaaactgcagctgcccgtcttgaaaaaaacgaaaaccggctactccacttcggcggatgtgcttgaaaaacttgcgccttatcacgagatcgtggaaaacattttgcattaccgccagcttggcaagttgcagtcgacgtatattgaaggattgctgaaagtcgtgcgacccgatacaaagaaggtgcatacgattttcaatcaggcgttgacgcaaaccggacggctcagctcgacggagccgaacttgcaaaacattccgattcggcttgaggaaggacggaaaatccgccaagcgttcgtgccgtcggagtctgattggctcattttcgctgccgactactcgcaaattgagttgcgcgtcctcgcccatattgcggaagatgacaatttaatggaagcgttccgccgcgatttggatatccatacgaaaacagcgatggacattttccaagtgagcgaggacgaagtgacgcccaacatgcgccgtcaggcgaaggcggtcaactttgggatcgtttacgggatcagtgattacggcttggcgcaaaacttaaatatttcacgcaaagaggccgctgaattcatcgagcgctacttcgaaagcttccctggcgtgaagcggtatatggaaaacattgtgcaagaagcaaaacagaaagggtatgtgacgacgctgctgcatcggcgccgctatttgccggatatcacgagccgcaacttcaacgtccgcagctttgctattcggatggcgatgaacacgccgattcaagggagcgccgctgacattattaaaaaggcgatgatcgatctgaacgctagactgaaggaagagcggctgcaagcgcgccttttgctacaggtgcatgacgagctcattttggaggcgccgaaagaagagatggagcggctgtgccggctcgttccggaagtgatggagcaagcggtcacacttcgcgtgccgctcaaagtcgattaccattatggctcgacgtggtatgacgcgaaataaaaaggatcc

SEQ ID NO: 2601 - DNA, 2712 bp, Artificial Sequence
  Description of Artificial Sequence: Synthetic DNA sequence of Bacillus caldolyticus EA1 DNA polymerase E812L
atgaaatacctgctgccgaccgctgctgctggtctgctgctcctcgctgcccagccggcgatggccatgggattgaaaaaaaagcttgttttaatcgacggcagcagcgtggcgtaccgcgcctttttcgccttgccgcttttgcataacgacaaaggcatccatacgaacgccgtctacgggtttacgatgatgttgaataaaattttggcggaagaagagccaactcatatgcttgtcgcgtttgacgccgggaaaacgacgttccggcatgaagcgtttcaagagtataaaggtgggcgccagcagacgccaccggagctgtcggagcagtttccgctgttgcgcgagctgctgagggcgtatcgcatccccgcctatgaactcgagaactacgaagcggacgatattatcggaacgcttgccgcccgcgctgagcaggaagggtttgaggtgaaagtcatttccggcgaccgcgatctgacccagctcgcctccccccatgtgacggtggacattacgaaaaaagggattaccgatatcgaaccgtacacgccggaggcggtccgcgaaaaatacggcttaactccggaacaaatcgttgatttgaaaggattgatgggcgacaaatcggacaacattcccggagtgccgggcatcggggaaaagacggcggtcaagctgctcaagcaattcggcacggtcgaaaacgtgcttgcctccattgacgagatcaaaggcgaaaagttgaaagaaacgctgcgccaacaccgggagatggcgctgttaagcaaaaagctcgccgccattcgccgcgacgccccggtcgagctctcgcttgatgacatcgtctatcaaggggaagaccgggagaaagtggtcgctttatttaaagagcttgggtttcaatcgtttttagagaaaatggaatcgccgtcatcagaagaggaaaaaccgcttgccaagatggcatttacgcttgctgaccgcgtgacggaggagatgcttgccgacaaggcggcgcttgtcgttgaagtggtcgaggaaaattatcatgatgcgccgatcgtcggcatcgctgtggtcaacgaacatggacggtttttcctgcgcccggagacggcgcttgccgatccgcagtttgtcgcctggcttggtgatgaaacgaagaaaaaaagcatgtttgactcaaagcgcgcggcagtcgccttgaaatggaaaggaattgagctatgcggcgtttcctttgatttattgctggccgcctatttgcttgatccggcgcaaggtgttgatgatgtggctgccgcagcaaaaatgaagcaatacgaagcggtgcgctcggatgaagcggtgtatggcaaaggggcgaagcgggccgtgccggatgagccagtgctcgccgagcatctcgtccgcaaggcggcggcgatttgggcgctcgaacgtccgtttttggatgagctgcgccgcaacgaacaagatcggttgctcgtcgagctcgagcagccgttgtcttcgattttggcggaaatggaatttgccggagtgaaagtggatacgaagcggctcgaacagatgggcgaagagctcgccgagcagctgcgcacggtcgagcagcgcatttatgagctcgccggccaagaattcaacatcaattcaccgaaacagctcggcgtcattttatttgaaaaactgcagctgcccgtcttgaaaaaaacgaaaaccggctactccacttcggcggatgtgcttgaaaaacttgcgccttatcacgagatcgtggaaaacattttgcattaccgccagcttggcaagttgcagtcgacgtatattgaaggattgctgaaagtcgtgcgacccgatacaaagaaggtgcatacgattttcaatcaggcgttgacgcaaaccggacggctcagctcgacggagccgaacttgcaaaacattccgattcggcttgaggaaggacggaaaatccgccaagcgttcgtgccgtcggagtctgattggctcattttcgctgccgactactcgcaaattgagttgcgcgtcctcgcccatattgcggaagatgacaatttaatggaagcgttccgccgcgatttggatatccatacgaaaacagcgatggacattttccaagtgagcgaggacgaagtgacgcccaacatgcgccgtcaggcgaaggcggtcaactttgggatcgtttacgggatcagtgattacggcttggcgcaaaacttaaatatttcacgcaaagaggccgctgaattcatcgagcgctacttcgaaagcttccctggcgtgaagcggtatatggaaaacattgtgcaagaagcaaaacagaaagggtatgtgacgacgctgctgcatcggcgccgctatttgccggatatcacgagccgcaacttcaacgtccgcagctttgctttacggatggcgatgaacacgccgattcaagggagcgccgctgacattattaaaaaggcgatgatcgatctgaacgctagactgaaggaagagcggctgcaagcgcgccttttgctacaggtgcatgacgagctcattttggaggcgccgaaagaagagatggagcggctgtgccggctcgttccggaagtgatggagcaagcggtcacacttcgcgtgccgctcaaagtcgattaccattatggctcgacgtggtatgacgcgaaataaaaaggatcc

SEQ ID NO: 2602 - DNA, 2712 bp, Artificial Sequence
  Description of Artificial Sequence: Synthetic DNA sequence of Bacillus caldolyticus EA1 DNA polymerase E812K
atgaaatacctgctgccgaccgctgctgctggtctgctgctcctcgctgcccagccggcgatggccatgggattgaaaaaaaagcttgttttaatcgacggcagcagcgtggcgtaccgcgcctttttcgccttgccgcttttgcataacgacaaaggcatccatacgaacgccgtctacgggtttacgatgatgttgaataaaattttggcggaagaagagccaactcatatgcttgtcgcgtttgacgccgggaaaacgacgttccggcatgaagcgtttcaagagtataaaggtgggcgccagcagacgccaccggagctgtcggagcagtttccgctgttgcgcgagctgctgagggcgtatcgcatccccgcctatgaactcgagaactacgaagcggacgatattatcggaacgcttgccgcccgcgctgagcaggaagggtttgaggtgaaagtcatttccggcgaccgcgatctgacccagctcgcctccccccatgtgacggtggacattacgaaaaaagggattaccgatatcgaaccgtacacgccggaggcggtccgcgaaaaatacggcttaactccggaacaaatcgttgatttgaaaggattgatgggcgacaaatcggacaacattcccggagtgccgggcatcggggaaaagacggcggtcaagctgctcaagcaattcggcacggtcgaaaacgtgcttgcctccattgacgagatcaaaggcgaaaagttgaaagaaacgctgcgccaacaccgggagatggcgctgttaagcaaaaagctcgccgccattcgccgcgacgccccggtcgagctctcgcttgatgacatcgtctatcaaggggaagaccgggagaaagtggtcgctttatttaaagagcttgggtttcaatcgtttttagagaaaatggaatcgccgtcatcagaagaggaaaaaccgcttgccaagatggcatttacgcttgctgaccgcgtgacggaggagatgcttgccgacaaggcggcgcttgtcgttgaagtggtcgaggaaaattatcatgatgcgccgatcgtcggcatcgctgtggtcaacgaacatggacggtttttcctgcgcccggagacggcgcttgccgatccgcagtttgtcgcctggcttggtgatgaaacgaagaaaaaaagcatgtttgactcaaagcgcgcggcagtcgccttgaaatggaaaggaattgagctatgcggcgtttcctttgatttattgctggccgcctatttgcttgatccggcgcaaggtgttgatgatgtggctgccgcagcaaaaatgaagcaatacgaagcggtgcgctcggatgaagcggtgtatggcaaaggggcgaagcgggccgtgccggatgagccagtgctcgccgagcatctcgtccgcaaggcggcggcgatttgggcgctcgaacgtccgtttttggatgagctgcgccgcaacgaacaagatcggttgctcgtcgagctcgagcagccgttgtcttcgattttggcggaaatggaatttgccggagtgaaagtggatacgaagcggctcgaacagatgggcgaagagctcgccgagcagctgcgcacggtcgagcagcgcatttatgagctcgccggccaagaattcaacatcaattcaccgaaacagctcggcgtcattttatttgaaaaactgcagctgcccgtcttgaaaaaaacgaaaaccggctactccacttcggcggatgtgcttgaaaaacttgcgccttatcacgagatcgtggaaaacattttgcattaccgccagcttggcaagttgcagtcgacgtatattgaaggattgctgaaagtcgtgcgacccgatacaaagaaggtgcatacgattttcaatcaggcgttgacgcaaaccggacggctcagctcgacggagccgaacttgcaaaacattccgattcggcttgaggaaggacggaaaatccgccaagcgttcgtgccgtcggagtctgattggctcattttcgctgccgactactcgcaaattgagttgcgcgtcctcgcccatattgcggaagatgacaatttaatggaagcgttccgccgcgatttggatatccatacgaaaacagcgatggacattttccaagtgagcgaggacgaagtgacgcccaacatgcgccgtcaggcgaaggcggtcaactttgggatcgtttacgggatcagtgattacggcttggcgcaaaacttaaatatttcacgcaaagaggccgctgaattcatcgagcgctacttcgaaagcttccctggcgtgaagcggtatatggaaaacattgtgcaagaagcaaaacagaaagggtatgtgacgacgctgctgcatcggcgccgctatttgccggatatcacgagccgcaacttcaacgtccgcagctttgctaaacggatggcgatgaacacgccgattcaagggagcgccgctgacattattaaaaaggcgatgatcgatctgaacgctagactgaaggaagagcggctgcaagcgcgccttttgctacaggtgcatgacgagctcattttggaggcgccgaaagaagagatggagcggctgtgccggctcgttccggaagtgatggagcaagcggtcacacttcgcgtgccgctcaaagtcgattaccattatggctcgacgtggtatgacgcgaaataaaaaggatcc

SEQ ID NO: 2603 - DNA, 2712 bp, Artificial Sequence
  Description of Artificial Sequence: Synthetic DNA sequence of Bacillus caldolyticus EA1 DNA polymerase E812D
atgaaatacctgctgccgaccgctgctgctggtctgctgctcctcgctgcccagccggcgatggccatgggattgaaaaaaaagcttgttttaatcgacggcagcagcgtggcgtaccgcgcctttttcgccttgccgcttttgcataacgacaaaggcatccatacgaacgccgtctacgggtttacgatgatgttgaataaaattttggcggaagaagagccaactcatatgcttgtcgcgtttgacgccgggaaaacgacgttccggcatgaagcgtttcaagagtataaaggtgggcgccagcagacgccaccggagctgtcggagcagtttccgctgttgcgcgagctgctgagggcgtatcgcatccccgcctatgaactcgagaactacgaagcggacgatattatcggaacgcttgccgcccgcgctgagcaggaagggtttgaggtgaaagtcatttccggcgaccgcgatctgacccagctcgcctccccccatgtgacggtggacattacgaaaaaagggattaccgatatcgaaccgtacacgccggaggcggtccgcgaaaaatacggcttaactccggaacaaatcgttgatttgaaaggattgatgggcgacaaatcggacaacattcccggagtgccgggcatcggggaaaagacggcggtcaagctgctcaagcaattcggcacggtcgaaaacgtgcttgcctccattgacgagatcaaaggcgaaaagttgaaagaaacgctgcgccaacaccgggagatggcgctgttaagcaaaaagctcgccgccattcgccgcgacgccccggtcgagctctcgcttgatgacatcgtctatcaaggggaagaccgggagaaagtggtcgctttatttaaagagcttgggtttcaatcgtttttagagaaaatggaatcgccgtcatcagaagaggaaaaaccgcttgccaagatggcatttacgcttgctgaccgcgtgacggaggagatgcttgccgacaaggcggcgcttgtcgttgaagtggtcgaggaaaattatcatgatgcgccgatcgtcggcatcgctgtggtcaacgaacatggacggtttttcctgcgcccggagacggcgcttgccgatccgcagtttgtcgcctggcttggtgatgaaacgaagaaaaaaagcatgtttgactcaaagcgcgcggcagtcgccttgaaatggaaaggaattgagctatgcggcgtttcctttgatttattgctggccgcctatttgcttgatccggcgcaaggtgttgatgatgtggctgccgcagcaaaaatgaagcaatacgaagcggtgcgctcggatgaagcggtgtatggcaaaggggcgaagcgggccgtgccggatgagccagtgctcgccgagcatctcgtccgcaaggcggcggcgatttgggcgctcgaacgtccgtttttggatgagctgcgccgcaacgaacaagatcggttgctcgtcgagctcgagcagccgttgtcttcgattttggcggaaatggaatttgccggagtgaaagtggatacgaagcggctcgaacagatgggcgaagagctcgccgagcagctgcgcacggtcgagcagcgcatttatgagctcgccggccaagaattcaacatcaattcaccgaaacagctcggcgtcattttatttgaaaaactgcagctgcccgtcttgaaaaaaacgaaaaccggctactccacttcggcggatgtgcttgaaaaacttgcgccttatcacgagatcgtggaaaacattttgcattaccgccagcttggcaagttgcagtcgacgtatattgaaggattgctgaaagtcgtgcgacccgatacaaagaaggtgcatacgattttcaatcaggcgttgacgcaaaccggacggctcagctcgacggagccgaacttgcaaaacattccgattcggcttgaggaaggacggaaaatccgccaagcgttcgtgccgtcggagtctgattggctcattttcgctgccgactactcgcaaattgagttgcgcgtcctcgcccatattgcggaagatgacaatttaatggaagcgttccgccgcgatttggatatccatacgaaaacagcgatggacattttccaagtgagcgaggacgaagtgacgcccaacatgcgccgtcaggcgaaggcggtcaactttgggatcgtttacgggatcagtgattacggcttggcgcaaaacttaaatatttcacgcaaagaggccgctgaattcatcgagcgctacttcgaaagcttccctggcgtgaagcggtatatggaaaacattgtgcaagaagcaaaacagaaagggtatgtgacgacgctgctgcatcggcgccgctatttgccggatatcacgagccgcaacttcaacgtccgcagctttgctgatcggatggcgatgaacacgccgattcaagggagcgccgctgacattattaaaaaggcgatgatcgatctgaacgctagactgaaggaagagcggctgcaagcgcgccttttgctacaggtgcatgacgagctcattttggaggcgccgaaagaagagatggagcggctgtgccggctcgttccggaagtgatggagcaagcggtcacacttcgcgtgccgctcaaagtcgattaccattatggctcgacgtggtatgacgcgaaataaaaaggatcc

SEQ ID NO: 2604 - DNA, 2712 bp, Artificial Sequence
  Description of Artificial Sequence: Synthetic DNA sequence of Bacillus caldolyticus EA1 DNA polymerase E812F
atgaaatacctgctgccgaccgctgctgctggtctgctgctcctcgctgcccagccggcgatggccatgggattgaaaaaaaagcttgttttaatcgacggcagcagcgtggcgtaccgcgcctttttcgccttgccgcttttgcataacgacaaaggcatccatacgaacgccgtctacgggtttacgatgatgttgaataaaattttggcggaagaagagccaactcatatgcttgtcgcgtttgacgccgggaaaacgacgttccggcatgaagcgtttcaagagtataaaggtgggcgccagcagacgccaccggagctgtcggagcagtttccgctgttgcgcgagctgctgagggcgtatcgcatccccgcctatgaactcgagaactacgaagcggacgatattatcggaacgcttgccgcccgcgctgagcaggaagggtttgaggtgaaagtcatttccggcgaccgcgatctgacccagctcgcctccccccatgtgacggtggacattacgaaaaaagggattaccgatatcgaaccgtacacgccggaggcggtccgcgaaaaatacggcttaactccggaacaaatcgttgatttgaaaggattgatgggcgacaaatcggacaacattcccggagtgccgggcatcggggaaaagacggcggtcaagctgctcaagcaattcggcacggtcgaaaacgtgcttgcctccattgacgagatcaaaggcgaaaagttgaaagaaacgctgcgccaacaccgggagatggcgctgttaagcaaaaagctcgccgccattcgccgcgacgccccggtcgagctctcgcttgatgacatcgtctatcaaggggaagaccgggagaaagtggtcgctttatttaaagagcttgggtttcaatcgtttttagagaaaatggaatcgccgtcatcagaagaggaaaaaccgcttgccaagatggcatttacgcttgctgaccgcgtgacggaggagatgcttgccgacaaggcggcgcttgtcgttgaagtggtcgaggaaaattatcatgatgcgccgatcgtcggcatcgctgtggtcaacgaacatggacggtttttcctgcgcccggagacggcgcttgccgatccgcagtttgtcgcctggcttggtgatgaaacgaagaaaaaaagcatgtttgactcaaagcgcgcggcagtcgccttgaaatggaaaggaattgagctatgcggcgtttcctttgatttattgctggccgcctatttgcttgatccggcgcaaggtgttgatgatgtggctgccgcagcaaaaatgaagcaatacgaagcggtgcgctcggatgaagcggtgtatggcaaaggggcgaagcgggccgtgccggatgagccagtgctcgccgagcatctcgtccgcaaggcggcggcgatttgggcgctcgaacgtccgtttttggatgagctgcgccgcaacgaacaagatcggttgctcgtcgagctcgagcagccgttgtcttcgattttggcggaaatggaatttgccggagtgaaagtggatacgaagcggctcgaacagatgggcgaagagctcgccgagcagctgcgcacggtcgagcagcgcatttatgagctcgccggccaagaattcaacatcaattcaccgaaacagctcggcgtcattttatttgaaaaactgcagctgcccgtcttgaaaaaaacgaaaaccggctactccacttcggcggatgtgcttgaaaaacttgcgccttatcacgagatcgtggaaaacattttgcattaccgccagcttggcaagttgcagtcgacgtatattgaaggattgctgaaagtcgtgcgacccgatacaaagaaggtgcatacgattttcaatcaggcgttgacgcaaaccggacggctcagctcgacggagccgaacttgcaaaacattccgattcggcttgaggaaggacggaaaatccgccaagcgttcgtgccgtcggagtctgattggctcattttcgctgccgactactcgcaaattgagttgcgcgtcctcgcccatattgcggaagatgacaatttaatggaagcgttccgccgcgatttggatatccatacgaaaacagcgatggacattttccaagtgagcgaggacgaagtgacgcccaacatgcgccgtcaggcgaaggcggtcaactttgggatcgtttacgggatcagtgattacggcttggcgcaaaacttaaatatttcacgcaaagaggccgctgaattcatcgagcgctacttcgaaagcttccctggcgtgaagcggtatatggaaaacattgtgcaagaagcaaaacagaaagggtatgtgacgacgctgctgcatcggcgccgctatttgccggatatcacgagccgcaacttcaacgtccgcagctttgcttttcggatggcgatgaacacgccgattcaagggagcgccgctgacattattaaaaaggcgatgatcgatctgaacgctagactgaaggaagagcggctgcaagcgcgccttttgctacaggtgcatgacgagctcattttggaggcgccgaaagaagagatggagcggctgtgccggctcgttccggaagtgatggagcaagcggtcacacttcgcgtgccgctcaaagtcgattaccattatggctcgacgtggtatgacgcgaaataaaaaggatcc

SEQ ID NO: 2605 - DNA, 2712 bp, Artificial Sequence
  Description of Artificial Sequence: Synthetic DNA sequence of Bacillus caldolyticus EA1 DNA polymerase E812S
atgaaatacctgctgccgaccgctgctgctggtctgctgctcctcgctgcccagccggcgatggccatgggattgaaaaaaaagcttgttttaatcgacggcagcagcgtggcgtaccgcgcctttttcgccttgccgcttttgcataacgacaaaggcatccatacgaacgccgtctacgggtttacgatgatgttgaataaaattttggcggaagaagagccaactcatatgcttgtcgcgtttgacgccgggaaaacgacgttccggcatgaagcgtttcaagagtataaaggtgggcgccagcagacgccaccggagctgtcggagcagtttccgctgttgcgcgagctgctgagggcgtatcgcatccccgcctatgaactcgagaactacgaagcggacgatattatcggaacgcttgccgcccgcgctgagcaggaagggtttgaggtgaaagtcatttccggcgaccgcgatctgacccagctcgcctccccccatgtgacggtggacattacgaaaaaagggattaccgatatcgaaccgtacacgccggaggcggtccgcgaaaaatacggcttaactccggaacaaatcgttgatttgaaaggattgatgggcgacaaatcggacaacattcccggagtgccgggcatcggggaaaagacggcggtcaagctgctcaagcaattcggcacggtcgaaaacgtgcttgcctccattgacgagatcaaaggcgaaaagttgaaagaaacgctgcgccaacaccgggagatggcgctgttaagcaaaaagctcgccgccattcgccgcgacgccccggtcgagctctcgcttgatgacatcgtctatcaaggggaagaccgggagaaagtggtcgctttatttaaagagcttgggtttcaatcgtttttagagaaaatggaatcgccgtcatcagaagaggaaaaaccgcttgccaagatggcatttacgcttgctgaccgcgtgacggaggagatgcttgccgacaaggcggcgcttgtcgttgaagtggtcgaggaaaattatcatgatgcgccgatcgtcggcatcgctgtggtcaacgaacatggacggtttttcctgcgcccggagacggcgcttgccgatccgcagtttgtcgcctggcttggtgatgaaacgaagaaaaaaagcatgtttgactcaaagcgcgcggcagtcgccttgaaatggaaaggaattgagctatgcggcgtttcctttgatttattgctggccgcctatttgcttgatccggcgcaaggtgttgatgatgtggctgccgcagcaaaaatgaagcaatacgaagcggtgcgctcggatgaagcggtgtatggcaaaggggcgaagcgggccgtgccggatgagccagtgctcgccgagcatctcgtccgcaaggcggcggcgatttgggcgctcgaacgtccgtttttggatgagctgcgccgcaacgaacaagatcggttgctcgtcgagctcgagcagccgttgtcttcgattttggcggaaatggaatttgccggagtgaaagtggatacgaagcggctcgaacagatgggcgaagagctcgccgagcagctgcgcacggtcgagcagcgcatttatgagctcgccggccaagaattcaacatcaattcaccgaaacagctcggcgtcattttatttgaaaaactgcagctgcccgtcttgaaaaaaacgaaaaccggctactccacttcggcggatgtgcttgaaaaacttgcgccttatcacgagatcgtggaaaacattttgcattaccgccagcttggcaagttgcagtcgacgtatattgaaggattgctgaaagtcgtgcgacccgatacaaagaaggtgcatacgattttcaatcaggcgttgacgcaaaccggacggctcagctcgacggagccgaacttgcaaaacattccgattcggcttgaggaaggacggaaaatccgccaagcgttcgtgccgtcggagtctgattggctcattttcgctgccgactactcgcaaattgagttgcgcgtcctcgcccatattgcggaagatgacaatttaatggaagcgttccgccgcgatttggatatccatacgaaaacagcgatggacattttccaagtgagcgaggacgaagtgacgcccaacatgcgccgtcaggcgaaggcggtcaactttgggatcgtttacgggatcagtgattacggcttggcgcaaaacttaaatatttcacgcaaagaggccgctgaattcatcgagcgctacttcgaaagcttccctggcgtgaagcggtatatggaaaacattgtgcaagaagcaaaacagaaagggtatgtgacgacgctgctgcatcggcgccgctatttgccggatatcacgagccgcaacttcaacgtccgcagctttgcttctcggatggcgatgaacacgccgattcaagggagcgccgctgacattattaaaaaggcgatgatcgatctgaacgctagactgaaggaagagcggctgcaagcgcgccttttgctacaggtgcatgacgagctcattttggaggcgccgaaagaagagatggagcggctgtgccggctcgttccggaagtgatggagcaagcggtcacacttcgcgtgccgctcaaagtcgattaccattatggctcgacgtggtatgacgcgaaataaaaaggatcc

SEQ ID NO: 2606 - DNA, 2712 bp, Artificial Sequence
  Description of Artificial Sequence: Synthetic DNA sequence of Bacillus caldolyticus EA1 DNA polymerase E812Y
atgaaatacctgctgccgaccgctgctgctggtctgctgctcctcgctgcccagccggcgatggccatgggattgaaaaaaaagcttgttttaatcgacggcagcagcgtggcgtaccgcgcctttttcgccttgccgcttttgcataacgacaaaggcatccatacgaacgccgtctacgggtttacgatgatgttgaataaaattttggcggaagaagagccaactcatatgcttgtcgcgtttgacgccgggaaaacgacgttccggcatgaagcgtttcaagagtataaaggtgggcgccagcagacgccaccggagctgtcggagcagtttccgctgttgcgcgagctgctgagggcgtatcgcatccccgcctatgaactcgagaactacgaagcggacgatattatcggaacgcttgccgcccgcgctgagcaggaagggtttgaggtgaaagtcatttccggcgaccgcgatctgacccagctcgcctccccccatgtgacggtggacattacgaaaaaagggattaccgatatcgaaccgtacacgccggaggcggtccgcgaaaaatacggcttaactccggaacaaatcgttgatttgaaaggattgatgggcgacaaatcggacaacattcccggagtgccgggcatcggggaaaagacggcggtcaagctgctcaagcaattcggcacggtcgaaaacgtgcttgcctccattgacgagatcaaaggcgaaaagttgaaagaaacgctgcgccaacaccgggagatggcgctgttaagcaaaaagctcgccgccattcgccgcgacgccccggtcgagctctcgcttgatgacatcgtctatcaaggggaagaccgggagaaagtggtcgctttatttaaagagcttgggtttcaatcgtttttagagaaaatggaatcgccgtcatcagaagaggaaaaaccgcttgccaagatggcatttacgcttgctgaccgcgtgacggaggagatgcttgccgacaaggcggcgcttgtcgttgaagtggtcgaggaaaattatcatgatgcgccgatcgtcggcatcgctgtggtcaacgaacatggacggtttttcctgcgcccggagacggcgcttgccgatccgcagtttgtcgcctggcttggtgatgaaacgaagaaaaaaagcatgtttgactcaaagcgcgcggcagtcgccttgaaatggaaaggaattgagctatgcggcgtttcctttgatttattgctggccgcctatttgcttgatccggcgcaaggtgttgatgatgtggctgccgcagcaaaaatgaagcaatacgaagcggtgcgctcggatgaagcggtgtatggcaaaggggcgaagcgggccgtgccggatgagccagtgctcgccgagcatctcgtccgcaaggcggcggcgatttgggcgctcgaacgtccgtttttggatgagctgcgccgcaacgaacaagatcggttgctcgtcgagctcgagcagccgttgtcttcgattttggcggaaatggaatttgccggagtgaaagtggatacgaagcggctcgaacagatgggcgaagagctcgccgagcagctgcgcacggtcgagcagcgcatttatgagctcgccggccaagaattcaacatcaattcaccgaaacagctcggcgtcattttatttgaaaaactgcagctgcccgtcttgaaaaaaacgaaaaccggctactccacttcggcggatgtgcttgaaaaacttgcgccttatcacgagatcgtggaaaacattttgcattaccgccagcttggcaagttgcagtcgacgtatattgaaggattgctgaaagtcgtgcgacccgatacaaagaaggtgcatacgattttcaatcaggcgttgacgcaaaccggacggctcagctcgacggagccgaacttgcaaaacattccgattcggcttgaggaaggacggaaaatccgccaagcgttcgtgccgtcggagtctgattggctcattttcgctgccgactactcgcaaattgagttgcgcgtcctcgcccatattgcggaagatgacaatttaatggaagcgttccgccgcgatttggatatccatacgaaaacagcgatggacattttccaagtgagcgaggacgaagtgacgcccaacatgcgccgtcaggcgaaggcggtcaactttgggatcgtttacgggatcagtgattacggcttggcgcaaaacttaaatatttcacgcaaagaggccgctgaattcatcgagcgctacttcgaaagcttccctggcgtgaagcggtatatggaaaacattgtgcaagaagcaaaacagaaagggtatgtgacgacgctgctgcatcggcgccgctatttgccggatatcacgagccgcaacttcaacgtccgcagctttgcttatcggatggcgatgaacacgccgattcaagggagcgccgctgacattattaaaaaggcgatgatcgatctgaacgctagactgaaggaagagcggctgcaagcgcgccttttgctacaggtgcatgacgagctcattttggaggcgccgaaagaagagatggagcggctgtgccggctcgttccggaagtgatggagcaagcggtcacacttcgcgtgccgctcaaagtcgattaccattatggctcgacgtggtatgacgcgaaataaaaaggatcc

SEQ ID NO: 2607 - DNA, 2712 bp, Artificial Sequence
  Description of Artificial Sequence: Synthetic DNA sequence of Bacillus caldolyticus EA1 DNA polymerase E812W
atgaaatacctgctgccgaccgctgctgctggtctgctgctcctcgctgcccagccggcgatggccatgggattgaaaaaaaagcttgttttaatcgacggcagcagcgtggcgtaccgcgcctttttcgccttgccgcttttgcataacgacaaaggcatccatacgaacgccgtctacgggtttacgatgatgttgaataaaattttggcggaagaagagccaactcatatgcttgtcgcgtttgacgccgggaaaacgacgttccggcatgaagcgtttcaagagtataaaggtgggcgccagcagacgccaccggagctgtcggagcagtttccgctgttgcgcgagctgctgagggcgtatcgcatccccgcctatgaactcgagaactacgaagcggacgatattatcggaacgcttgccgcccgcgctgagcaggaagggtttgaggtgaaagtcatttccggcgaccgcgatctgacccagctcgcctccccccatgtgacggtggacattacgaaaaaagggattaccgatatcgaaccgtacacgccggaggcggtccgcgaaaaatacggcttaactccggaacaaatcgttgatttgaaaggattgatgggcgacaaatcggacaacattcccggagtgccgggcatcggggaaaagacggcggtcaagctgctcaagcaattcggcacggtcgaaaacgtgcttgcctccattgacgagatcaaaggcgaaaagttgaaagaaacgctgcgccaacaccgggagatggcgctgttaagcaaaaagctcgccgccattcgccgcgacgccccggtcgagctctcgcttgatgacatcgtctatcaaggggaagaccgggagaaagtggtcgctttatttaaagagcttgggtttcaatcgtttttagagaaaatggaatcgccgtcatcagaagaggaaaaaccgcttgccaagatggcatttacgcttgctgaccgcgtgacggaggagatgcttgccgacaaggcggcgcttgtcgttgaagtggtcgaggaaaattatcatgatgcgccgatcgtcggcatcgctgtggtcaacgaacatggacggtttttcctgcgcccggagacggcgcttgccgatccgcagtttgtcgcctggcttggtgatgaaacgaagaaaaaaagcatgtttgactcaaagcgcgcggcagtcgccttgaaatggaaaggaattgagctatgcggcgtttcctttgatttattgctggccgcctatttgcttgatccggcgcaaggtgttgatgatgtggctgccgcagcaaaaatgaagcaatacgaagcggtgcgctcggatgaagcggtgtatggcaaaggggcgaagcgggccgtgccggatgagccagtgctcgccgagcatctcgtccgcaaggcggcggcgatttgggcgctcgaacgtccgtttttggatgagctgcgccgcaacgaacaagatcggttgctcgtcgagctcgagcagccgttgtcttcgattttggcggaaatggaatttgccggagtgaaagtggatacgaagcggctcgaacagatgggcgaagagctcgccgagcagctgcgcacggtcgagcagcgcatttatgagctcgccggccaagaattcaacatcaattcaccgaaacagctcggcgtcattttatttgaaaaactgcagctgcccgtcttgaaaaaaacgaaaaccggctactccacttcggcggatgtgcttgaaaaacttgcgccttatcacgagatcgtggaaaacattttgcattaccgccagcttggcaagttgcagtcgacgtatattgaaggattgctgaaagtcgtgcgacccgatacaaagaaggtgcatacgattttcaatcaggcgttgacgcaaaccggacggctcagctcgacggagccgaacttgcaaaacattccgattcggcttgaggaaggacggaaaatccgccaagcgttcgtgccgtcggagtctgattggctcattttcgctgccgactactcgcaaattgagttgcgcgtcctcgcccatattgcggaagatgacaatttaatggaagcgttccgccgcgatttggatatccatacgaaaacagcgatggacattttccaagtgagcgaggacgaagtgacgcccaacatgcgccgtcaggcgaaggcggtcaactttgggatcgtttacgggatcagtgattacggcttggcgcaaaacttaaatatttcacgcaaagaggccgctgaattcatcgagcgctacttcgaaagcttccctggcgtgaagcggtatatggaaaacattgtgcaagaagcaaaacagaaagggtatgtgacgacgctgctgcatcggcgccgctatttgccggatatcacgagccgcaacttcaacgtccgcagctttgcttggcggatggcgatgaacacgccgattcaagggagcgccgctgacattattaaaaaggcgatgatcgatctgaacgctagactgaaggaagagcggctgcaagcgcgccttttgctacaggtgcatgacgagctcattttggaggcgccgaaagaagagatggagcggctgtgccggctcgttccggaagtgatggagcaagcggtcacacttcgcgtgccgctcaaagtcgattaccattatggctcgacgtggtatgacgcgaaataaaaaggatcc

SEQ ID NO: 2608 - DNA, 2712 bp, Artificial Sequence
  Description of Artificial Sequence: Synthetic DNA sequence of Bacillus caldolyticus EA1 DNA polymerase E812P
atgaaatacctgctgccgaccgctgctgctggtctgctgctcctcgctgcccagccggcgatggccatgggattgaaaaaaaagcttgttttaatcgacggcagcagcgtggcgtaccgcgcctttttcgccttgccgcttttgcataacgacaaaggcatccatacgaacgccgtctacgggtttacgatgatgttgaataaaattttggcggaagaagagccaactcatatgcttgtcgcgtttgacgccgggaaaacgacgttccggcatgaagcgtttcaagagtataaaggtgggcgccagcagacgccaccggagctgtcggagcagtttccgctgttgcgcgagctgctgagggcgtatcgcatccccgcctatgaactcgagaactacgaagcggacgatattatcggaacgcttgccgcccgcgctgagcaggaagggtttgaggtgaaagtcatttccggcgaccgcgatctgacccagctcgcctccccccatgtgacggtggacattacgaaaaaagggattaccgatatcgaaccgtacacgccggaggcggtccgcgaaaaatacggcttaactccggaacaaatcgttgatttgaaaggattgatgggcgacaaatcggacaacattcccggagtgccgggcatcggggaaaagacggcggtcaagctgctcaagcaattcggcacggtcgaaaacgtgcttgcctccattgacgagatcaaaggcgaaaagttgaaagaaacgctgcgccaacaccgggagatggcgctgttaagcaaaaagctcgccgccattcgccgcgacgccccggtcgagctctcgcttgatgacatcgtctatcaaggggaagaccgggagaaagtggtcgctttatttaaagagcttgggtttcaatcgtttttagagaaaatggaatcgccgtcatcagaagaggaaaaaccgcttgccaagatggcatttacgcttgctgaccgcgtgacggaggagatgcttgccgacaaggcggcgcttgtcgttgaagtggtcgaggaaaattatcatgatgcgccgatcgtcggcatcgctgtggtcaacgaacatggacggtttttcctgcgcccggagacggcgcttgccgatccgcagtttgtcgcctggcttggtgatgaaacgaagaaaaaaagcatgtttgactcaaagcgcgcggcagtcgccttgaaatggaaaggaattgagctatgcggcgtttcctttgatttattgctggccgcctatttgcttgatccggcgcaaggtgttgatgatgtggctgccgcagcaaaaatgaagcaatacgaagcggtgcgctcggatgaagcggtgtatggcaaaggggcgaagcgggccgtgccggatgagccagtgctcgccgagcatctcgtccgcaaggcggcggcgatttgggcgctcgaacgtccgtttttggatgagctgcgccgcaacgaacaagatcggttgctcgtcgagctcgagcagccgttgtcttcgattttggcggaaatggaatttgccggagtgaaagtggatacgaagcggctcgaacagatgggcgaagagctcgccgagcagctgcgcacggtcgagcagcgcatttatgagctcgccggccaagaattcaacatcaattcaccgaaacagctcggcgtcattttatttgaaaaactgcagctgcccgtcttgaaaaaaacgaaaaccggctactccacttcggcggatgtgcttgaaaaacttgcgccttatcacgagatcgtggaaaacattttgcattaccgccagcttggcaagttgcagtcgacgtatattgaaggattgctgaaagtcgtgcgacccgatacaaagaaggtgcatacgattttcaatcaggcgttgacgcaaaccggacggctcagctcgacggagccgaacttgcaaaacattccgattcggcttgaggaaggacggaaaatccgccaagcgttcgtgccgtcggagtctgattggctcattttcgctgccgactactcgcaaattgagttgcgcgtcctcgcccatattgcggaagatgacaatttaatggaagcgttccgccgcgatttggatatccatacgaaaacagcgatggacattttccaagtgagcgaggacgaagtgacgcccaacatgcgccgtcaggcgaaggcggtcaactttgggatcgtttacgggatcagtgattacggcttggcgcaaaacttaaatatttcacgcaaagaggccgctgaattcatcgagcgctacttcgaaagcttccctggcgtgaagcggtatatggaaaacattgtgcaagaagcaaaacagaaagggtatgtgacgacgctgctgcatcggcgccgctatttgccggatatcacgagccgcaacttcaacgtccgcagctttgctcctcggatggcgatgaacacgccgattcaagggagcgccgctgacattattaaaaaggcgatgatcgatctgaacgctagactgaaggaagagcggctgcaagcgcgccttttgctacaggtgcatgacgagctcattttggaggcgccgaaagaagagatggagcggctgtgccggctcgttccggaagtgatggagcaagcggtcacacttcgcgtgccgctcaaagtcgattaccattatggctcgacgtggtatgacgcgaaataaaaaggatcc

SEQ ID NO: 2609 - DNA, 2712 bp, Artificial Sequence
  Description of Artificial Sequence: Synthetic DNA sequence of Bacillus caldolyticus EA1 DNA polymerase E812M
atgaaatacctgctgccgaccgctgctgctggtctgctgctcctcgctgcccagccggcgatggccatgggattgaaaaaaaagcttgttttaatcgacggcagcagcgtggcgtaccgcgcctttttcgccttgccgcttttgcataacgacaaaggcatccatacgaacgccgtctacgggtttacgatgatgttgaataaaattttggcggaagaagagccaactcatatgcttgtcgcgtttgacgccgggaaaacgacgttccggcatgaagcgtttcaagagtataaaggtgggcgccagcagacgccaccggagctgtcggagcagtttccgctgttgcgcgagctgctgagggcgtatcgcatccccgcctatgaactcgagaactacgaagcggacgatattatcggaacgcttgccgcccgcgctgagcaggaagggtttgaggtgaaagtcatttccggcgaccgcgatctgacccagctcgcctccccccatgtgacggtggacattacgaaaaaagggattaccgatatcgaaccgtacacgccggaggcggtccgcgaaaaatacggcttaactccggaacaaatcgttgatttgaaaggattgatgggcgacaaatcggacaacattcccggagtgccgggcatcggggaaaagacggcggtcaagctgctcaagcaattcggcacggtcgaaaacgtgcttgcctccattgacgagatcaaaggcgaaaagttgaaagaaacgctgcgccaacaccgggagatggcgctgttaagcaaaaagctcgccgccattcgccgcgacgccccggtcgagctctcgcttgatgacatcgtctatcaaggggaagaccgggagaaagtggtcgctttatttaaagagcttgggtttcaatcgtttttagagaaaatggaatcgccgtcatcagaagaggaaaaaccgcttgccaagatggcatttacgcttgctgaccgcgtgacggaggagatgcttgccgacaaggcggcgcttgtcgttgaagtggtcgaggaaaattatcatgatgcgccgatcgtcggcatcgctgtggtcaacgaacatggacggtttttcctgcgcccggagacggcgcttgccgatccgcagtttgtcgcctggcttggtgatgaaacgaagaaaaaaagcatgtttgactcaaagcgcgcggcagtcgccttgaaatggaaaggaattgagctatgcggcgtttcctttgatttattgctggccgcctatttgcttgatccggcgcaaggtgttgatgatgtggctgccgcagcaaaaatgaagcaatacgaagcggtgcgctcggatgaagcggtgtatggcaaaggggcgaagcgggccgtgccggatgagccagtgctcgccgagcatctcgtccgcaaggcggcggcgatttgggcgctcgaacgtccgtttttggatgagctgcgccgcaacgaacaagatcggttgctcgtcgagctcgagcagccgttgtcttcgattttggcggaaatggaatttgccggagtgaaagtggatacgaagcggctcgaacagatgggcgaagagctcgccgagcagctgcgcacggtcgagcagcgcatttatgagctcgccggccaagaattcaacatcaattcaccgaaacagctcggcgtcattttatttgaaaaactgcagctgcccgtcttgaaaaaaacgaaaaccggctactccacttcggcggatgtgcttgaaaaacttgcgccttatcacgagatcgtggaaaacattttgcattaccgccagcttggcaagttgcagtcgacgtatattgaaggattgctgaaagtcgtgcgacccgatacaaagaaggtgcatacgattttcaatcaggcgttgacgcaaaccggacggctcagctcgacggagccgaacttgcaaaacattccgattcggcttgaggaaggacggaaaatccgccaagcgttcgtgccgtcggagtctgattggctcattttcgctgccgactactcgcaaattgagttgcgcgtcctcgcccatattgcggaagatgacaatttaatggaagcgttccgccgcgatttggatatccatacgaaaacagcgatggacattttccaagtgagcgaggacgaagtgacgcccaacatgcgccgtcaggcgaaggcggtcaactttgggatcgtttacgggatcagtgattacggcttggcgcaaaacttaaatatttcacgcaaagaggccgctgaattcatcgagcgctacttcgaaagcttccctggcgtgaagcggtatatggaaaacattgtgcaagaagcaaaacagaaagggtatgtgacgacgctgctgcatcggcgccgctatttgccggatatcacgagccgcaacttcaacgtccgcagctttgctatgcggatggcgatgaacacgccgattcaagggagcgccgctgacattattaaaaaggcgatgatcgatctgaacgctagactgaaggaagagcggctgcaagcgcgccttttgctacaggtgcatgacgagctcattttggaggcgccgaaagaagagatggagcggctgtgccggctcgttccggaagtgatggagcaagcggtcacacttcgcgtgccgctcaaagtcgattaccattatggctcgacgtggtatgacgcgaaataaaaaggatcc

SEQ ID NO: 2610 - DNA, 2712 bp, Artificial Sequence
  Description of Artificial Sequence: Synthetic DNA sequence of Bacillus caldolyticus EA1 DNA polymerase E812T
atgaaatacctgctgccgaccgctgctgctggtctgctgctcctcgctgcccagccggcgatggccatgggattgaaaaaaaagcttgttttaatcgacggcagcagcgtggcgtaccgcgcctttttcgccttgccgcttttgcataacgacaaaggcatccatacgaacgccgtctacgggtttacgatgatgttgaataaaattttggcggaagaagagccaactcatatgcttgtcgcgtttgacgccgggaaaacgacgttccggcatgaagcgtttcaagagtataaaggtgggcgccagcagacgccaccggagctgtcggagcagtttccgctgttgcgcgagctgctgagggcgtatcgcatccccgcctatgaactcgagaactacgaagcggacgatattatcggaacgcttgccgcccgcgctgagcaggaagggtttgaggtgaaagtcatttccggcgaccgcgatctgacccagctcgcctccccccatgtgacggtggacattacgaaaaaagggattaccgatatcgaaccgtacacgccggaggcggtccgcgaaaaatacggcttaactccggaacaaatcgttgatttgaaaggattgatgggcgacaaatcggacaacattcccggagtgccgggcatcggggaaaagacggcggtcaagctgctcaagcaattcggcacggtcgaaaacgtgcttgcctccattgacgagatcaaaggcgaaaagttgaaagaaacgctgcgccaacaccgggagatggcgctgttaagcaaaaagctcgccgccattcgccgcgacgccccggtcgagctctcgcttgatgacatcgtctatcaaggggaagaccgggagaaagtggtcgctttatttaaagagcttgggtttcaatcgtttttagagaaaatggaatcgccgtcatcagaagaggaaaaaccgcttgccaagatggcatttacgcttgctgaccgcgtgacggaggagatgcttgccgacaaggcggcgcttgtcgttgaagtggtcgaggaaaattatcatgatgcgccgatcgtcggcatcgctgtggtcaacgaacatggacggtttttcctgcgcccggagacggcgcttgccgatccgcagtttgtcgcctggcttggtgatgaaacgaagaaaaaaagcatgtttgactcaaagcgcgcggcagtcgccttgaaatggaaaggaattgagctatgcggcgtttcctttgatttattgctggccgcctatttgcttgatccggcgcaaggtgttgatgatgtggctgccgcagcaaaaatgaagcaatacgaagcggtgcgctcggatgaagcggtgtatggcaaaggggcgaagcgggccgtgccggatgagccagtgctcgccgagcatctcgtccgcaaggcggcggcgatttgggcgctcgaacgtccgtttttggatgagctgcgccgcaacgaacaagatcggttgctcgtcgagctcgagcagccgttgtcttcgattttggcggaaatggaatttgccggagtgaaagtggatacgaagcggctcgaacagatgggcgaagagctcgccgagcagctgcgcacggtcgagcagcgcatttatgagctcgccggccaagaattcaacatcaattcaccgaaacagctcggcgtcattttatttgaaaaactgcagctgcccgtcttgaaaaaaacgaaaaccggctactccacttcggcggatgtgcttgaaaaacttgcgccttatcacgagatcgtggaaaacattttgcattaccgccagcttggcaagttgcagtcgacgtatattgaaggattgctgaaagtcgtgcgacccgatacaaagaaggtgcatacgattttcaatcaggcgttgacgcaaaccggacggctcagctcgacggagccgaacttgcaaaacattccgattcggcttgaggaaggacggaaaatccgccaagcgttcgtgccgtcggagtctgattggctcattttcgctgccgactactcgcaaattgagttgcgcgtcctcgcccatattgcggaagatgacaatttaatggaagcgttccgccgcgatttggatatccatacgaaaacagcgatggacattttccaagtgagcgaggacgaagtgacgcccaacatgcgccgtcaggcgaaggcggtcaactttgggatcgtttacgggatcagtgattacggcttggcgcaaaacttaaatatttcacgcaaagaggccgctgaattcatcgagcgctacttcgaaagcttccctggcgtgaagcggtatatggaaaacattgtgcaagaagcaaaacagaaagggtatgtgacgacgctgctgcatcggcgccgctatttgccggatatcacgagccgcaacttcaacgtccgcagctttgctactcggatggcgatgaacacgccgattcaagggagcgccgctgacattattaaaaaggcgatgatcgatctgaacgctagactgaaggaagagcggctgcaagcgcgccttttgctacaggtgcatgacgagctcattttggaggcgccgaaagaagagatggagcggctgtgccggctcgttccggaagtgatggagcaagcggtcacacttcgcgtgccgctcaaagtcgattaccattatggctcgacgtggtatgacgcgaaataaaaaggatcc

SEQ ID NO: 2611 - DNA, 2712 bp, Artificial Sequence
  Description of Artificial Sequence: Synthetic DNA sequence of Bacillus caldolyticus EA1 DNA polymerase E812N
atgaaatacctgctgccgaccgctgctgctggtctgctgctcctcgctgcccagccggcgatggccatgggattgaaaaaaaagcttgttttaatcgacggcagcagcgtggcgtaccgcgcctttttcgccttgccgcttttgcataacgacaaaggcatccatacgaacgccgtctacgggtttacgatgatgttgaataaaattttggcggaagaagagccaactcatatgcttgtcgcgtttgacgccgggaaaacgacgttccggcatgaagcgtttcaagagtataaaggtgggcgccagcagacgccaccggagctgtcggagcagtttccgctgttgcgcgagctgctgagggcgtatcgcatccccgcctatgaactcgagaactacgaagcggacgatattatcggaacgcttgccgcccgcgctgagcaggaagggtttgaggtgaaagtcatttccggcgaccgcgatctgacccagctcgcctccccccatgtgacggtggacattacgaaaaaagggattaccgatatcgaaccgtacacgccggaggcggtccgcgaaaaatacggcttaactccggaacaaatcgttgatttgaaaggattgatgggcgacaaatcggacaacattcccggagtgccgggcatcggggaaaagacggcggtcaagctgctcaagcaattcggcacggtcgaaaacgtgcttgcctccattgacgagatcaaaggcgaaaagttgaaagaaacgctgcgccaacaccgggagatggcgctgttaagcaaaaagctcgccgccattcgccgcgacgccccggtcgagctctcgcttgatgacatcgtctatcaaggggaagaccgggagaaagtggtcgctttatttaaagagcttgggtttcaatcgtttttagagaaaatggaatcgccgtcatcagaagaggaaaaaccgcttgccaagatggcatttacgcttgctgaccgcgtgacggaggagatgcttgccgacaaggcggcgcttgtcgttgaagtggtcgaggaaaattatcatgatgcgccgatcgtcggcatcgctgtggtcaacgaacatggacggtttttcctgcgcccggagacggcgcttgccgatccgcagtttgtcgcctggcttggtgatgaaacgaagaaaaaaagcatgtttgactcaaagcgcgcggcagtcgccttgaaatggaaaggaattgagctatgcggcgtttcctttgatttattgctggccgcctatttgcttgatccggcgcaaggtgttgatgatgtggctgccgcagcaaaaatgaagcaatacgaagcggtgcgctcggatgaagcggtgtatggcaaaggggcgaagcgggccgtgccggatgagccagtgctcgccgagcatctcgtccgcaaggcggcggcgatttgggcgctcgaacgtccgtttttggatgagctgcgccgcaacgaacaagatcggttgctcgtcgagctcgagcagccgttgtcttcgattttggcggaaatggaatttgccggagtgaaagtggatacgaagcggctcgaacagatgggcgaagagctcgccgagcagctgcgcacggtcgagcagcgcatttatgagctcgccggccaagaattcaacatcaattcaccgaaacagctcggcgtcattttatttgaaaaactgcagctgcccgtcttgaaaaaaacgaaaaccggctactccacttcggcggatgtgcttgaaaaacttgcgccttatcacgagatcgtggaaaacattttgcattaccgccagcttggcaagttgcagtcgacgtatattgaaggattgctgaaagtcgtgcgacccgatacaaagaaggtgcatacgattttcaatcaggcgttgacgcaaaccggacggctcagctcgacggagccgaacttgcaaaacattccgattcggcttgaggaaggacggaaaatccgccaagcgttcgtgccgtcggagtctgattggctcattttcgctgccgactactcgcaaattgagttgcgcgtcctcgcccatattgcggaagatgacaatttaatggaagcgttccgccgcgatttggatatccatacgaaaacagcgatggacattttccaagtgagcgaggacgaagtgacgcccaacatgcgccgtcaggcgaaggcggtcaactttgggatcgtttacgggatcagtgattacggcttggcgcaaaacttaaatatttcacgcaaagaggccgctgaattcatcgagcgctacttcgaaagcttccctggcgtgaagcggtatatggaaaacattgtgcaagaagcaaaacagaaagggtatgtgacgacgctgctgcatcggcgccgctatttgccggatatcacgagccgcaacttcaacgtccgcagctttgctaatcggatggcgatgaacacgccgattcaagggagcgccgctgacattattaaaaaggcgatgatcgatctgaacgctagactgaaggaagagcggctgcaagcgcgccttttgctacaggtgcatgacgagctcattttggaggcgccgaaagaagagatggagcggctgtgccggctcgttccggaagtgatggagcaagcggtcacacttcgcgtgccgctcaaagtcgattaccattatggctcgacgtggtatgacgcgaaataaaaaggatcc

SEQ ID NO: 2612 - DNA, 2712 bp, Artificial Sequence
  Description of Artificial Sequence: Synthetic DNA sequence of Bacillus caldolyticus EA1 DNA polymerase E812V
atgaaatacctgctgccgaccgctgctgctggtctgctgctcctcgctgcccagccggcgatggccatgggattgaaaaaaaagcttgttttaatcgacggcagcagcgtggcgtaccgcgcctttttcgccttgccgcttttgcataacgacaaaggcatccatacgaacgccgtctacgggtttacgatgatgttgaataaaattttggcggaagaagagccaactcatatgcttgtcgcgtttgacgccgggaaaacgacgttccggcatgaagcgtttcaagagtataaaggtgggcgccagcagacgccaccggagctgtcggagcagtttccgctgttgcgcgagctgctgagggcgtatcgcatccccgcctatgaactcgagaactacgaagcggacgatattatcggaacgcttgccgcccgcgctgagcaggaagggtttgaggtgaaagtcatttccggcgaccgcgatctgacccagctcgcctccccccatgtgacggtggacattacgaaaaaagggattaccgatatcgaaccgtacacgccggaggcggtccgcgaaaaatacggcttaactccggaacaaatcgttgatttgaaaggattgatgggcgacaaatcggacaacattcccggagtgccgggcatcggggaaaagacggcggtcaagctgctcaagcaattcggcacggtcgaaaacgtgcttgcctccattgacgagatcaaaggcgaaaagttgaaagaaacgctgcgccaacaccgggagatggcgctgttaagcaaaaagctcgccgccattcgccgcgacgccccggtcgagctctcgcttgatgacatcgtctatcaaggggaagaccgggagaaagtggtcgctttatttaaagagcttgggtttcaatcgtttttagagaaaatggaatcgccgtcatcagaagaggaaaaaccgcttgccaagatggcatttacgcttgctgaccgcgtgacggaggagatgcttgccgacaaggcggcgcttgtcgttgaagtggtcgaggaaaattatcatgatgcgccgatcgtcggcatcgctgtggtcaacgaacatggacggtttttcctgcgcccggagacggcgcttgccgatccgcagtttgtcgcctggcttggtgatgaaacgaagaaaaaaagcatgtttgactcaaagcgcgcggcagtcgccttgaaatggaaaggaattgagctatgcggcgtttcctttgatttattgctggccgcctatttgcttgatccggcgcaaggtgttgatgatgtggctgccgcagcaaaaatgaagcaatacgaagcggtgcgctcggatgaagcggtgtatggcaaaggggcgaagcgggccgtgccggatgagccagtgctcgccgagcatctcgtccgcaaggcggcggcgatttgggcgctcgaacgtccgtttttggatgagctgcgccgcaacgaacaagatcggttgctcgtcgagctcgagcagccgttgtcttcgattttggcggaaatggaatttgccggagtgaaagtggatacgaagcggctcgaacagatgggcgaagagctcgccgagcagctgcgcacggtcgagcagcgcatttatgagctcgccggccaagaattcaacatcaattcaccgaaacagctcggcgtcattttatttgaaaaactgcagctgcccgtcttgaaaaaaacgaaaaccggctactccacttcggcggatgtgcttgaaaaacttgcgccttatcacgagatcgtggaaaacattttgcattaccgccagcttggcaagttgcagtcgacgtatattgaaggattgctgaaagtcgtgcgacccgatacaaagaaggtgcatacgattttcaatcaggcgttgacgcaaaccggacggctcagctcgacggagccgaacttgcaaaacattccgattcggcttgaggaaggacggaaaatccgccaagcgttcgtgccgtcggagtctgattggctcattttcgctgccgactactcgcaaattgagttgcgcgtcctcgcccatattgcggaagatgacaatttaatggaagcgttccgccgcgatttggatatccatacgaaaacagcgatggacattttccaagtgagcgaggacgaagtgacgcccaacatgcgccgtcaggcgaaggcggtcaactttgggatcgtttacgggatcagtgattacggcttggcgcaaaacttaaatatttcacgcaaagaggccgctgaattcatcgagcgctacttcgaaagcttccctggcgtgaagcggtatatggaaaacattgtgcaagaagcaaaacagaaagggtatgtgacgacgctgctgcatcggcgccgctatttgccggatatcacgagccgcaacttcaacgtccgcagctttgctgtccggatggcgatgaacacgccgattcaagggagcgccgctgacattattaaaaaggcgatgatcgatctgaacgctagactgaaggaagagcggctgcaagcgcgccttttgctacaggtgcatgacgagctcattttggaggcgccgaaagaagagatggagcggctgtgccggctcgttccggaagtgatggagcaagcggtcacacttcgcgtgccgctcaaagtcgattaccattatggctcgacgtggtatgacgcgaaataaaaaggatcc

SEQ ID NO: 2613 - DNA, 2712 bp, Artificial Sequence
  Description of Artificial Sequence: Synthetic DNA sequence of Bacillus caldolyticus EA1 DNA polymerase R813A
atgaaatacctgctgccgaccgctgctgctggtctgctgctcctcgctgcccagccggcgatggccatgggattgaaaaaaaagcttgttttaatcgacggcagcagcgtggcgtaccgcgcctttttcgccttgccgcttttgcataacgacaaaggcatccatacgaacgccgtctacgggtttacgatgatgttgaataaaattttggcggaagaagagccaactcatatgcttgtcgcgtttgacgccgggaaaacgacgttccggcatgaagcgtttcaagagtataaaggtgggcgccagcagacgccaccggagctgtcggagcagtttccgctgttgcgcgagctgctgagggcgtatcgcatccccgcctatgaactcgagaactacgaagcggacgatattatcggaacgcttgccgcccgcgctgagcaggaagggtttgaggtgaaagtcatttccggcgaccgcgatctgacccagctcgcctccccccatgtgacggtggacattacgaaaaaagggattaccgatatcgaaccgtacacgccggaggcggtccgcgaaaaatacggcttaactccggaacaaatcgttgatttgaaaggattgatgggcgacaaatcggacaacattcccggagtgccgggcatcggggaaaagacggcggtcaagctgctcaagcaattcggcacggtcgaaaacgtgcttgcctccattgacgagatcaaaggcgaaaagttgaaagaaacgctgcgccaacaccgggagatggcgctgttaagcaaaaagctcgccgccattcgccgcgacgccccggtcgagctctcgcttgatgacatcgtctatcaaggggaagaccgggagaaagtggtcgctttatttaaagagcttgggtttcaatcgtttttagagaaaatggaatcgccgtcatcagaagaggaaaaaccgcttgccaagatggcatttacgcttgctgaccgcgtgacggaggagatgcttgccgacaaggcggcgcttgtcgttgaagtggtcgaggaaaattatcatgatgcgccgatcgtcggcatcgctgtggtcaacgaacatggacggtttttcctgcgcccggagacggcgcttgccgatccgcagtttgtcgcctggcttggtgatgaaacgaagaaaaaaagcatgtttgactcaaagcgcgcggcagtcgccttgaaatggaaaggaattgagctatgcggcgtttcctttgatttattgctggccgcctatttgcttgatccggcgcaaggtgttgatgatgtggctgccgcagcaaaaatgaagcaatacgaagcggtgcgctcggatgaagcggtgtatggcaaaggggcgaagcgggccgtgccggatgagccagtgctcgccgagcatctcgtccgcaaggcggcggcgatttgggcgctcgaacgtccgtttttggatgagctgcgccgcaacgaacaagatcggttgctcgtcgagctcgagcagccgttgtcttcgattttggcggaaatggaatttgccggagtgaaagtggatacgaagcggctcgaacagatgggcgaagagctcgccgagcagctgcgcacggtcgagcagcgcatttatgagctcgccggccaagaattcaacatcaattcaccgaaacagctcggcgtcattttatttgaaaaactgcagctgcccgtcttgaaaaaaacgaaaaccggctactccacttcggcggatgtgcttgaaaaacttgcgccttatcacgagatcgtggaaaacattttgcattaccgccagcttggcaagttgcagtcgacgtatattgaaggattgctgaaagtcgtgcgacccgatacaaagaaggtgcatacgattttcaatcaggcgttgacgcaaaccggacggctcagctcgacggagccgaacttgcaaaacattccgattcggcttgaggaaggacggaaaatccgccaagcgttcgtgccgtcggagtctgattggctcattttcgctgccgactactcgcaaattgagttgcgcgtcctcgcccatattgcggaagatgacaatttaatggaagcgttccgccgcgatttggatatccatacgaaaacagcgatggacattttccaagtgagcgaggacgaagtgacgcccaacatgcgccgtcaggcgaaggcggtcaactttgggatcgtttacgggatcagtgattacggcttggcgcaaaacttaaatatttcacgcaaagaggccgctgaattcatcgagcgctacttcgaaagcttccctggcgtgaagcggtatatggaaaacattgtgcaagaagcaaaacagaaagggtatgtgacgacgctgctgcatcggcgccgctatttgccggatatcacgagccgcaacttcaacgtccgcagctttgctgaagctatggcgatgaacacgccgattcaagggagcgccgctgacattattaaaaaggcgatgatcgatctgaacgctagactgaaggaagagcggctgcaagcgcgccttttgctacaggtgcatgacgagctcattttggaggcgccgaaagaagagatggagcggctgtgccggctcgttccggaagtgatggagcaagcggtcacacttcgcgtgccgctcaaagtcgattaccattatggctcgacgtggtatgacgcgaaataaaaaggatcc

SEQ ID NO: 2614 - DNA, 2712 bp, Artificial Sequence
  Description of Artificial Sequence: Synthetic DNA sequence of Bacillus caldolyticus EA1 DNA polymerase R813C
atgaaatacctgctgccgaccgctgctgctggtctgctgctcctcgctgcccagccggcgatggccatgggattgaaaaaaaagcttgttttaatcgacggcagcagcgtggcgtaccgcgcctttttcgccttgccgcttttgcataacgacaaaggcatccatacgaacgccgtctacgggtttacgatgatgttgaataaaattttggcggaagaagagccaactcatatgcttgtcgcgtttgacgccgggaaaacgacgttccggcatgaagcgtttcaagagtataaaggtgggcgccagcagacgccaccggagctgtcggagcagtttccgctgttgcgcgagctgctgagggcgtatcgcatccccgcctatgaactcgagaactacgaagcggacgatattatcggaacgcttgccgcccgcgctgagcaggaagggtttgaggtgaaagtcatttccggcgaccgcgatctgacccagctcgcctccccccatgtgacggtggacattacgaaaaaagggattaccgatatcgaaccgtacacgccggaggcggtccgcgaaaaatacggcttaactccggaacaaatcgttgatttgaaaggattgatgggcgacaaatcggacaacattcccggagtgccgggcatcggggaaaagacggcggtcaagctgctcaagcaattcggcacggtcgaaaacgtgcttgcctccattgacgagatcaaaggcgaaaagttgaaagaaacgctgcgccaacaccgggagatggcgctgttaagcaaaaagctcgccgccattcgccgcgacgccccggtcgagctctcgcttgatgacatcgtctatcaaggggaagaccgggagaaagtggtcgctttatttaaagagcttgggtttcaatcgtttttagagaaaatggaatcgccgtcatcagaagaggaaaaaccgcttgccaagatggcatttacgcttgctgaccgcgtgacggaggagatgcttgccgacaaggcggcgcttgtcgttgaagtggtcgaggaaaattatcatgatgcgccgatcgtcggcatcgctgtggtcaacgaacatggacggtttttcctgcgcccggagacggcgcttgccgatccgcagtttgtcgcctggcttggtgatgaaacgaagaaaaaaagcatgtttgactcaaagcgcgcggcagtcgccttgaaatggaaaggaattgagctatgcggcgtttcctttgatttattgctggccgcctatttgcttgatccggcgcaaggtgttgatgatgtggctgccgcagcaaaaatgaagcaatacgaagcggtgcgctcggatgaagcggtgtatggcaaaggggcgaagcgggccgtgccggatgagccagtgctcgccgagcatctcgtccgcaaggcggcggcgatttgggcgctcgaacgtccgtttttggatgagctgcgccgcaacgaacaagatcggttgctcgtcgagctcgagcagccgttgtcttcgattttggcggaaatggaatttgccggagtgaaagtggatacgaagcggctcgaacagatgggcgaagagctcgccgagcagctgcgcacggtcgagcagcgcatttatgagctcgccggccaagaattcaacatcaattcaccgaaacagctcggcgtcattttatttgaaaaactgcagctgcccgtcttgaaaaaaacgaaaaccggctactccacttcggcggatgtgcttgaaaaacttgcgccttatcacgagatcgtggaaaacattttgcattaccgccagcttggcaagttgcagtcgacgtatattgaaggattgctgaaagtcgtgcgacccgatacaaagaaggtgcatacgattttcaatcaggcgttgacgcaaaccggacggctcagctcgacggagccgaacttgcaaaacattccgattcggcttgaggaaggacggaaaatccgccaagcgttcgtgccgtcggagtctgattggctcattttcgctgccgactactcgcaaattgagttgcgcgtcctcgcccatattgcggaagatgacaatttaatggaagcgttccgccgcgatttggatatccatacgaaaacagcgatggacattttccaagtgagcgaggacgaagtgacgcccaacatgcgccgtcaggcgaaggcggtcaactttgggatcgtttacgggatcagtgattacggcttggcgcaaaacttaaatatttcacgcaaagaggccgctgaattcatcgagcgctacttcgaaagcttccctggcgtgaagcggtatatggaaaacattgtgcaagaagcaaaacagaaagggtatgtgacgacgctgctgcatcggcgccgctatttgccggatatcacgagccgcaacttcaacgtccgcagctttgctgaatgtatggcgatgaacacgccgattcaagggagcgccgctgacattattaaaaaggcgatgatcgatctgaacgctagactgaaggaagagcggctgcaagcgcgccttttgctacaggtgcatgacgagctcattttggaggcgccgaaagaagagatggagcggctgtgccggctcgttccggaagtgatggagcaagcggtcacacttcgcgtgccgctcaaagtcgattaccattatggctcgacgtggtatgacgcgaaataaaaaggatcc

SEQ ID NO: 2615 - DNA, 2712 bp, Artificial Sequence
  Description of Artificial Sequence: Synthetic DNA sequence of Bacillus caldolyticus EA1 DNA polymerase R813G
atgaaatacctgctgccgaccgctgctgctggtctgctgctcctcgctgcccagccggcgatggccatgggattgaaaaaaaagcttgttttaatcgacggcagcagcgtggcgtaccgcgcctttttcgccttgccgcttttgcataacgacaaaggcatccatacgaacgccgtctacgggtttacgatgatgttgaataaaattttggcggaagaagagccaactcatatgcttgtcgcgtttgacgccgggaaaacgacgttccggcatgaagcgtttcaagagtataaaggtgggcgccagcagacgccaccggagctgtcggagcagtttccgctgttgcgcgagctgctgagggcgtatcgcatccccgcctatgaactcgagaactacgaagcggacgatattatcggaacgcttgccgcccgcgctgagcaggaagggtttgaggtgaaagtcatttccggcgaccgcgatctgacccagctcgcctccccccatgtgacggtggacattacgaaaaaagggattaccgatatcgaaccgtacacgccggaggcggtccgcgaaaaatacggcttaactccggaacaaatcgttgatttgaaaggattgatgggcgacaaatcggacaacattcccggagtgccgggcatcggggaaaagacggcggtcaagctgctcaagcaattcggcacggtcgaaaacgtgcttgcctccattgacgagatcaaaggcgaaaagttgaaagaaacgctgcgccaacaccgggagatggcgctgttaagcaaaaagctcgccgccattcgccgcgacgccccggtcgagctctcgcttgatgacatcgtctatcaaggggaagaccgggagaaagtggtcgctttatttaaagagcttgggtttcaatcgtttttagagaaaatggaatcgccgtcatcagaagaggaaaaaccgcttgccaagatggcatttacgcttgctgaccgcgtgacggaggagatgcttgccgacaaggcggcgcttgtcgttgaagtggtcgaggaaaattatcatgatgcgccgatcgtcggcatcgctgtggtcaacgaacatggacggtttttcctgcgcccggagacggcgcttgccgatccgcagtttgtcgcctggcttggtgatgaaacgaagaaaaaaagcatgtttgactcaaagcgcgcggcagtcgccttgaaatggaaaggaattgagctatgcggcgtttcctttgatttattgctggccgcctatttgcttgatccggcgcaaggtgttgatgatgtggctgccgcagcaaaaatgaagcaatacgaagcggtgcgctcggatgaagcggtgtatggcaaaggggcgaagcgggccgtgccggatgagccagtgctcgccgagcatctcgtccgcaaggcggcggcgatttgggcgctcgaacgtccgtttttggatgagctgcgccgcaacgaacaagatcggttgctcgtcgagctcgagcagccgttgtcttcgattttggcggaaatggaatttgccggagtgaaagtggatacgaagcggctcgaacagatgggcgaagagctcgccgagcagctgcgcacggtcgagcagcgcatttatgagctcgccggccaagaattcaacatcaattcaccgaaacagctcggcgtcattttatttgaaaaactgcagctgcccgtcttgaaaaaaacgaaaaccggctactccacttcggcggatgtgcttgaaaaacttgcgccttatcacgagatcgtggaaaacattttgcattaccgccagcttggcaagttgcagtcgacgtatattgaaggattgctgaaagtcgtgcgacccgatacaaagaaggtgcatacgattttcaatcaggcgttgacgcaaaccggacggctcagctcgacggagccgaacttgcaaaacattccgattcggcttgaggaaggacggaaaatccgccaagcgttcgtgccgtcggagtctgattggctcattttcgctgccgactactcgcaaattgagttgcgcgtcctcgcccatattgcggaagatgacaatttaatggaagcgttccgccgcgatttggatatccatacgaaaacagcgatggacattttccaagtgagcgaggacgaagtgacgcccaacatgcgccgtcaggcgaaggcggtcaactttgggatcgtttacgggatcagtgattacggcttggcgcaaaacttaaatatttcacgcaaagaggccgctgaattcatcgagcgctacttcgaaagcttccctggcgtgaagcggtatatggaaaacattgtgcaagaagcaaaacagaaagggtatgtgacgacgctgctgcatcggcgccgctatttgccggatatcacgagccgcaacttcaacgtccgcagctttgctgaaggtatggcgatgaacacgccgattcaagggagcgccgctgacattattaaaaaggcgatgatcgatctgaacgctagactgaaggaagagcggctgcaagcgcgccttttgctacaggtgcatgacgagctcattttggaggcgccgaaagaagagatggagcggctgtgccggctcgttccggaagtgatggagcaagcggtcacacttcgcgtgccgctcaaagtcgattaccattatggctcgacgtggtatgacgcgaaataaaaaggatcc

SEQ ID NO: 2616 - DNA, 2712 bp, Artificial Sequence
  Description of Artificial Sequence: Synthetic DNA sequence of Bacillus caldolyticus EA1 DNA polymerase R813Q
atgaaatacctgctgccgaccgctgctgctggtctgctgctcctcgctgcccagccggcgatggccatgggattgaaaaaaaagcttgttttaatcgacggcagcagcgtggcgtaccgcgcctttttcgccttgccgcttttgcataacgacaaaggcatccatacgaacgccgtctacgggtttacgatgatgttgaataaaattttggcggaagaagagccaactcatatgcttgtcgcgtttgacgccgggaaaacgacgttccggcatgaagcgtttcaagagtataaaggtgggcgccagcagacgccaccggagctgtcggagcagtttccgctgttgcgcgagctgctgagggcgtatcgcatccccgcctatgaactcgagaactacgaagcggacgatattatcggaacgcttgccgcccgcgctgagcaggaagggtttgaggtgaaagtcatttccggcgaccgcgatctgacccagctcgcctccccccatgtgacggtggacattacgaaaaaagggattaccgatatcgaaccgtacacgccggaggcggtccgcgaaaaatacggcttaactccggaacaaatcgttgatttgaaaggattgatgggcgacaaatcggacaacattcccggagtgccgggcatcggggaaaagacggcggtcaagctgctcaagcaattcggcacggtcgaaaacgtgcttgcctccattgacgagatcaaaggcgaaaagttgaaagaaacgctgcgccaacaccgggagatggcgctgttaagcaaaaagctcgccgccattcgccgcgacgccccggtcgagctctcgcttgatgacatcgtctatcaaggggaagaccgggagaaagtggtcgctttatttaaagagcttgggtttcaatcgtttttagagaaaatggaatcgccgtcatcagaagaggaaaaaccgcttgccaagatggcatttacgcttgctgaccgcgtgacggaggagatgcttgccgacaaggcggcgcttgtcgttgaagtggtcgaggaaaattatcatgatgcgccgatcgtcggcatcgctgtggtcaacgaacatggacggtttttcctgcgcccggagacggcgcttgccgatccgcagtttgtcgcctggcttggtgatgaaacgaagaaaaaaagcatgtttgactcaaagcgcgcggcagtcgccttgaaatggaaaggaattgagctatgcggcgtttcctttgatttattgctggccgcctatttgcttgatccggcgcaaggtgttgatgatgtggctgccgcagcaaaaatgaagcaatacgaagcggtgcgctcggatgaagcggtgtatggcaaaggggcgaagcgggccgtgccggatgagccagtgctcgccgagcatctcgtccgcaaggcggcggcgatttgggcgctcgaacgtccgtttttggatgagctgcgccgcaacgaacaagatcggttgctcgtcgagctcgagcagccgttgtcttcgattttggcggaaatggaatttgccggagtgaaagtggatacgaagcggctcgaacagatgggcgaagagctcgccgagcagctgcgcacggtcgagcagcgcatttatgagctcgccggccaagaattcaacatcaattcaccgaaacagctcggcgtcattttatttgaaaaactgcagctgcccgtcttgaaaaaaacgaaaaccggctactccacttcggcggatgtgcttgaaaaacttgcgccttatcacgagatcgtggaaaacattttgcattaccgccagcttggcaagttgcagtcgacgtatattgaaggattgctgaaagtcgtgcgacccgatacaaagaaggtgcatacgattttcaatcaggcgttgacgcaaaccggacggctcagctcgacggagccgaacttgcaaaacattccgattcggcttgaggaaggacggaaaatccgccaagcgttcgtgccgtcggagtctgattggctcattttcgctgccgactactcgcaaattgagttgcgcgtcctcgcccatattgcggaagatgacaatttaatggaagcgttccgccgcgatttggatatccatacgaaaacagcgatggacattttccaagtgagcgaggacgaagtgacgcccaacatgcgccgtcaggcgaaggcggtcaactttgggatcgtttacgggatcagtgattacggcttggcgcaaaacttaaatatttcacgcaaagaggccgctgaattcatcgagcgctacttcgaaagcttccctggcgtgaagcggtatatggaaaacattgtgcaagaagcaaaacagaaagggtatgtgacgacgctgctgcatcggcgccgctatttgccggatatcacgagccgcaacttcaacgtccgcagctttgctgaacaaatggcgatgaacacgccgattcaagggagcgccgctgacattattaaaaaggcgatgatcgatctgaacgctagactgaaggaagagcggctgcaagcgcgccttttgctacaggtgcatgacgagctcattttggaggcgccgaaagaagagatggagcggctgtgccggctcgttccggaagtgatggagcaagcggtcacacttcgcgtgccgctcaaagtcgattaccattatggctcgacgtggtatgacgcgaaataaaaaggatcc

SEQ ID NO: 2617 - DNA, 2712 bp, Artificial Sequence
  Description of Artificial Sequence: Synthetic DNA sequence of Bacillus caldolyticus EA1 DNA polymerase R813H
atgaaatacctgctgccgaccgctgctgctggtctgctgctcctcgctgcccagccggcgatggccatgggattgaaaaaaaagcttgttttaatcgacggcagcagcgtggcgtaccgcgcctttttcgccttgccgcttttgcataacgacaaaggcatccatacgaacgccgtctacgggtttacgatgatgttgaataaaattttggcggaagaagagccaactcatatgcttgtcgcgtttgacgccgggaaaacgacgttccggcatgaagcgtttcaagagtataaaggtgggcgccagcagacgccaccggagctgtcggagcagtttccgctgttgcgcgagctgctgagggcgtatcgcatccccgcctatgaactcgagaactacgaagcggacgatattatcggaacgcttgccgcccgcgctgagcaggaagggtttgaggtgaaagtcatttccggcgaccgcgatctgacccagctcgcctccccccatgtgacggtggacattacgaaaaaagggattaccgatatcgaaccgtacacgccggaggcggtccgcgaaaaatacggcttaactccggaacaaatcgttgatttgaaaggattgatgggcgacaaatcggacaacattcccggagtgccgggcatcggggaaaagacggcggtcaagctgctcaagcaattcggcacggtcgaaaacgtgcttgcctccattgacgagatcaaaggcgaaaagttgaaagaaacgctgcgccaacaccgggagatggcgctgttaagcaaaaagctcgccgccattcgccgcgacgccccggtcgagctctcgcttgatgacatcgtctatcaaggggaagaccgggagaaagtggtcgctttatttaaagagcttgggtttcaatcgtttttagagaaaatggaatcgccgtcatcagaagaggaaaaaccgcttgccaagatggcatttacgcttgctgaccgcgtgacggaggagatgcttgccgacaaggcggcgcttgtcgttgaagtggtcgaggaaaattatcatgatgcgccgatcgtcggcatcgctgtggtcaacgaacatggacggtttttcctgcgcccggagacggcgcttgccgatccgcagtttgtcgcctggcttggtgatgaaacgaagaaaaaaagcatgtttgactcaaagcgcgcggcagtcgccttgaaatggaaaggaattgagctatgcggcgtttcctttgatttattgctggccgcctatttgcttgatccggcgcaaggtgttgatgatgtggctgccgcagcaaaaatgaagcaatacgaagcggtgcgctcggatgaagcggtgtatggcaaaggggcgaagcgggccgtgccggatgagccagtgctcgccgagcatctcgtccgcaaggcggcggcgatttgggcgctcgaacgtccgtttttggatgagctgcgccgcaacgaacaagatcggttgctcgtcgagctcgagcagccgttgtcttcgattttggcggaaatggaatttgccggagtgaaagtggatacgaagcggctcgaacagatgggcgaagagctcgccgagcagctgcgcacggtcgagcagcgcatttatgagctcgccggccaagaattcaacatcaattcaccgaaacagctcggcgtcattttatttgaaaaactgcagctgcccgtcttgaaaaaaacgaaaaccggctactccacttcggcggatgtgcttgaaaaacttgcgccttatcacgagatcgtggaaaacattttgcattaccgccagcttggcaagttgcagtcgacgtatattgaaggattgctgaaagtcgtgcgacccgatacaaagaaggtgcatacgattttcaatcaggcgttgacgcaaaccggacggctcagctcgacggagccgaacttgcaaaacattccgattcggcttgaggaaggacggaaaatccgccaagcgttcgtgccgtcggagtctgattggctcattttcgctgccgactactcgcaaattgagttgcgcgtcctcgcccatattgcggaagatgacaatttaatggaagcgttccgccgcgatttggatatccatacgaaaacagcgatggacattttccaagtgagcgaggacgaagtgacgcccaacatgcgccgtcaggcgaaggcggtcaactttgggatcgtttacgggatcagtgattacggcttggcgcaaaacttaaatatttcacgcaaagaggccgctgaattcatcgagcgctacttcgaaagcttccctggcgtgaagcggtatatggaaaacattgtgcaagaagcaaaacagaaagggtatgtgacgacgctgctgcatcggcgccgctatttgccggatatcacgagccgcaacttcaacgtccgcagctttgctgaacatatggcgatgaacacgccgattcaagggagcgccgctgacattattaaaaaggcgatgatcgatctgaacgctagactgaaggaagagcggctgcaagcgcgccttttgctacaggtgcatgacgagctcattttggaggcgccgaaagaagagatggagcggctgtgccggctcgttccggaagtgatggagcaagcggtcacacttcgcgtgccgctcaaagtcgattaccattatggctcgacgtggtatgacgcgaaataaaaaggatcc

SEQ ID NO: 2618 - DNA, 2712 bp, Artificial Sequence
  Description of Artificial Sequence: Synthetic DNA sequence of Bacillus caldolyticus EA1 DNA polymerase R813I
atgaaatacctgctgccgaccgctgctgctggtctgctgctcctcgctgcccagccggcgatggccatgggattgaaaaaaaagcttgttttaatcgacggcagcagcgtggcgtaccgcgcctttttcgccttgccgcttttgcataacgacaaaggcatccatacgaacgccgtctacgggtttacgatgatgttgaataaaattttggcggaagaagagccaactcatatgcttgtcgcgtttgacgccgggaaaacgacgttccggcatgaagcgtttcaagagtataaaggtgggcgccagcagacgccaccggagctgtcggagcagtttccgctgttgcgcgagctgctgagggcgtatcgcatccccgcctatgaactcgagaactacgaagcggacgatattatcggaacgcttgccgcccgcgctgagcaggaagggtttgaggtgaaagtcatttccggcgaccgcgatctgacccagctcgcctccccccatgtgacggtggacattacgaaaaaagggattaccgatatcgaaccgtacacgccggaggcggtccgcgaaaaatacggcttaactccggaacaaatcgttgatttgaaaggattgatgggcgacaaatcggacaacattcccggagtgccgggcatcggggaaaagacggcggtcaagctgctcaagcaattcggcacggtcgaaaacgtgcttgcctccattgacgagatcaaaggcgaaaagttgaaagaaacgctgcgccaacaccgggagatggcgctgttaagcaaaaagctcgccgccattcgccgcgacgccccggtcgagctctcgcttgatgacatcgtctatcaaggggaagaccgggagaaagtggtcgctttatttaaagagcttgggtttcaatcgtttttagagaaaatggaatcgccgtcatcagaagaggaaaaaccgcttgccaagatggcatttacgcttgctgaccgcgtgacggaggagatgcttgccgacaaggcggcgcttgtcgttgaagtggtcgaggaaaattatcatgatgcgccgatcgtcggcatcgctgtggtcaacgaacatggacggtttttcctgcgcccggagacggcgcttgccgatccgcagtttgtcgcctggcttggtgatgaaacgaagaaaaaaagcatgtttgactcaaagcgcgcggcagtcgccttgaaatggaaaggaattgagctatgcggcgtttcctttgatttattgctggccgcctatttgcttgatccggcgcaaggtgttgatgatgtggctgccgcagcaaaaatgaagcaatacgaagcggtgcgctcggatgaagcggtgtatggcaaaggggcgaagcgggccgtgccggatgagccagtgctcgccgagcatctcgtccgcaaggcggcggcgatttgggcgctcgaacgtccgtttttggatgagctgcgccgcaacgaacaagatcggttgctcgtcgagctcgagcagccgttgtcttcgattttggcggaaatggaatttgccggagtgaaagtggatacgaagcggctcgaacagatgggcgaagagctcgccgagcagctgcgcacggtcgagcagcgcatttatgagctcgccggccaagaattcaacatcaattcaccgaaacagctcggcgtcattttatttgaaaaactgcagctgcccgtcttgaaaaaaacgaaaaccggctactccacttcggcggatgtgcttgaaaaacttgcgccttatcacgagatcgtggaaaacattttgcattaccgccagcttggcaagttgcagtcgacgtatattgaaggattgctgaaagtcgtgcgacccgatacaaagaaggtgcatacgattttcaatcaggcgttgacgcaaaccggacggctcagctcgacggagccgaacttgcaaaacattccgattcggcttgaggaaggacggaaaatccgccaagcgttcgtgccgtcggagtctgattggctcattttcgctgccgactactcgcaaattgagttgcgcgtcctcgcccatattgcggaagatgacaatttaatggaagcgttccgccgcgatttggatatccatacgaaaacagcgatggacattttccaagtgagcgaggacgaagtgacgcccaacatgcgccgtcaggcgaaggcggtcaactttgggatcgtttacgggatcagtgattacggcttggcgcaaaacttaaatatttcacgcaaagaggccgctgaattcatcgagcgctacttcgaaagcttccctggcgtgaagcggtatatggaaaacattgtgcaagaagcaaaacagaaagggtatgtgacgacgctgctgcatcggcgccgctatttgccggatatcacgagccgcaacttcaacgtccgcagctttgctgaaattatggcgatgaacacgccgattcaagggagcgccgctgacattattaaaaaggcgatgatcgatctgaacgctagactgaaggaagagcggctgcaagcgcgccttttgctacaggtgcatgacgagctcattttggaggcgccgaaagaagagatggagcggctgtgccggctcgttccggaagtgatggagcaagcggtcacacttcgcgtgccgctcaaagtcgattaccattatggctcgacgtggtatgacgcgaaataaaaaggatcc

SEQ ID NO: 2619 - DNA, 2712 bp, Artificial Sequence
  Description of Artificial Sequence: Synthetic DNA sequence of Bacillus caldolyticus EA1 DNA polymerase R813L
atgaaatacctgctgccgaccgctgctgctggtctgctgctcctcgctgcccagccggcgatggccatgggattgaaaaaaaagcttgttttaatcgacggcagcagcgtggcgtaccgcgcctttttcgccttgccgcttttgcataacgacaaaggcatccatacgaacgccgtctacgggtttacgatgatgttgaataaaattttggcggaagaagagccaactcatatgcttgtcgcgtttgacgccgggaaaacgacgttccggcatgaagcgtttcaagagtataaaggtgggcgccagcagacgccaccggagctgtcggagcagtttccgctgttgcgcgagctgctgagggcgtatcgcatccccgcctatgaactcgagaactacgaagcggacgatattatcggaacgcttgccgcccgcgctgagcaggaagggtttgaggtgaaagtcatttccggcgaccgcgatctgacccagctcgcctccccccatgtgacggtggacattacgaaaaaagggattaccgatatcgaaccgtacacgccggaggcggtccgcgaaaaatacggcttaactccggaacaaatcgttgatttgaaaggattgatgggcgacaaatcggacaacattcccggagtgccgggcatcggggaaaagacggcggtcaagctgctcaagcaattcggcacggtcgaaaacgtgcttgcctccattgacgagatcaaaggcgaaaagttgaaagaaacgctgcgccaacaccgggagatggcgctgttaagcaaaaagctcgccgccattcgccgcgacgccccggtcgagctctcgcttgatgacatcgtctatcaaggggaagaccgggagaaagtggtcgctttatttaaagagcttgggtttcaatcgtttttagagaaaatggaatcgccgtcatcagaagaggaaaaaccgcttgccaagatggcatttacgcttgctgaccgcgtgacggaggagatgcttgccgacaaggcggcgcttgtcgttgaagtggtcgaggaaaattatcatgatgcgccgatcgtcggcatcgctgtggtcaacgaacatggacggtttttcctgcgcccggagacggcgcttgccgatccgcagtttgtcgcctggcttggtgatgaaacgaagaaaaaaagcatgtttgactcaaagcgcgcggcagtcgccttgaaatggaaaggaattgagctatgcggcgtttcctttgatttattgctggccgcctatttgcttgatccggcgcaaggtgttgatgatgtggctgccgcagcaaaaatgaagcaatacgaagcggtgcgctcggatgaagcggtgtatggcaaaggggcgaagcgggccgtgccggatgagccagtgctcgccgagcatctcgtccgcaaggcggcggcgatttgggcgctcgaacgtccgtttttggatgagctgcgccgcaacgaacaagatcggttgctcgtcgagctcgagcagccgttgtcttcgattttggcggaaatggaatttgccggagtgaaagtggatacgaagcggctcgaacagatgggcgaagagctcgccgagcagctgcgcacggtcgagcagcgcatttatgagctcgccggccaagaattcaacatcaattcaccgaaacagctcggcgtcattttatttgaaaaactgcagctgcccgtcttgaaaaaaacgaaaaccggctactccacttcggcggatgtgcttgaaaaacttgcgccttatcacgagatcgtggaaaacattttgcattaccgccagcttggcaagttgcagtcgacgtatattgaaggattgctgaaagtcgtgcgacccgatacaaagaaggtgcatacgattttcaatcaggcgttgacgcaaaccggacggctcagctcgacggagccgaacttgcaaaacattccgattcggcttgaggaaggacggaaaatccgccaagcgttcgtgccgtcggagtctgattggctcattttcgctgccgactactcgcaaattgagttgcgcgtcctcgcccatattgcggaagatgacaatttaatggaagcgttccgccgcgatttggatatccatacgaaaacagcgatggacattttccaagtgagcgaggacgaagtgacgcccaacatgcgccgtcaggcgaaggcggtcaactttgggatcgtttacgggatcagtgattacggcttggcgcaaaacttaaatatttcacgcaaagaggccgctgaattcatcgagcgctacttcgaaagcttccctggcgtgaagcggtatatggaaaacattgtgcaagaagcaaaacagaaagggtatgtgacgacgctgctgcatcggcgccgctatttgccggatatcacgagccgcaacttcaacgtccgcagctttgctgaattaatggcgatgaacacgccgattcaagggagcgccgctgacattattaaaaaggcgatgatcgatctgaacgctagactgaaggaagagcggctgcaagcgcgccttttgctacaggtgcatgacgagctcattttggaggcgccgaaagaagagatggagcggctgtgccggctcgttccggaagtgatggagcaagcggtcacacttcgcgtgccgctcaaagtcgattaccattatggctcgacgtggtatgacgcgaaataaaaaggatcc

SEQ ID NO: 2620 - DNA, 2712 bp, Artificial Sequence
  Description of Artificial Sequence: Synthetic DNA sequence of Bacillus caldolyticus EA1 DNA polymerase R813K
atgaaatacctgctgccgaccgctgctgctggtctgctgctcctcgctgcccagccggcgatggccatgggattgaaaaaaaagcttgttttaatcgacggcagcagcgtggcgtaccgcgcctttttcgccttgccgcttttgcataacgacaaaggcatccatacgaacgccgtctacgggtttacgatgatgttgaataaaattttggcggaagaagagccaactcatatgcttgtcgcgtttgacgccgggaaaacgacgttccggcatgaagcgtttcaagagtataaaggtgggcgccagcagacgccaccggagctgtcggagcagtttccgctgttgcgcgagctgctgagggcgtatcgcatccccgcctatgaactcgagaactacgaagcggacgatattatcggaacgcttgccgcccgcgctgagcaggaagggtttgaggtgaaagtcatttccggcgaccgcgatctgacccagctcgcctccccccatgtgacggtggacattacgaaaaaagggattaccgatatcgaaccgtacacgccggaggcggtccgcgaaaaatacggcttaactccggaacaaatcgttgatttgaaaggattgatgggcgacaaatcggacaacattcccggagtgccgggcatcggggaaaagacggcggtcaagctgctcaagcaattcggcacggtcgaaaacgtgcttgcctccattgacgagatcaaaggcgaaaagttgaaagaaacgctgcgccaacaccgggagatggcgctgttaagcaaaaagctcgccgccattcgccgcgacgccccggtcgagctctcgcttgatgacatcgtctatcaaggggaagaccgggagaaagtggtcgctttatttaaagagcttgggtttcaatcgtttttagagaaaatggaatcgccgtcatcagaagaggaaaaaccgcttgccaagatggcatttacgcttgctgaccgcgtgacggaggagatgcttgccgacaaggcggcgcttgtcgttgaagtggtcgaggaaaattatcatgatgcgccgatcgtcggcatcgctgtggtcaacgaacatggacggtttttcctgcgcccggagacggcgcttgccgatccgcagtttgtcgcctggcttggtgatgaaacgaagaaaaaaagcatgtttgactcaaagcgcgcggcagtcgccttgaaatggaaaggaattgagctatgcggcgtttcctttgatttattgctggccgcctatttgcttgatccggcgcaaggtgttgatgatgtggctgccgcagcaaaaatgaagcaatacgaagcggtgcgctcggatgaagcggtgtatggcaaaggggcgaagcgggccgtgccggatgagccagtgctcgccgagcatctcgtccgcaaggcggcggcgatttgggcgctcgaacgtccgtttttggatgagctgcgccgcaacgaacaagatcggttgctcgtcgagctcgagcagccgttgtcttcgattttggcggaaatggaatttgccggagtgaaagtggatacgaagcggctcgaacagatgggcgaagagctcgccgagcagctgcgcacggtcgagcagcgcatttatgagctcgccggccaagaattcaacatcaattcaccgaaacagctcggcgtcattttatttgaaaaactgcagctgcccgtcttgaaaaaaacgaaaaccggctactccacttcggcggatgtgcttgaaaaacttgcgccttatcacgagatcgtggaaaacattttgcattaccgccagcttggcaagttgcagtcgacgtatattgaaggattgctgaaagtcgtgcgacccgatacaaagaaggtgcatacgattttcaatcaggcgttgacgcaaaccggacggctcagctcgacggagccgaacttgcaaaacattccgattcggcttgaggaaggacggaaaatccgccaagcgttcgtgccgtcggagtctgattggctcattttcgctgccgactactcgcaaattgagttgcgcgtcctcgcccatattgcggaagatgacaatttaatggaagcgttccgccgcgatttggatatccatacgaaaacagcgatggacattttccaagtgagcgaggacgaagtgacgcccaacatgcgccgtcaggcgaaggcggtcaactttgggatcgtttacgggatcagtgattacggcttggcgcaaaacttaaatatttcacgcaaagaggccgctgaattcatcgagcgctacttcgaaagcttccctggcgtgaagcggtatatggaaaacattgtgcaagaagcaaaacagaaagggtatgtgacgacgctgctgcatcggcgccgctatttgccggatatcacgagccgcaacttcaacgtccgcagctttgctgaaaaaatggcgatgaacacgccgattcaagggagcgccgctgacattattaaaaaggcgatgatcgatctgaacgctagactgaaggaagagcggctgcaagcgcgccttttgctacaggtgcatgacgagctcattttggaggcgccgaaagaagagatggagcggctgtgccggctcgttccggaagtgatggagcaagcggtcacacttcgcgtgccgctcaaagtcgattaccattatggctcgacgtggtatgacgcgaaataaaaaggatcc

SEQ ID NO: 2621 - DNA, 2712 bp, Artificial Sequence
  Description of Artificial Sequence: Synthetic DNA sequence of Bacillus caldolyticus EA1 DNA polymerase R813E
atgaaatacctgctgccgaccgctgctgctggtctgctgctcctcgctgcccagccggcgatggccatgggattgaaaaaaaagcttgttttaatcgacggcagcagcgtggcgtaccgcgcctttttcgccttgccgcttttgcataacgacaaaggcatccatacgaacgccgtctacgggtttacgatgatgttgaataaaattttggcggaagaagagccaactcatatgcttgtcgcgtttgacgccgggaaaacgacgttccggcatgaagcgtttcaagagtataaaggtgggcgccagcagacgccaccggagctgtcggagcagtttccgctgttgcgcgagctgctgagggcgtatcgcatccccgcctatgaactcgagaactacgaagcggacgatattatcggaacgcttgccgcccgcgctgagcaggaagggtttgaggtgaaagtcatttccggcgaccgcgatctgacccagctcgcctccccccatgtgacggtggacattacgaaaaaagggattaccgatatcgaaccgtacacgccggaggcggtccgcgaaaaatacggcttaactccggaacaaatcgttgatttgaaaggattgatgggcgacaaatcggacaacattcccggagtgccgggcatcggggaaaagacggcggtcaagctgctcaagcaattcggcacggtcgaaaacgtgcttgcctccattgacgagatcaaaggcgaaaagttgaaagaaacgctgcgccaacaccgggagatggcgctgttaagcaaaaagctcgccgccattcgccgcgacgccccggtcgagctctcgcttgatgacatcgtctatcaaggggaagaccgggagaaagtggtcgctttatttaaagagcttgggtttcaatcgtttttagagaaaatggaatcgccgtcatcagaagaggaaaaaccgcttgccaagatggcatttacgcttgctgaccgcgtgacggaggagatgcttgccgacaaggcggcgcttgtcgttgaagtggtcgaggaaaattatcatgatgcgccgatcgtcggcatcgctgtggtcaacgaacatggacggtttttcctgcgcccggagacggcgcttgccgatccgcagtttgtcgcctggcttggtgatgaaacgaagaaaaaaagcatgtttgactcaaagcgcgcggcagtcgccttgaaatggaaaggaattgagctatgcggcgtttcctttgatttattgctggccgcctatttgcttgatccggcgcaaggtgttgatgatgtggctgccgcagcaaaaatgaagcaatacgaagcggtgcgctcggatgaagcggtgtatggcaaaggggcgaagcgggccgtgccggatgagccagtgctcgccgagcatctcgtccgcaaggcggcggcgatttgggcgctcgaacgtccgtttttggatgagctgcgccgcaacgaacaagatcggttgctcgtcgagctcgagcagccgttgtcttcgattttggcggaaatggaatttgccggagtgaaagtggatacgaagcggctcgaacagatgggcgaagagctcgccgagcagctgcgcacggtcgagcagcgcatttatgagctcgccggccaagaattcaacatcaattcaccgaaacagctcggcgtcattttatttgaaaaactgcagctgcccgtcttgaaaaaaacgaaaaccggctactccacttcggcggatgtgcttgaaaaacttgcgccttatcacgagatcgtggaaaacattttgcattaccgccagcttggcaagttgcagtcgacgtatattgaaggattgctgaaagtcgtgcgacccgatacaaagaaggtgcatacgattttcaatcaggcgttgacgcaaaccggacggctcagctcgacggagccgaacttgcaaaacattccgattcggcttgaggaaggacggaaaatccgccaagcgttcgtgccgtcggagtctgattggctcattttcgctgccgactactcgcaaattgagttgcgcgtcctcgcccatattgcggaagatgacaatttaatggaagcgttccgccgcgatttggatatccatacgaaaacagcgatggacattttccaagtgagcgaggacgaagtgacgcccaacatgcgccgtcaggcgaaggcggtcaactttgggatcgtttacgggatcagtgattacggcttggcgcaaaacttaaatatttcacgcaaagaggccgctgaattcatcgagcgctacttcgaaagcttccctggcgtgaagcggtatatggaaaacattgtgcaagaagcaaaacagaaagggtatgtgacgacgctgctgcatcggcgccgctatttgccggatatcacgagccgcaacttcaacgtccgcagctttgctgaagaaatggcgatgaacacgccgattcaagggagcgccgctgacattattaaaaaggcgatgatcgatctgaacgctagactgaaggaagagcggctgcaagcgcgccttttgctacaggtgcatgacgagctcattttggaggcgccgaaagaagagatggagcggctgtgccggctcgttccggaagtgatggagcaagcggtcacacttcgcgtgccgctcaaagtcgattaccattatggctcgacgtggtatgacgcgaaataaaaaggatcc

SEQ ID NO: 2622 - DNA, 2712 bp, Artificial Sequence
  Description of Artificial Sequence: Synthetic DNA sequence of Bacillus caldolyticus EA1 DNA polymerase R813D
atgaaatacctgctgccgaccgctgctgctggtctgctgctcctcgctgcccagccggcgatggccatgggattgaaaaaaaagcttgttttaatcgacggcagcagcgtggcgtaccgcgcctttttcgccttgccgcttttgcataacgacaaaggcatccatacgaacgccgtctacgggtttacgatgatgttgaataaaattttggcggaagaagagccaactcatatgcttgtcgcgtttgacgccgggaaaacgacgttccggcatgaagcgtttcaagagtataaaggtgggcgccagcagacgccaccggagctgtcggagcagtttccgctgttgcgcgagctgctgagggcgtatcgcatccccgcctatgaactcgagaactacgaagcggacgatattatcggaacgcttgccgcccgcgctgagcaggaagggtttgaggtgaaagtcatttccggcgaccgcgatctgacccagctcgcctccccccatgtgacggtggacattacgaaaaaagggattaccgatatcgaaccgtacacgccggaggcggtccgcgaaaaatacggcttaactccggaacaaatcgttgatttgaaaggattgatgggcgacaaatcggacaacattcccggagtgccgggcatcggggaaaagacggcggtcaagctgctcaagcaattcggcacggtcgaaaacgtgcttgcctccattgacgagatcaaaggcgaaaagttgaaagaaacgctgcgccaacaccgggagatggcgctgttaagcaaaaagctcgccgccattcgccgcgacgccccggtcgagctctcgcttgatgacatcgtctatcaaggggaagaccgggagaaagtggtcgctttatttaaagagcttgggtttcaatcgtttttagagaaaatggaatcgccgtcatcagaagaggaaaaaccgcttgccaagatggcatttacgcttgctgaccgcgtgacggaggagatgcttgccgacaaggcggcgcttgtcgttgaagtggtcgaggaaaattatcatgatgcgccgatcgtcggcatcgctgtggtcaacgaacatggacggtttttcctgcgcccggagacggcgcttgccgatccgcagtttgtcgcctggcttggtgatgaaacgaagaaaaaaagcatgtttgactcaaagcgcgcggcagtcgccttgaaatggaaaggaattgagctatgcggcgtttcctttgatttattgctggccgcctatttgcttgatccggcgcaaggtgttgatgatgtggctgccgcagcaaaaatgaagcaatacgaagcggtgcgctcggatgaagcggtgtatggcaaaggggcgaagcgggccgtgccggatgagccagtgctcgccgagcatctcgtccgcaaggcggcggcgatttgggcgctcgaacgtccgtttttggatgagctgcgccgcaacgaacaagatcggttgctcgtcgagctcgagcagccgttgtcttcgattttggcggaaatggaatttgccggagtgaaagtggatacgaagcggctcgaacagatgggcgaagagctcgccgagcagctgcgcacggtcgagcagcgcatttatgagctcgccggccaagaattcaacatcaattcaccgaaacagctcggcgtcattttatttgaaaaactgcagctgcccgtcttgaaaaaaacgaaaaccggctactccacttcggcggatgtgcttgaaaaacttgcgccttatcacgagatcgtggaaaacattttgcattaccgccagcttggcaagttgcagtcgacgtatattgaaggattgctgaaagtcgtgcgacccgatacaaagaaggtgcatacgattttcaatcaggcgttgacgcaaaccggacggctcagctcgacggagccgaacttgcaaaacattccgattcggcttgaggaaggacggaaaatccgccaagcgttcgtgccgtcggagtctgattggctcattttcgctgccgactactcgcaaattgagttgcgcgtcctcgcccatattgcggaagatgacaatttaatggaagcgttccgccgcgatttggatatccatacgaaaacagcgatggacattttccaagtgagcgaggacgaagtgacgcccaacatgcgccgtcaggcgaaggcggtcaactttgggatcgtttacgggatcagtgattacggcttggcgcaaaacttaaatatttcacgcaaagaggccgctgaattcatcgagcgctacttcgaaagcttccctggcgtgaagcggtatatggaaaacattgtgcaagaagcaaaacagaaagggtatgtgacgacgctgctgcatcggcgccgctatttgccggatatcacgagccgcaacttcaacgtccgcagctttgctgaagatatggcgatgaacacgccgattcaagggagcgccgctgacattattaaaaaggcgatgatcgatctgaacgctagactgaaggaagagcggctgcaagcgcgccttttgctacaggtgcatgacgagctcattttggaggcgccgaaagaagagatggagcggctgtgccggctcgttccggaagtgatggagcaagcggtcacacttcgcgtgccgctcaaagtcgattaccattatggctcgacgtggtatgacgcgaaataaaaaggatcc

SEQ ID NO: 2623 - DNA, 2712 bp, Artificial Sequence
  Description of Artificial Sequence: Synthetic DNA sequence of Bacillus caldolyticus EA1 DNA polymerase R813F
atgaaatacctgctgccgaccgctgctgctggtctgctgctcctcgctgcccagccggcgatggccatgggattgaaaaaaaagcttgttttaatcgacggcagcagcgtggcgtaccgcgcctttttcgccttgccgcttttgcataacgacaaaggcatccatacgaacgccgtctacgggtttacgatgatgttgaataaaattttggcggaagaagagccaactcatatgcttgtcgcgtttgacgccgggaaaacgacgttccggcatgaagcgtttcaagagtataaaggtgggcgccagcagacgccaccggagctgtcggagcagtttccgctgttgcgcgagctgctgagggcgtatcgcatccccgcctatgaactcgagaactacgaagcggacgatattatcggaacgcttgccgcccgcgctgagcaggaagggtttgaggtgaaagtcatttccggcgaccgcgatctgacccagctcgcctccccccatgtgacggtggacattacgaaaaaagggattaccgatatcgaaccgtacacgccggaggcggtccgcgaaaaatacggcttaactccggaacaaatcgttgatttgaaaggattgatgggcgacaaatcggacaacattcccggagtgccgggcatcggggaaaagacggcggtcaagctgctcaagcaattcggcacggtcgaaaacgtgcttgcctccattgacgagatcaaaggcgaaaagttgaaagaaacgctgcgccaacaccgggagatggcgctgttaagcaaaaagctcgccgccattcgccgcgacgccccggtcgagctctcgcttgatgacatcgtctatcaaggggaagaccgggagaaagtggtcgctttatttaaagagcttgggtttcaatcgtttttagagaaaatggaatcgccgtcatcagaagaggaaaaaccgcttgccaagatggcatttacgcttgctgaccgcgtgacggaggagatgcttgccgacaaggcggcgcttgtcgttgaagtggtcgaggaaaattatcatgatgcgccgatcgtcggcatcgctgtggtcaacgaacatggacggtttttcctgcgcccggagacggcgcttgccgatccgcagtttgtcgcctggcttggtgatgaaacgaagaaaaaaagcatgtttgactcaaagcgcgcggcagtcgccttgaaatggaaaggaattgagctatgcggcgtttcctttgatttattgctggccgcctatttgcttgatccggcgcaaggtgttgatgatgtggctgccgcagcaaaaatgaagcaatacgaagcggtgcgctcggatgaagcggtgtatggcaaaggggcgaagcgggccgtgccggatgagccagtgctcgccgagcatctcgtccgcaaggcggcggcgatttgggcgctcgaacgtccgtttttggatgagctgcgccgcaacgaacaagatcggttgctcgtcgagctcgagcagccgttgtcttcgattttggcggaaatggaatttgccggagtgaaagtggatacgaagcggctcgaacagatgggcgaagagctcgccgagcagctgcgcacggtcgagcagcgcatttatgagctcgccggccaagaattcaacatcaattcaccgaaacagctcggcgtcattttatttgaaaaactgcagctgcccgtcttgaaaaaaacgaaaaccggctactccacttcggcggatgtgcttgaaaaacttgcgccttatcacgagatcgtggaaaacattttgcattaccgccagcttggcaagttgcagtcgacgtatattgaaggattgctgaaagtcgtgcgacccgatacaaagaaggtgcatacgattttcaatcaggcgttgacgcaaaccggacggctcagctcgacggagccgaacttgcaaaacattccgattcggcttgaggaaggacggaaaatccgccaagcgttcgtgccgtcggagtctgattggctcattttcgctgccgactactcgcaaattgagttgcgcgtcctcgcccatattgcggaagatgacaatttaatggaagcgttccgccgcgatttggatatccatacgaaaacagcgatggacattttccaagtgagcgaggacgaagtgacgcccaacatgcgccgtcaggcgaaggcggtcaactttgggatcgtttacgggatcagtgattacggcttggcgcaaaacttaaatatttcacgcaaagaggccgctgaattcatcgagcgctacttcgaaagcttccctggcgtgaagcggtatatggaaaacattgtgcaagaagcaaaacagaaagggtatgtgacgacgctgctgcatcggcgccgctatttgccggatatcacgagccgcaacttcaacgtccgcagctttgctgaatttatggcgatgaacacgccgattcaagggagcgccgctgacattattaaaaaggcgatgatcgatctgaacgctagactgaaggaagagcggctgcaagcgcgccttttgctacaggtgcatgacgagctcattttggaggcgccgaaagaagagatggagcggctgtgccggctcgttccggaagtgatggagcaagcggtcacacttcgcgtgccgctcaaagtcgattaccattatggctcgacgtggtatgacgcgaaataaaaaggatcc

SEQ ID NO: 2624 - DNA, 2712 bp, Artificial Sequence
  Description of Artificial Sequence: Synthetic DNA sequence of Bacillus caldolyticus EA1 DNA polymerase R813S
atgaaatacctgctgccgaccgctgctgctggtctgctgctcctcgctgcccagccggcgatggccatgggattgaaaaaaaagcttgttttaatcgacggcagcagcgtggcgtaccgcgcctttttcgccttgccgcttttgcataacgacaaaggcatccatacgaacgccgtctacgggtttacgatgatgttgaataaaattttggcggaagaagagccaactcatatgcttgtcgcgtttgacgccgggaaaacgacgttccggcatgaagcgtttcaagagtataaaggtgggcgccagcagacgccaccggagctgtcggagcagtttccgctgttgcgcgagctgctgagggcgtatcgcatccccgcctatgaactcgagaactacgaagcggacgatattatcggaacgcttgccgcccgcgctgagcaggaagggtttgaggtgaaagtcatttccggcgaccgcgatctgacccagctcgcctccccccatgtgacggtggacattacgaaaaaagggattaccgatatcgaaccgtacacgccggaggcggtccgcgaaaaatacggcttaactccggaacaaatcgttgatttgaaaggattgatgggcgacaaatcggacaacattcccggagtgccgggcatcggggaaaagacggcggtcaagctgctcaagcaattcggcacggtcgaaaacgtgcttgcctccattgacgagatcaaaggcgaaaagttgaaagaaacgctgcgccaacaccgggagatggcgctgttaagcaaaaagctcgccgccattcgccgcgacgccccggtcgagctctcgcttgatgacatcgtctatcaaggggaagaccgggagaaagtggtcgctttatttaaagagcttgggtttcaatcgtttttagagaaaatggaatcgccgtcatcagaagaggaaaaaccgcttgccaagatggcatttacgcttgctgaccgcgtgacggaggagatgcttgccgacaaggcggcgcttgtcgttgaagtggtcgaggaaaattatcatgatgcgccgatcgtcggcatcgctgtggtcaacgaacatggacggtttttcctgcgcccggagacggcgcttgccgatccgcagtttgtcgcctggcttggtgatgaaacgaagaaaaaaagcatgtttgactcaaagcgcgcggcagtcgccttgaaatggaaaggaattgagctatgcggcgtttcctttgatttattgctggccgcctatttgcttgatccggcgcaaggtgttgatgatgtggctgccgcagcaaaaatgaagcaatacgaagcggtgcgctcggatgaagcggtgtatggcaaaggggcgaagcgggccgtgccggatgagccagtgctcgccgagcatctcgtccgcaaggcggcggcgatttgggcgctcgaacgtccgtttttggatgagctgcgccgcaacgaacaagatcggttgctcgtcgagctcgagcagccgttgtcttcgattttggcggaaatggaatttgccggagtgaaagtggatacgaagcggctcgaacagatgggcgaagagctcgccgagcagctgcgcacggtcgagcagcgcatttatgagctcgccggccaagaattcaacatcaattcaccgaaacagctcggcgtcattttatttgaaaaactgcagctgcccgtcttgaaaaaaacgaaaaccggctactccacttcggcggatgtgcttgaaaaacttgcgccttatcacgagatcgtggaaaacattttgcattaccgccagcttggcaagttgcagtcgacgtatattgaaggattgctgaaagtcgtgcgacccgatacaaagaaggtgcatacgattttcaatcaggcgttgacgcaaaccggacggctcagctcgacggagccgaacttgcaaaacattccgattcggcttgaggaaggacggaaaatccgccaagcgttcgtgccgtcggagtctgattggctcattttcgctgccgactactcgcaaattgagttgcgcgtcctcgcccatattgcggaagatgacaatttaatggaagcgttccgccgcgatttggatatccatacgaaaacagcgatggacattttccaagtgagcgaggacgaagtgacgcccaacatgcgccgtcaggcgaaggcggtcaactttgggatcgtttacgggatcagtgattacggcttggcgcaaaacttaaatatttcacgcaaagaggccgctgaattcatcgagcgctacttcgaaagcttccctggcgtgaagcggtatatggaaaacattgtgcaagaagcaaaacagaaagggtatgtgacgacgctgctgcatcggcgccgctatttgccggatatcacgagccgcaacttcaacgtccgcagctttgctgaatctatggcgatgaacacgccgattcaagggagcgccgctgacattattaaaaaggcgatgatcgatctgaacgctagactgaaggaagagcggctgcaagcgcgccttttgctacaggtgcatgacgagctcattttggaggcgccgaaagaagagatggagcggctgtgccggctcgttccggaagtgatggagcaagcggtcacacttcgcgtgccgctcaaagtcgattaccattatggctcgacgtggtatgacgcgaaataaaaaggatcc

SEQ ID NO: 2625 - DNA, 2712 bp, Artificial Sequence
  Description of Artificial Sequence: Synthetic DNA sequence of Bacillus caldolyticus EA1 DNA polymerase R813Y
atgaaatacctgctgccgaccgctgctgctggtctgctgctcctcgctgcccagccggcgatggccatgggattgaaaaaaaagcttgttttaatcgacggcagcagcgtggcgtaccgcgcctttttcgccttgccgcttttgcataacgacaaaggcatccatacgaacgccgtctacgggtttacgatgatgttgaataaaattttggcggaagaagagccaactcatatgcttgtcgcgtttgacgccgggaaaacgacgttccggcatgaagcgtttcaagagtataaaggtgggcgccagcagacgccaccggagctgtcggagcagtttccgctgttgcgcgagctgctgagggcgtatcgcatccccgcctatgaactcgagaactacgaagcggacgatattatcggaacgcttgccgcccgcgctgagcaggaagggtttgaggtgaaagtcatttccggcgaccgcgatctgacccagctcgcctccccccatgtgacggtggacattacgaaaaaagggattaccgatatcgaaccgtacacgccggaggcggtccgcgaaaaatacggcttaactccggaacaaatcgttgatttgaaaggattgatgggcgacaaatcggacaacattcccggagtgccgggcatcggggaaaagacggcggtcaagctgctcaagcaattcggcacggtcgaaaacgtgcttgcctccattgacgagatcaaaggcgaaaagttgaaagaaacgctgcgccaacaccgggagatggcgctgttaagcaaaaagctcgccgccattcgccgcgacgccccggtcgagctctcgcttgatgacatcgtctatcaaggggaagaccgggagaaagtggtcgctttatttaaagagcttgggtttcaatcgtttttagagaaaatggaatcgccgtcatcagaagaggaaaaaccgcttgccaagatggcatttacgcttgctgaccgcgtgacggaggagatgcttgccgacaaggcggcgcttgtcgttgaagtggtcgaggaaaattatcatgatgcgccgatcgtcggcatcgctgtggtcaacgaacatggacggtttttcctgcgcccggagacggcgcttgccgatccgcagtttgtcgcctggcttggtgatgaaacgaagaaaaaaagcatgtttgactcaaagcgcgcggcagtcgccttgaaatggaaaggaattgagctatgcggcgtttcctttgatttattgctggccgcctatttgcttgatccggcgcaaggtgttgatgatgtggctgccgcagcaaaaatgaagcaatacgaagcggtgcgctcggatgaagcggtgtatggcaaaggggcgaagcgggccgtgccggatgagccagtgctcgccgagcatctcgtccgcaaggcggcggcgatttgggcgctcgaacgtccgtttttggatgagctgcgccgcaacgaacaagatcggttgctcgtcgagctcgagcagccgttgtcttcgattttggcggaaatggaatttgccggagtgaaagtggatacgaagcggctcgaacagatgggcgaagagctcgccgagcagctgcgcacggtcgagcagcgcatttatgagctcgccggccaagaattcaacatcaattcaccgaaacagctcggcgtcattttatttgaaaaactgcagctgcccgtcttgaaaaaaacgaaaaccggctactccacttcggcggatgtgcttgaaaaacttgcgccttatcacgagatcgtggaaaacattttgcattaccgccagcttggcaagttgcagtcgacgtatattgaaggattgctgaaagtcgtgcgacccgatacaaagaaggtgcatacgattttcaatcaggcgttgacgcaaaccggacggctcagctcgacggagccgaacttgcaaaacattccgattcggcttgaggaaggacggaaaatccgccaagcgttcgtgccgtcggagtctgattggctcattttcgctgccgactactcgcaaattgagttgcgcgtcctcgcccatattgcggaagatgacaatttaatggaagcgttccgccgcgatttggatatccatacgaaaacagcgatggacattttccaagtgagcgaggacgaagtgacgcccaacatgcgccgtcaggcgaaggcggtcaactttgggatcgtttacgggatcagtgattacggcttggcgcaaaacttaaatatttcacgcaaagaggccgctgaattcatcgagcgctacttcgaaagcttccctggcgtgaagcggtatatggaaaacattgtgcaagaagcaaaacagaaagggtatgtgacgacgctgctgcatcggcgccgctatttgccggatatcacgagccgcaacttcaacgtccgcagctttgctgaatatatggcgatgaacacgccgattcaagggagcgccgctgacattattaaaaaggcgatgatcgatctgaacgctagactgaaggaagagcggctgcaagcgcgccttttgctacaggtgcatgacgagctcattttggaggcgccgaaagaagagatggagcggctgtgccggctcgttccggaagtgatggagcaagcggtcacacttcgcgtgccgctcaaagtcgattaccattatggctcgacgtggtatgacgcgaaataaaaaggatcc

SEQ ID NO: 2626 - DNA, 2712 bp, Artificial Sequence
  Description of Artificial Sequence: Synthetic DNA sequence of Bacillus caldolyticus EA1 DNA polymerase R813W
atgaaatacctgctgccgaccgctgctgctggtctgctgctcctcgctgcccagccggcgatggccatgggattgaaaaaaaagcttgttttaatcgacggcagcagcgtggcgtaccgcgcctttttcgccttgccgcttttgcataacgacaaaggcatccatacgaacgccgtctacgggtttacgatgatgttgaataaaattttggcggaagaagagccaactcatatgcttgtcgcgtttgacgccgggaaaacgacgttccggcatgaagcgtttcaagagtataaaggtgggcgccagcagacgccaccggagctgtcggagcagtttccgctgttgcgcgagctgctgagggcgtatcgcatccccgcctatgaactcgagaactacgaagcggacgatattatcggaacgcttgccgcccgcgctgagcaggaagggtttgaggtgaaagtcatttccggcgaccgcgatctgacccagctcgcctccccccatgtgacggtggacattacgaaaaaagggattaccgatatcgaaccgtacacgccggaggcggtccgcgaaaaatacggcttaactccggaacaaatcgttgatttgaaaggattgatgggcgacaaatcggacaacattcccggagtgccgggcatcggggaaaagacggcggtcaagctgctcaagcaattcggcacggtcgaaaacgtgcttgcctccattgacgagatcaaaggcgaaaagttgaaagaaacgctgcgccaacaccgggagatggcgctgttaagcaaaaagctcgccgccattcgccgcgacgccccggtcgagctctcgcttgatgacatcgtctatcaaggggaagaccgggagaaagtggtcgctttatttaaagagcttgggtttcaatcgtttttagagaaaatggaatcgccgtcatcagaagaggaaaaaccgcttgccaagatggcatttacgcttgctgaccgcgtgacggaggagatgcttgccgacaaggcggcgcttgtcgttgaagtggtcgaggaaaattatcatgatgcgccgatcgtcggcatcgctgtggtcaacgaacatggacggtttttcctgcgcccggagacggcgcttgccgatccgcagtttgtcgcctggcttggtgatgaaacgaagaaaaaaagcatgtttgactcaaagcgcgcggcagtcgccttgaaatggaaaggaattgagctatgcggcgtttcctttgatttattgctggccgcctatttgcttgatccggcgcaaggtgttgatgatgtggctgccgcagcaaaaatgaagcaatacgaagcggtgcgctcggatgaagcggtgtatggcaaaggggcgaagcgggccgtgccggatgagccagtgctcgccgagcatctcgtccgcaaggcggcggcgatttgggcgctcgaacgtccgtttttggatgagctgcgccgcaacgaacaagatcggttgctcgtcgagctcgagcagccgttgtcttcgattttggcggaaatggaatttgccggagtgaaagtggatacgaagcggctcgaacagatgggcgaagagctcgccgagcagctgcgcacggtcgagcagcgcatttatgagctcgccggccaagaattcaacatcaattcaccgaaacagctcggcgtcattttatttgaaaaactgcagctgcccgtcttgaaaaaaacgaaaaccggctactccacttcggcggatgtgcttgaaaaacttgcgccttatcacgagatcgtggaaaacattttgcattaccgccagcttggcaagttgcagtcgacgtatattgaaggattgctgaaagtcgtgcgacccgatacaaagaaggtgcatacgattttcaatcaggcgttgacgcaaaccggacggctcagctcgacggagccgaacttgcaaaacattccgattcggcttgaggaaggacggaaaatccgccaagcgttcgtgccgtcggagtctgattggctcattttcgctgccgactactcgcaaattgagttgcgcgtcctcgcccatattgcggaagatgacaatttaatggaagcgttccgccgcgatttggatatccatacgaaaacagcgatggacattttccaagtgagcgaggacgaagtgacgcccaacatgcgccgtcaggcgaaggcggtcaactttgggatcgtttacgggatcagtgattacggcttggcgcaaaacttaaatatttcacgcaaagaggccgctgaattcatcgagcgctacttcgaaagcttccctggcgtgaagcggtatatggaaaacattgtgcaagaagcaaaacagaaagggtatgtgacgacgctgctgcatcggcgccgctatttgccggatatcacgagccgcaacttcaacgtccgcagctttgctgaatggatggcgatgaacacgccgattcaagggagcgccgctgacattattaaaaaggcgatgatcgatctgaacgctagactgaaggaagagcggctgcaagcgcgccttttgctacaggtgcatgacgagctcattttggaggcgccgaaagaagagatggagcggctgtgccggctcgttccggaagtgatggagcaagcggtcacacttcgcgtgccgctcaaagtcgattaccattatggctcgacgtggtatgacgcgaaataaaaaggatcc

SEQ ID NO: 2627 - DNA, 2712 bp, Artificial Sequence
  Description of Artificial Sequence: Synthetic DNA sequence of Bacillus caldolyticus EA1 DNA polymerase R813P
atgaaatacctgctgccgaccgctgctgctggtctgctgctcctcgctgcccagccggcgatggccatgggattgaaaaaaaagcttgttttaatcgacggcagcagcgtggcgtaccgcgcctttttcgccttgccgcttttgcataacgacaaaggcatccatacgaacgccgtctacgggtttacgatgatgttgaataaaattttggcggaagaagagccaactcatatgcttgtcgcgtttgacgccgggaaaacgacgttccggcatgaagcgtttcaagagtataaaggtgggcgccagcagacgccaccggagctgtcggagcagtttccgctgttgcgcgagctgctgagggcgtatcgcatccccgcctatgaactcgagaactacgaagcggacgatattatcggaacgcttgccgcccgcgctgagcaggaagggtttgaggtgaaagtcatttccggcgaccgcgatctgacccagctcgcctccccccatgtgacggtggacattacgaaaaaagggattaccgatatcgaaccgtacacgccggaggcggtccgcgaaaaatacggcttaactccggaacaaatcgttgatttgaaaggattgatgggcgacaaatcggacaacattcccggagtgccgggcatcggggaaaagacggcggtcaagctgctcaagcaattcggcacggtcgaaaacgtgcttgcctccattgacgagatcaaaggcgaaaagttgaaagaaacgctgcgccaacaccgggagatggcgctgttaagcaaaaagctcgccgccattcgccgcgacgccccggtcgagctctcgcttgatgacatcgtctatcaaggggaagaccgggagaaagtggtcgctttatttaaagagcttgggtttcaatcgtttttagagaaaatggaatcgccgtcatcagaagaggaaaaaccgcttgccaagatggcatttacgcttgctgaccgcgtgacggaggagatgcttgccgacaaggcggcgcttgtcgttgaagtggtcgaggaaaattatcatgatgcgccgatcgtcggcatcgctgtggtcaacgaacatggacggtttttcctgcgcccggagacggcgcttgccgatccgcagtttgtcgcctggcttggtgatgaaacgaagaaaaaaagcatgtttgactcaaagcgcgcggcagtcgccttgaaatggaaaggaattgagctatgcggcgtttcctttgatttattgctggccgcctatttgcttgatccggcgcaaggtgttgatgatgtggctgccgcagcaaaaatgaagcaatacgaagcggtgcgctcggatgaagcggtgtatggcaaaggggcgaagcgggccgtgccggatgagccagtgctcgccgagcatctcgtccgcaaggcggcggcgatttgggcgctcgaacgtccgtttttggatgagctgcgccgcaacgaacaagatcggttgctcgtcgagctcgagcagccgttgtcttcgattttggcggaaatggaatttgccggagtgaaagtggatacgaagcggctcgaacagatgggcgaagagctcgccgagcagctgcgcacggtcgagcagcgcatttatgagctcgccggccaagaattcaacatcaattcaccgaaacagctcggcgtcattttatttgaaaaactgcagctgcccgtcttgaaaaaaacgaaaaccggctactccacttcggcggatgtgcttgaaaaacttgcgccttatcacgagatcgtggaaaacattttgcattaccgccagcttggcaagttgcagtcgacgtatattgaaggattgctgaaagtcgtgcgacccgatacaaagaaggtgcatacgattttcaatcaggcgttgacgcaaaccggacggctcagctcgacggagccgaacttgcaaaacattccgattcggcttgaggaaggacggaaaatccgccaagcgttcgtgccgtcggagtctgattggctcattttcgctgccgactactcgcaaattgagttgcgcgtcctcgcccatattgcggaagatgacaatttaatggaagcgttccgccgcgatttggatatccatacgaaaacagcgatggacattttccaagtgagcgaggacgaagtgacgcccaacatgcgccgtcaggcgaaggcggtcaactttgggatcgtttacgggatcagtgattacggcttggcgcaaaacttaaatatttcacgcaaagaggccgctgaattcatcgagcgctacttcgaaagcttccctggcgtgaagcggtatatggaaaacattgtgcaagaagcaaaacagaaagggtatgtgacgacgctgctgcatcggcgccgctatttgccggatatcacgagccgcaacttcaacgtccgcagctttgctgaacctatggcgatgaacacgccgattcaagggagcgccgctgacattattaaaaaggcgatgatcgatctgaacgctagactgaaggaagagcggctgcaagcgcgccttttgctacaggtgcatgacgagctcattttggaggcgccgaaagaagagatggagcggctgtgccggctcgttccggaagtgatggagcaagcggtcacacttcgcgtgccgctcaaagtcgattaccattatggctcgacgtggtatgacgcgaaataaaaaggatcc

SEQ ID NO: 2628 - DNA, 2712 bp, Artificial Sequence
  Description of Artificial Sequence: Synthetic DNA sequence of Bacillus caldolyticus EA1 DNA polymerase R813M
atgaaatacctgctgccgaccgctgctgctggtctgctgctcctcgctgcccagccggcgatggccatgggattgaaaaaaaagcttgttttaatcgacggcagcagcgtggcgtaccgcgcctttttcgccttgccgcttttgcataacgacaaaggcatccatacgaacgccgtctacgggtttacgatgatgttgaataaaattttggcggaagaagagccaactcatatgcttgtcgcgtttgacgccgggaaaacgacgttccggcatgaagcgtttcaagagtataaaggtgggcgccagcagacgccaccggagctgtcggagcagtttccgctgttgcgcgagctgctgagggcgtatcgcatccccgcctatgaactcgagaactacgaagcggacgatattatcggaacgcttgccgcccgcgctgagcaggaagggtttgaggtgaaagtcatttccggcgaccgcgatctgacccagctcgcctccccccatgtgacggtggacattacgaaaaaagggattaccgatatcgaaccgtacacgccggaggcggtccgcgaaaaatacggcttaactccggaacaaatcgttgatttgaaaggattgatgggcgacaaatcggacaacattcccggagtgccgggcatcggggaaaagacggcggtcaagctgctcaagcaattcggcacggtcgaaaacgtgcttgcctccattgacgagatcaaaggcgaaaagttgaaagaaacgctgcgccaacaccgggagatggcgctgttaagcaaaaagctcgccgccattcgccgcgacgccccggtcgagctctcgcttgatgacatcgtctatcaaggggaagaccgggagaaagtggtcgctttatttaaagagcttgggtttcaatcgtttttagagaaaatggaatcgccgtcatcagaagaggaaaaaccgcttgccaagatggcatttacgcttgctgaccgcgtgacggaggagatgcttgccgacaaggcggcgcttgtcgttgaagtggtcgaggaaaattatcatgatgcgccgatcgtcggcatcgctgtggtcaacgaacatggacggtttttcctgcgcccggagacggcgcttgccgatccgcagtttgtcgcctggcttggtgatgaaacgaagaaaaaaagcatgtttgactcaaagcgcgcggcagtcgccttgaaatggaaaggaattgagctatgcggcgtttcctttgatttattgctggccgcctatttgcttgatccggcgcaaggtgttgatgatgtggctgccgcagcaaaaatgaagcaatacgaagcggtgcgctcggatgaagcggtgtatggcaaaggggcgaagcgggccgtgccggatgagccagtgctcgccgagcatctcgtccgcaaggcggcggcgatttgggcgctcgaacgtccgtttttggatgagctgcgccgcaacgaacaagatcggttgctcgtcgagctcgagcagccgttgtcttcgattttggcggaaatggaatttgccggagtgaaagtggatacgaagcggctcgaacagatgggcgaagagctcgccgagcagctgcgcacggtcgagcagcgcatttatgagctcgccggccaagaattcaacatcaattcaccgaaacagctcggcgtcattttatttgaaaaactgcagctgcccgtcttgaaaaaaacgaaaaccggctactccacttcggcggatgtgcttgaaaaacttgcgccttatcacgagatcgtggaaaacattttgcattaccgccagcttggcaagttgcagtcgacgtatattgaaggattgctgaaagtcgtgcgacccgatacaaagaaggtgcatacgattttcaatcaggcgttgacgcaaaccggacggctcagctcgacggagccgaacttgcaaaacattccgattcggcttgaggaaggacggaaaatccgccaagcgttcgtgccgtcggagtctgattggctcattttcgctgccgactactcgcaaattgagttgcgcgtcctcgcccatattgcggaagatgacaatttaatggaagcgttccgccgcgatttggatatccatacgaaaacagcgatggacattttccaagtgagcgaggacgaagtgacgcccaacatgcgccgtcaggcgaaggcggtcaactttgggatcgtttacgggatcagtgattacggcttggcgcaaaacttaaatatttcacgcaaagaggccgctgaattcatcgagcgctacttcgaaagcttccctggcgtgaagcggtatatggaaaacattgtgcaagaagcaaaacagaaagggtatgtgacgacgctgctgcatcggcgccgctatttgccggatatcacgagccgcaacttcaacgtccgcagctttgctgaaatgatggcgatgaacacgccgattcaagggagcgccgctgacattattaaaaaggcgatgatcgatctgaacgctagactgaaggaagagcggctgcaagcgcgccttttgctacaggtgcatgacgagctcattttggaggcgccgaaagaagagatggagcggctgtgccggctcgttccggaagtgatggagcaagcggtcacacttcgcgtgccgctcaaagtcgattaccattatggctcgacgtggtatgacgcgaaataaaaaggatcc

SEQ ID NO: 2629 - DNA, 2712 bp, Artificial Sequence
  Description of Artificial Sequence: Synthetic DNA sequence of Bacillus caldolyticus EA1 DNA polymerase R813T
atgaaatacctgctgccgaccgctgctgctggtctgctgctcctcgctgcccagccggcgatggccatgggattgaaaaaaaagcttgttttaatcgacggcagcagcgtggcgtaccgcgcctttttcgccttgccgcttttgcataacgacaaaggcatccatacgaacgccgtctacgggtttacgatgatgttgaataaaattttggcggaagaagagccaactcatatgcttgtcgcgtttgacgccgggaaaacgacgttccggcatgaagcgtttcaagagtataaaggtgggcgccagcagacgccaccggagctgtcggagcagtttccgctgttgcgcgagctgctgagggcgtatcgcatccccgcctatgaactcgagaactacgaagcggacgatattatcggaacgcttgccgcccgcgctgagcaggaagggtttgaggtgaaagtcatttccggcgaccgcgatctgacccagctcgcctccccccatgtgacggtggacattacgaaaaaagggattaccgatatcgaaccgtacacgccggaggcggtccgcgaaaaatacggcttaactccggaacaaatcgttgatttgaaaggattgatgggcgacaaatcggacaacattcccggagtgccgggcatcggggaaaagacggcggtcaagctgctcaagcaattcggcacggtcgaaaacgtgcttgcctccattgacgagatcaaaggcgaaaagttgaaagaaacgctgcgccaacaccgggagatggcgctgttaagcaaaaagctcgccgccattcgccgcgacgccccggtcgagctctcgcttgatgacatcgtctatcaaggggaagaccgggagaaagtggtcgctttatttaaagagcttgggtttcaatcgtttttagagaaaatggaatcgccgtcatcagaagaggaaaaaccgcttgccaagatggcatttacgcttgctgaccgcgtgacggaggagatgcttgccgacaaggcggcgcttgtcgttgaagtggtcgaggaaaattatcatgatgcgccgatcgtcggcatcgctgtggtcaacgaacatggacggtttttcctgcgcccggagacggcgcttgccgatccgcagtttgtcgcctggcttggtgatgaaacgaagaaaaaaagcatgtttgactcaaagcgcgcggcagtcgccttgaaatggaaaggaattgagctatgcggcgtttcctttgatttattgctggccgcctatttgcttgatccggcgcaaggtgttgatgatgtggctgccgcagcaaaaatgaagcaatacgaagcggtgcgctcggatgaagcggtgtatggcaaaggggcgaagcgggccgtgccggatgagccagtgctcgccgagcatctcgtccgcaaggcggcggcgatttgggcgctcgaacgtccgtttttggatgagctgcgccgcaacgaacaagatcggttgctcgtcgagctcgagcagccgttgtcttcgattttggcggaaatggaatttgccggagtgaaagtggatacgaagcggctcgaacagatgggcgaagagctcgccgagcagctgcgcacggtcgagcagcgcatttatgagctcgccggccaagaattcaacatcaattcaccgaaacagctcggcgtcattttatttgaaaaactgcagctgcccgtcttgaaaaaaacgaaaaccggctactccacttcggcggatgtgcttgaaaaacttgcgccttatcacgagatcgtggaaaacattttgcattaccgccagcttggcaagttgcagtcgacgtatattgaaggattgctgaaagtcgtgcgacccgatacaaagaaggtgcatacgattttcaatcaggcgttgacgcaaaccggacggctcagctcgacggagccgaacttgcaaaacattccgattcggcttgaggaaggacggaaaatccgccaagcgttcgtgccgtcggagtctgattggctcattttcgctgccgactactcgcaaattgagttgcgcgtcctcgcccatattgcggaagatgacaatttaatggaagcgttccgccgcgatttggatatccatacgaaaacagcgatggacattttccaagtgagcgaggacgaagtgacgcccaacatgcgccgtcaggcgaaggcggtcaactttgggatcgtttacgggatcagtgattacggcttggcgcaaaacttaaatatttcacgcaaagaggccgctgaattcatcgagcgctacttcgaaagcttccctggcgtgaagcggtatatggaaaacattgtgcaagaagcaaaacagaaagggtatgtgacgacgctgctgcatcggcgccgctatttgccggatatcacgagccgcaacttcaacgtccgcagctttgctgaaactatggcgatgaacacgccgattcaagggagcgccgctgacattattaaaaaggcgatgatcgatctgaacgctagactgaaggaagagcggctgcaagcgcgccttttgctacaggtgcatgacgagctcattttggaggcgccgaaagaagagatggagcggctgtgccggctcgttccggaagtgatggagcaagcggtcacacttcgcgtgccgctcaaagtcgattaccattatggctcgacgtggtatgacgcgaaataaaaaggatcc

SEQ ID NO: 2630 - DNA, 2712 bp, Artificial Sequence
  Description of Artificial Sequence: Synthetic DNA sequence of Bacillus caldolyticus EA1 DNA polymerase R813N
atgaaatacctgctgccgaccgctgctgctggtctgctgctcctcgctgcccagccggcgatggccatgggattgaaaaaaaagcttgttttaatcgacggcagcagcgtggcgtaccgcgcctttttcgccttgccgcttttgcataacgacaaaggcatccatacgaacgccgtctacgggtttacgatgatgttgaataaaattttggcggaagaagagccaactcatatgcttgtcgcgtttgacgccgggaaaacgacgttccggcatgaagcgtttcaagagtataaaggtgggcgccagcagacgccaccggagctgtcggagcagtttccgctgttgcgcgagctgctgagggcgtatcgcatccccgcctatgaactcgagaactacgaagcggacgatattatcggaacgcttgccgcccgcgctgagcaggaagggtttgaggtgaaagtcatttccggcgaccgcgatctgacccagctcgcctccccccatgtgacggtggacattacgaaaaaagggattaccgatatcgaaccgtacacgccggaggcggtccgcgaaaaatacggcttaactccggaacaaatcgttgatttgaaaggattgatgggcgacaaatcggacaacattcccggagtgccgggcatcggggaaaagacggcggtcaagctgctcaagcaattcggcacggtcgaaaacgtgcttgcctccattgacgagatcaaaggcgaaaagttgaaagaaacgctgcgccaacaccgggagatggcgctgttaagcaaaaagctcgccgccattcgccgcgacgccccggtcgagctctcgcttgatgacatcgtctatcaaggggaagaccgggagaaagtggtcgctttatttaaagagcttgggtttcaatcgtttttagagaaaatggaatcgccgtcatcagaagaggaaaaaccgcttgccaagatggcatttacgcttgctgaccgcgtgacggaggagatgcttgccgacaaggcggcgcttgtcgttgaagtggtcgaggaaaattatcatgatgcgccgatcgtcggcatcgctgtggtcaacgaacatggacggtttttcctgcgcccggagacggcgcttgccgatccgcagtttgtcgcctggcttggtgatgaaacgaagaaaaaaagcatgtttgactcaaagcgcgcggcagtcgccttgaaatggaaaggaattgagctatgcggcgtttcctttgatttattgctggccgcctatttgcttgatccggcgcaaggtgttgatgatgtggctgccgcagcaaaaatgaagcaatacgaagcggtgcgctcggatgaagcggtgtatggcaaaggggcgaagcgggccgtgccggatgagccagtgctcgccgagcatctcgtccgcaaggcggcggcgatttgggcgctcgaacgtccgtttttggatgagctgcgccgcaacgaacaagatcggttgctcgtcgagctcgagcagccgttgtcttcgattttggcggaaatggaatttgccggagtgaaagtggatacgaagcggctcgaacagatgggcgaagagctcgccgagcagctgcgcacggtcgagcagcgcatttatgagctcgccggccaagaattcaacatcaattcaccgaaacagctcggcgtcattttatttgaaaaactgcagctgcccgtcttgaaaaaaacgaaaaccggctactccacttcggcggatgtgcttgaaaaacttgcgccttatcacgagatcgtggaaaacattttgcattaccgccagcttggcaagttgcagtcgacgtatattgaaggattgctgaaagtcgtgcgacccgatacaaagaaggtgcatacgattttcaatcaggcgttgacgcaaaccggacggctcagctcgacggagccgaacttgcaaaacattccgattcggcttgaggaaggacggaaaatccgccaagcgttcgtgccgtcggagtctgattggctcattttcgctgccgactactcgcaaattgagttgcgcgtcctcgcccatattgcggaagatgacaatttaatggaagcgttccgccgcgatttggatatccatacgaaaacagcgatggacattttccaagtgagcgaggacgaagtgacgcccaacatgcgccgtcaggcgaaggcggtcaactttgggatcgtttacgggatcagtgattacggcttggcgcaaaacttaaatatttcacgcaaagaggccgctgaattcatcgagcgctacttcgaaagcttccctggcgtgaagcggtatatggaaaacattgtgcaagaagcaaaacagaaagggtatgtgacgacgctgctgcatcggcgccgctatttgccggatatcacgagccgcaacttcaacgtccgcagctttgctgaaaatatggcgatgaacacgccgattcaagggagcgccgctgacattattaaaaaggcgatgatcgatctgaacgctagactgaaggaagagcggctgcaagcgcgccttttgctacaggtgcatgacgagctcattttggaggcgccgaaagaagagatggagcggctgtgccggctcgttccggaagtgatggagcaagcggtcacacttcgcgtgccgctcaaagtcgattaccattatggctcgacgtggtatgacgcgaaataaaaaggatcc

SEQ ID NO: 2631 - DNA, 2712 bp, Artificial Sequence
  Description of Artificial Sequence: Synthetic DNA sequence of Bacillus caldolyticus EA1 DNA polymerase R813V
atgaaatacctgctgccgaccgctgctgctggtctgctgctcctcgctgcccagccggcgatggccatgggattgaaaaaaaagcttgttttaatcgacggcagcagcgtggcgtaccgcgcctttttcgccttgccgcttttgcataacgacaaaggcatccatacgaacgccgtctacgggtttacgatgatgttgaataaaattttggcggaagaagagccaactcatatgcttgtcgcgtttgacgccgggaaaacgacgttccggcatgaagcgtttcaagagtataaaggtgggcgccagcagacgccaccggagctgtcggagcagtttccgctgttgcgcgagctgctgagggcgtatcgcatccccgcctatgaactcgagaactacgaagcggacgatattatcggaacgcttgccgcccgcgctgagcaggaagggtttgaggtgaaagtcatttccggcgaccgcgatctgacccagctcgcctccccccatgtgacggtggacattacgaaaaaagggattaccgatatcgaaccgtacacgccggaggcggtccgcgaaaaatacggcttaactccggaacaaatcgttgatttgaaaggattgatgggcgacaaatcggacaacattcccggagtgccgggcatcggggaaaagacggcggtcaagctgctcaagcaattcggcacggtcgaaaacgtgcttgcctccattgacgagatcaaaggcgaaaagttgaaagaaacgctgcgccaacaccgggagatggcgctgttaagcaaaaagctcgccgccattcgccgcgacgccccggtcgagctctcgcttgatgacatcgtctatcaaggggaagaccgggagaaagtggtcgctttatttaaagagcttgggtttcaatcgtttttagagaaaatggaatcgccgtcatcagaagaggaaaaaccgcttgccaagatggcatttacgcttgctgaccgcgtgacggaggagatgcttgccgacaaggcggcgcttgtcgttgaagtggtcgaggaaaattatcatgatgcgccgatcgtcggcatcgctgtggtcaacgaacatggacggtttttcctgcgcccggagacggcgcttgccgatccgcagtttgtcgcctggcttggtgatgaaacgaagaaaaaaagcatgtttgactcaaagcgcgcggcagtcgccttgaaatggaaaggaattgagctatgcggcgtttcctttgatttattgctggccgcctatttgcttgatccggcgcaaggtgttgatgatgtggctgccgcagcaaaaatgaagcaatacgaagcggtgcgctcggatgaagcggtgtatggcaaaggggcgaagcgggccgtgccggatgagccagtgctcgccgagcatctcgtccgcaaggcggcggcgatttgggcgctcgaacgtccgtttttggatgagctgcgccgcaacgaacaagatcggttgctcgtcgagctcgagcagccgttgtcttcgattttggcggaaatggaatttgccggagtgaaagtggatacgaagcggctcgaacagatgggcgaagagctcgccgagcagctgcgcacggtcgagcagcgcatttatgagctcgccggccaagaattcaacatcaattcaccgaaacagctcggcgtcattttatttgaaaaactgcagctgcccgtcttgaaaaaaacgaaaaccggctactccacttcggcggatgtgcttgaaaaacttgcgccttatcacgagatcgtggaaaacattttgcattaccgccagcttggcaagttgcagtcgacgtatattgaaggattgctgaaagtcgtgcgacccgatacaaagaaggtgcatacgattttcaatcaggcgttgacgcaaaccggacggctcagctcgacggagccgaacttgcaaaacattccgattcggcttgaggaaggacggaaaatccgccaagcgttcgtgccgtcggagtctgattggctcattttcgctgccgactactcgcaaattgagttgcgcgtcctcgcccatattgcggaagatgacaatttaatggaagcgttccgccgcgatttggatatccatacgaaaacagcgatggacattttccaagtgagcgaggacgaagtgacgcccaacatgcgccgtcaggcgaaggcggtcaactttgggatcgtttacgggatcagtgattacggcttggcgcaaaacttaaatatttcacgcaaagaggccgctgaattcatcgagcgctacttcgaaagcttccctggcgtgaagcggtatatggaaaacattgtgcaagaagcaaaacagaaagggtatgtgacgacgctgctgcatcggcgccgctatttgccggatatcacgagccgcaacttcaacgtccgcagctttgctgaagtcatggcgatgaacacgccgattcaagggagcgccgctgacattattaaaaaggcgatgatcgatctgaacgctagactgaaggaagagcggctgcaagcgcgccttttgctacaggtgcatgacgagctcattttggaggcgccgaaagaagagatggagcggctgtgccggctcgttccggaagtgatggagcaagcggtcacacttcgcgtgccgctcaaagtcgattaccattatggctcgacgtggtatgacgcgaaataaaaaggatcc

SEQ ID NO: 2632 - DNA, 2712 bp, Artificial Sequence
  Description of Artificial Sequence: Synthetic DNA sequence of Bacillus caldolyticus EA1 DNA polymerase Q603A
atgaaatacctgctgccgaccgctgctgctggtctgctgctcctcgctgcccagccggcgatggccatgggattgaaaaaaaagcttgttttaatcgacggcagcagcgtggcgtaccgcgcctttttcgccttgccgcttttgcataacgacaaaggcatccatacgaacgccgtctacgggtttacgatgatgttgaataaaattttggcggaagaagagccaactcatatgcttgtcgcgtttgacgccgggaaaacgacgttccggcatgaagcgtttcaagagtataaaggtgggcgccagcagacgccaccggagctgtcggagcagtttccgctgttgcgcgagctgctgagggcgtatcgcatccccgcctatgaactcgagaactacgaagcggacgatattatcggaacgcttgccgcccgcgctgagcaggaagggtttgaggtgaaagtcatttccggcgaccgcgatctgacccagctcgcctccccccatgtgacggtggacattacgaaaaaagggattaccgatatcgaaccgtacacgccggaggcggtccgcgaaaaatacggcttaactccggaacaaatcgttgatttgaaaggattgatgggcgacaaatcggacaacattcccggagtgccgggcatcggggaaaagacggcggtcaagctgctcaagcaattcggcacggtcgaaaacgtgcttgcctccattgacgagatcaaaggcgaaaagttgaaagaaacgctgcgccaacaccgggagatggcgctgttaagcaaaaagctcgccgccattcgccgcgacgccccggtcgagctctcgcttgatgacatcgtctatcaaggggaagaccgggagaaagtggtcgctttatttaaagagcttgggtttcaatcgtttttagagaaaatggaatcgccgtcatcagaagaggaaaaaccgcttgccaagatggcatttacgcttgctgaccgcgtgacggaggagatgcttgccgacaaggcggcgcttgtcgttgaagtggtcgaggaaaattatcatgatgcgccgatcgtcggcatcgctgtggtcaacgaacatggacggtttttcctgcgcccggagacggcgcttgccgatccgcagtttgtcgcctggcttggtgatgaaacgaagaaaaaaagcatgtttgactcaaagcgcgcggcagtcgccttgaaatggaaaggaattgagctatgcggcgtttcctttgatttattgctggccgcctatttgcttgatccggcgcaaggtgttgatgatgtggctgccgcagcaaaaatgaagcaatacgaagcggtgcgctcggatgaagcggtgtatggcaaaggggcgaagcgggccgtgccggatgagccagtgctcgccgagcatctcgtccgcaaggcggcggcgatttgggcgctcgaacgtccgtttttggatgagctgcgccgcaacgaacaagatcggttgctcgtcgagctcgagcagccgttgtcttcgattttggcggaaatggaatttgccggagtgaaagtggatacgaagcggctcgaacagatgggcgaagagctcgccgagcagctgcgcacggtcgagcagcgcatttatgagctcgccggccaagaattcaacatcaattcaccgaaacagctcggcgtcattttatttgaaaaactgcagctgcccgtcttgaaaaaaacgaaaaccggctactccacttcggcggatgtgcttgaaaaacttgcgccttatcacgagatcgtggaaaacattttgcattaccgcgctcttggcaagttgcagtcgacgtatattgaaggattgctgaaagtcgtgcgacccgatacaaagaaggtgcatacgattttcaatcaggcgttgacgcaaaccggacggctcagctcgacggagccgaacttgcaaaacattccgattcggcttgaggaaggacggaaaatccgccaagcgttcgtgccgtcggagtctgattggctcattttcgctgccgactactcgcaaattgagttgcgcgtcctcgcccatattgcggaagatgacaatttaatggaagcgttccgccgcgatttggatatccatacgaaaacagcgatggacattttccaagtgagcgaggacgaagtgacgcccaacatgcgccgtcaggcgaaggcggtcaactttgggatcgtttacgggatcagtgattacggcttggcgcaaaacttaaatatttcacgcaaagaggccgctgaattcatcgagcgctacttcgaaagcttccctggcgtgaagcggtatatggaaaacattgtgcaagaagcaaaacagaaagggtatgtgacgacgctgctgcatcggcgccgctatttgccggatatcacgagccgcaacttcaacgtccgcagctttgctgaacggatggcgatgaacacgccgattcaagggagcgccgctgacattattaaaaaggcgatgatcgatctgaacgctagactgaaggaagagcggctgcaagcgcgccttttgctacaggtgcatgacgagctcattttggaggcgccgaaagaagagatggagcggctgtgccggctcgttccggaagtgatggagcaagcggtcacacttcgcgtgccgctcaaagtcgattaccattatggctcgacgtggtatgacgcgaaataaaaaggatcc

SEQ ID NO: 2633 - DNA, 2712 bp, Artificial Sequence
  Description of Artificial Sequence: Synthetic DNA sequence of Bacillus caldolyticus EA1 DNA polymerase Q603R
atgaaatacctgctgccgaccgctgctgctggtctgctgctcctcgctgcccagccggcgatggccatgggattgaaaaaaaagcttgttttaatcgacggcagcagcgtggcgtaccgcgcctttttcgccttgccgcttttgcataacgacaaaggcatccatacgaacgccgtctacgggtttacgatgatgttgaataaaattttggcggaagaagagccaactcatatgcttgtcgcgtttgacgccgggaaaacgacgttccggcatgaagcgtttcaagagtataaaggtgggcgccagcagacgccaccggagctgtcggagcagtttccgctgttgcgcgagctgctgagggcgtatcgcatccccgcctatgaactcgagaactacgaagcggacgatattatcggaacgcttgccgcccgcgctgagcaggaagggtttgaggtgaaagtcatttccggcgaccgcgatctgacccagctcgcctccccccatgtgacggtggacattacgaaaaaagggattaccgatatcgaaccgtacacgccggaggcggtccgcgaaaaatacggcttaactccggaacaaatcgttgatttgaaaggattgatgggcgacaaatcggacaacattcccggagtgccgggcatcggggaaaagacggcggtcaagctgctcaagcaattcggcacggtcgaaaacgtgcttgcctccattgacgagatcaaaggcgaaaagttgaaagaaacgctgcgccaacaccgggagatggcgctgttaagcaaaaagctcgccgccattcgccgcgacgccccggtcgagctctcgcttgatgacatcgtctatcaaggggaagaccgggagaaagtggtcgctttatttaaagagcttgggtttcaatcgtttttagagaaaatggaatcgccgtcatcagaagaggaaaaaccgcttgccaagatggcatttacgcttgctgaccgcgtgacggaggagatgcttgccgacaaggcggcgcttgtcgttgaagtggtcgaggaaaattatcatgatgcgccgatcgtcggcatcgctgtggtcaacgaacatggacggtttttcctgcgcccggagacggcgcttgccgatccgcagtttgtcgcctggcttggtgatgaaacgaagaaaaaaagcatgtttgactcaaagcgcgcggcagtcgccttgaaatggaaaggaattgagctatgcggcgtttcctttgatttattgctggccgcctatttgcttgatccggcgcaaggtgttgatgatgtggctgccgcagcaaaaatgaagcaatacgaagcggtgcgctcggatgaagcggtgtatggcaaaggggcgaagcgggccgtgccggatgagccagtgctcgccgagcatctcgtccgcaaggcggcggcgatttgggcgctcgaacgtccgtttttggatgagctgcgccgcaacgaacaagatcggttgctcgtcgagctcgagcagccgttgtcttcgattttggcggaaatggaatttgccggagtgaaagtggatacgaagcggctcgaacagatgggcgaagagctcgccgagcagctgcgcacggtcgagcagcgcatttatgagctcgccggccaagaattcaacatcaattcaccgaaacagctcggcgtcattttatttgaaaaactgcagctgcccgtcttgaaaaaaacgaaaaccggctactccacttcggcggatgtgcttgaaaaacttgcgccttatcacgagatcgtggaaaacattttgcattaccgccgacttggcaagttgcagtcgacgtatattgaaggattgctgaaagtcgtgcgacccgatacaaagaaggtgcatacgattttcaatcaggcgttgacgcaaaccggacggctcagctcgacggagccgaacttgcaaaacattccgattcggcttgaggaaggacggaaaatccgccaagcgttcgtgccgtcggagtctgattggctcattttcgctgccgactactcgcaaattgagttgcgcgtcctcgcccatattgcggaagatgacaatttaatggaagcgttccgccgcgatttggatatccatacgaaaacagcgatggacattttccaagtgagcgaggacgaagtgacgcccaacatgcgccgtcaggcgaaggcggtcaactttgggatcgtttacgggatcagtgattacggcttggcgcaaaacttaaatatttcacgcaaagaggccgctgaattcatcgagcgctacttcgaaagcttccctggcgtgaagcggtatatggaaaacattgtgcaagaagcaaaacagaaagggtatgtgacgacgctgctgcatcggcgccgctatttgccggatatcacgagccgcaacttcaacgtccgcagctttgctgaacggatggcgatgaacacgccgattcaagggagcgccgctgacattattaaaaaggcgatgatcgatctgaacgctagactgaaggaagagcggctgcaagcgcgccttttgctacaggtgcatgacgagctcattttggaggcgccgaaagaagagatggagcggctgtgccggctcgttccggaagtgatggagcaagcggtcacacttcgcgtgccgctcaaagtcgattaccattatggctcgacgtggtatgacgcgaaataaaaaggatcc

SEQ ID NO: 2634 - DNA, 2712 bp, Artificial Sequence
  Description of Artificial Sequence: Synthetic DNA sequence of Bacillus caldolyticus EA1 DNA polymerase Q603C
atgaaatacctgctgccgaccgctgctgctggtctgctgctcctcgctgcccagccggcgatggccatgggattgaaaaaaaagcttgttttaatcgacggcagcagcgtggcgtaccgcgcctttttcgccttgccgcttttgcataacgacaaaggcatccatacgaacgccgtctacgggtttacgatgatgttgaataaaattttggcggaagaagagccaactcatatgcttgtcgcgtttgacgccgggaaaacgacgttccggcatgaagcgtttcaagagtataaaggtgggcgccagcagacgccaccggagctgtcggagcagtttccgctgttgcgcgagctgctgagggcgtatcgcatccccgcctatgaactcgagaactacgaagcggacgatattatcggaacgcttgccgcccgcgctgagcaggaagggtttgaggtgaaagtcatttccggcgaccgcgatctgacccagctcgcctccccccatgtgacggtggacattacgaaaaaagggattaccgatatcgaaccgtacacgccggaggcggtccgcgaaaaatacggcttaactccggaacaaatcgttgatttgaaaggattgatgggcgacaaatcggacaacattcccggagtgccgggcatcggggaaaagacggcggtcaagctgctcaagcaattcggcacggtcgaaaacgtgcttgcctccattgacgagatcaaaggcgaaaagttgaaagaaacgctgcgccaacaccgggagatggcgctgttaagcaaaaagctcgccgccattcgccgcgacgccccggtcgagctctcgcttgatgacatcgtctatcaaggggaagaccgggagaaagtggtcgctttatttaaagagcttgggtttcaatcgtttttagagaaaatggaatcgccgtcatcagaagaggaaaaaccgcttgccaagatggcatttacgcttgctgaccgcgtgacggaggagatgcttgccgacaaggcggcgcttgtcgttgaagtggtcgaggaaaattatcatgatgcgccgatcgtcggcatcgctgtggtcaacgaacatggacggtttttcctgcgcccggagacggcgcttgccgatccgcagtttgtcgcctggcttggtgatgaaacgaagaaaaaaagcatgtttgactcaaagcgcgcggcagtcgccttgaaatggaaaggaattgagctatgcggcgtttcctttgatttattgctggccgcctatttgcttgatccggcgcaaggtgttgatgatgtggctgccgcagcaaaaatgaagcaatacgaagcggtgcgctcggatgaagcggtgtatggcaaaggggcgaagcgggccgtgccggatgagccagtgctcgccgagcatctcgtccgcaaggcggcggcgatttgggcgctcgaacgtccgtttttggatgagctgcgccgcaacgaacaagatcggttgctcgtcgagctcgagcagccgttgtcttcgattttggcggaaatggaatttgccggagtgaaagtggatacgaagcggctcgaacagatgggcgaagagctcgccgagcagctgcgcacggtcgagcagcgcatttatgagctcgccggccaagaattcaacatcaattcaccgaaacagctcggcgtcattttatttgaaaaactgcagctgcccgtcttgaaaaaaacgaaaaccggctactccacttcggcggatgtgcttgaaaaacttgcgccttatcacgagatcgtggaaaacattttgcattaccgctgtcttggcaagttgcagtcgacgtatattgaaggattgctgaaagtcgtgcgacccgatacaaagaaggtgcatacgattttcaatcaggcgttgacgcaaaccggacggctcagctcgacggagccgaacttgcaaaacattccgattcggcttgaggaaggacggaaaatccgccaagcgttcgtgccgtcggagtctgattggctcattttcgctgccgactactcgcaaattgagttgcgcgtcctcgcccatattgcggaagatgacaatttaatggaagcgttccgccgcgatttggatatccatacgaaaacagcgatggacattttccaagtgagcgaggacgaagtgacgcccaacatgcgccgtcaggcgaaggcggtcaactttgggatcgtttacgggatcagtgattacggcttggcgcaaaacttaaatatttcacgcaaagaggccgctgaattcatcgagcgctacttcgaaagcttccctggcgtgaagcggtatatggaaaacattgtgcaagaagcaaaacagaaagggtatgtgacgacgctgctgcatcggcgccgctatttgccggatatcacgagccgcaacttcaacgtccgcagctttgctgaacggatggcgatgaacacgccgattcaagggagcgccgctgacattattaaaaaggcgatgatcgatctgaacgctagactgaaggaagagcggctgcaagcgcgccttttgctacaggtgcatgacgagctcattttggaggcgccgaaagaagagatggagcggctgtgccggctcgttccggaagtgatggagcaagcggtcacacttcgcgtgccgctcaaagtcgattaccattatggctcgacgtggtatgacgcgaaataaaaaggatcc

SEQ ID NO: 2635 - DNA, 2712 bp, Artificial Sequence
  Description of Artificial Sequence: Synthetic DNA sequence of Bacillus caldolyticus EA1 DNA polymerase Q603G
atgaaatacctgctgccgaccgctgctgctggtctgctgctcctcgctgcccagccggcgatggccatgggattgaaaaaaaagcttgttttaatcgacggcagcagcgtggcgtaccgcgcctttttcgccttgccgcttttgcataacgacaaaggcatccatacgaacgccgtctacgggtttacgatgatgttgaataaaattttggcggaagaagagccaactcatatgcttgtcgcgtttgacgccgggaaaacgacgttccggcatgaagcgtttcaagagtataaaggtgggcgccagcagacgccaccggagctgtcggagcagtttccgctgttgcgcgagctgctgagggcgtatcgcatccccgcctatgaactcgagaactacgaagcggacgatattatcggaacgcttgccgcccgcgctgagcaggaagggtttgaggtgaaagtcatttccggcgaccgcgatctgacccagctcgcctccccccatgtgacggtggacattacgaaaaaagggattaccgatatcgaaccgtacacgccggaggcggtccgcgaaaaatacggcttaactccggaacaaatcgttgatttgaaaggattgatgggcgacaaatcggacaacattcccggagtgccgggcatcggggaaaagacggcggtcaagctgctcaagcaattcggcacggtcgaaaacgtgcttgcctccattgacgagatcaaaggcgaaaagttgaaagaaacgctgcgccaacaccgggagatggcgctgttaagcaaaaagctcgccgccattcgccgcgacgccccggtcgagctctcgcttgatgacatcgtctatcaaggggaagaccgggagaaagtggtcgctttatttaaagagcttgggtttcaatcgtttttagagaaaatggaatcgccgtcatcagaagaggaaaaaccgcttgccaagatggcatttacgcttgctgaccgcgtgacggaggagatgcttgccgacaaggcggcgcttgtcgttgaagtggtcgaggaaaattatcatgatgcgccgatcgtcggcatcgctgtggtcaacgaacatggacggtttttcctgcgcccggagacggcgcttgccgatccgcagtttgtcgcctggcttggtgatgaaacgaagaaaaaaagcatgtttgactcaaagcgcgcggcagtcgccttgaaatggaaaggaattgagctatgcggcgtttcctttgatttattgctggccgcctatttgcttgatccggcgcaaggtgttgatgatgtggctgccgcagcaaaaatgaagcaatacgaagcggtgcgctcggatgaagcggtgtatggcaaaggggcgaagcgggccgtgccggatgagccagtgctcgccgagcatctcgtccgcaaggcggcggcgatttgggcgctcgaacgtccgtttttggatgagctgcgccgcaacgaacaagatcggttgctcgtcgagctcgagcagccgttgtcttcgattttggcggaaatggaatttgccggagtgaaagtggatacgaagcggctcgaacagatgggcgaagagctcgccgagcagctgcgcacggtcgagcagcgcatttatgagctcgccggccaagaattcaacatcaattcaccgaaacagctcggcgtcattttatttgaaaaactgcagctgcccgtcttgaaaaaaacgaaaaccggctactccacttcggcggatgtgcttgaaaaacttgcgccttatcacgagatcgtggaaaacattttgcattaccgcggtcttggcaagttgcagtcgacgtatattgaaggattgctgaaagtcgtgcgacccgatacaaagaaggtgcatacgattttcaatcaggcgttgacgcaaaccggacggctcagctcgacggagccgaacttgcaaaacattccgattcggcttgaggaaggacggaaaatccgccaagcgttcgtgccgtcggagtctgattggctcattttcgctgccgactactcgcaaattgagttgcgcgtcctcgcccatattgcggaagatgacaatttaatggaagcgttccgccgcgatttggatatccatacgaaaacagcgatggacattttccaagtgagcgaggacgaagtgacgcccaacatgcgccgtcaggcgaaggcggtcaactttgggatcgtttacgggatcagtgattacggcttggcgcaaaacttaaatatttcacgcaaagaggccgctgaattcatcgagcgctacttcgaaagcttccctggcgtgaagcggtatatggaaaacattgtgcaagaagcaaaacagaaagggtatgtgacgacgctgctgcatcggcgccgctatttgccggatatcacgagccgcaacttcaacgtccgcagctttgctgaacggatggcgatgaacacgccgattcaagggagcgccgctgacattattaaaaaggcgatgatcgatctgaacgctagactgaaggaagagcggctgcaagcgcgccttttgctacaggtgcatgacgagctcattttggaggcgccgaaagaagagatggagcggctgtgccggctcgttccggaagtgatggagcaagcggtcacacttcgcgtgccgctcaaagtcgattaccattatggctcgacgtggtatgacgcgaaataaaaaggatcc

SEQ ID NO: 2636 - DNA, 2712 bp, Artificial Sequence
  Description of Artificial Sequence: Synthetic DNA sequence of Bacillus caldolyticus EA1 DNA polymerase Q603H
atgaaatacctgctgccgaccgctgctgctggtctgctgctcctcgctgcccagccggcgatggccatgggattgaaaaaaaagcttgttttaatcgacggcagcagcgtggcgtaccgcgcctttttcgccttgccgcttttgcataacgacaaaggcatccatacgaacgccgtctacgggtttacgatgatgttgaataaaattttggcggaagaagagccaactcatatgcttgtcgcgtttgacgccgggaaaacgacgttccggcatgaagcgtttcaagagtataaaggtgggcgccagcagacgccaccggagctgtcggagcagtttccgctgttgcgcgagctgctgagggcgtatcgcatccccgcctatgaactcgagaactacgaagcggacgatattatcggaacgcttgccgcccgcgctgagcaggaagggtttgaggtgaaagtcatttccggcgaccgcgatctgacccagctcgcctccccccatgtgacggtggacattacgaaaaaagggattaccgatatcgaaccgtacacgccggaggcggtccgcgaaaaatacggcttaactccggaacaaatcgttgatttgaaaggattgatgggcgacaaatcggacaacattcccggagtgccgggcatcggggaaaagacggcggtcaagctgctcaagcaattcggcacggtcgaaaacgtgcttgcctccattgacgagatcaaaggcgaaaagttgaaagaaacgctgcgccaacaccgggagatggcgctgttaagcaaaaagctcgccgccattcgccgcgacgccccggtcgagctctcgcttgatgacatcgtctatcaaggggaagaccgggagaaagtggtcgctttatttaaagagcttgggtttcaatcgtttttagagaaaatggaatcgccgtcatcagaagaggaaaaaccgcttgccaagatggcatttacgcttgctgaccgcgtgacggaggagatgcttgccgacaaggcggcgcttgtcgttgaagtggtcgaggaaaattatcatgatgcgccgatcgtcggcatcgctgtggtcaacgaacatggacggtttttcctgcgcccggagacggcgcttgccgatccgcagtttgtcgcctggcttggtgatgaaacgaagaaaaaaagcatgtttgactcaaagcgcgcggcagtcgccttgaaatggaaaggaattgagctatgcggcgtttcctttgatttattgctggccgcctatttgcttgatccggcgcaaggtgttgatgatgtggctgccgcagcaaaaatgaagcaatacgaagcggtgcgctcggatgaagcggtgtatggcaaaggggcgaagcgggccgtgccggatgagccagtgctcgccgagcatctcgtccgcaaggcggcggcgatttgggcgctcgaacgtccgtttttggatgagctgcgccgcaacgaacaagatcggttgctcgtcgagctcgagcagccgttgtcttcgattttggcggaaatggaatttgccggagtgaaagtggatacgaagcggctcgaacagatgggcgaagagctcgccgagcagctgcgcacggtcgagcagcgcatttatgagctcgccggccaagaattcaacatcaattcaccgaaacagctcggcgtcattttatttgaaaaactgcagctgcccgtcttgaaaaaaacgaaaaccggctactccacttcggcggatgtgcttgaaaaacttgcgccttatcacgagatcgtggaaaacattttgcattaccgccatcttggcaagttgcagtcgacgtatattgaaggattgctgaaagtcgtgcgacccgatacaaagaaggtgcatacgattttcaatcaggcgttgacgcaaaccggacggctcagctcgacggagccgaacttgcaaaacattccgattcggcttgaggaaggacggaaaatccgccaagcgttcgtgccgtcggagtctgattggctcattttcgctgccgactactcgcaaattgagttgcgcgtcctcgcccatattgcggaagatgacaatttaatggaagcgttccgccgcgatttggatatccatacgaaaacagcgatggacattttccaagtgagcgaggacgaagtgacgcccaacatgcgccgtcaggcgaaggcggtcaactttgggatcgtttacgggatcagtgattacggcttggcgcaaaacttaaatatttcacgcaaagaggccgctgaattcatcgagcgctacttcgaaagcttccctggcgtgaagcggtatatggaaaacattgtgcaagaagcaaaacagaaagggtatgtgacgacgctgctgcatcggcgccgctatttgccggatatcacgagccgcaacttcaacgtccgcagctttgctgaacggatggcgatgaacacgccgattcaagggagcgccgctgacattattaaaaaggcgatgatcgatctgaacgctagactgaaggaagagcggctgcaagcgcgccttttgctacaggtgcatgacgagctcattttggaggcgccgaaagaagagatggagcggctgtgccggctcgttccggaagtgatggagcaagcggtcacacttcgcgtgccgctcaaagtcgattaccattatggctcgacgtggtatgacgcgaaataaaaaggatcc

SEQ ID NO: 2637 - DNA, 2712 bp, Artificial Sequence
  Description of Artificial Sequence: Synthetic DNA sequence of Bacillus caldolyticus EA1 DNA polymerase Q603I
atgaaatacctgctgccgaccgctgctgctggtctgctgctcctcgctgcccagccggcgatggccatgggattgaaaaaaaagcttgttttaatcgacggcagcagcgtggcgtaccgcgcctttttcgccttgccgcttttgcataacgacaaaggcatccatacgaacgccgtctacgggtttacgatgatgttgaataaaattttggcggaagaagagccaactcatatgcttgtcgcgtttgacgccgggaaaacgacgttccggcatgaagcgtttcaagagtataaaggtgggcgccagcagacgccaccggagctgtcggagcagtttccgctgttgcgcgagctgctgagggcgtatcgcatccccgcctatgaactcgagaactacgaagcggacgatattatcggaacgcttgccgcccgcgctgagcaggaagggtttgaggtgaaagtcatttccggcgaccgcgatctgacccagctcgcctccccccatgtgacggtggacattacgaaaaaagggattaccgatatcgaaccgtacacgccggaggcggtccgcgaaaaatacggcttaactccggaacaaatcgttgatttgaaaggattgatgggcgacaaatcggacaacattcccggagtgccgggcatcggggaaaagacggcggtcaagctgctcaagcaattcggcacggtcgaaaacgtgcttgcctccattgacgagatcaaaggcgaaaagttgaaagaaacgctgcgccaacaccgggagatggcgctgttaagcaaaaagctcgccgccattcgccgcgacgccccggtcgagctctcgcttgatgacatcgtctatcaaggggaagaccgggagaaagtggtcgctttatttaaagagcttgggtttcaatcgtttttagagaaaatggaatcgccgtcatcagaagaggaaaaaccgcttgccaagatggcatttacgcttgctgaccgcgtgacggaggagatgcttgccgacaaggcggcgcttgtcgttgaagtggtcgaggaaaattatcatgatgcgccgatcgtcggcatcgctgtggtcaacgaacatggacggtttttcctgcgcccggagacggcgcttgccgatccgcagtttgtcgcctggcttggtgatgaaacgaagaaaaaaagcatgtttgactcaaagcgcgcggcagtcgccttgaaatggaaaggaattgagctatgcggcgtttcctttgatttattgctggccgcctatttgcttgatccggcgcaaggtgttgatgatgtggctgccgcagcaaaaatgaagcaatacgaagcggtgcgctcggatgaagcggtgtatggcaaaggggcgaagcgggccgtgccggatgagccagtgctcgccgagcatctcgtccgcaaggcggcggcgatttgggcgctcgaacgtccgtttttggatgagctgcgccgcaacgaacaagatcggttgctcgtcgagctcgagcagccgttgtcttcgattttggcggaaatggaatttgccggagtgaaagtggatacgaagcggctcgaacagatgggcgaagagctcgccgagcagctgcgcacggtcgagcagcgcatttatgagctcgccggccaagaattcaacatcaattcaccgaaacagctcggcgtcattttatttgaaaaactgcagctgcccgtcttgaaaaaaacgaaaaccggctactccacttcggcggatgtgcttgaaaaacttgcgccttatcacgagatcgtggaaaacattttgcattaccgcattcttggcaagttgcagtcgacgtatattgaaggattgctgaaagtcgtgcgacccgatacaaagaaggtgcatacgattttcaatcaggcgttgacgcaaaccggacggctcagctcgacggagccgaacttgcaaaacattccgattcggcttgaggaaggacggaaaatccgccaagcgttcgtgccgtcggagtctgattggctcattttcgctgccgactactcgcaaattgagttgcgcgtcctcgcccatattgcggaagatgacaatttaatggaagcgttccgccgcgatttggatatccatacgaaaacagcgatggacattttccaagtgagcgaggacgaagtgacgcccaacatgcgccgtcaggcgaaggcggtcaactttgggatcgtttacgggatcagtgattacggcttggcgcaaaacttaaatatttcacgcaaagaggccgctgaattcatcgagcgctacttcgaaagcttccctggcgtgaagcggtatatggaaaacattgtgcaagaagcaaaacagaaagggtatgtgacgacgctgctgcatcggcgccgctatttgccggatatcacgagccgcaacttcaacgtccgcagctttgctgaacggatggcgatgaacacgccgattcaagggagcgccgctgacattattaaaaaggcgatgatcgatctgaacgctagactgaaggaagagcggctgcaagcgcgccttttgctacaggtgcatgacgagctcattttggaggcgccgaaagaagagatggagcggctgtgccggctcgttccggaagtgatggagcaagcggtcacacttcgcgtgccgctcaaagtcgattaccattatggctcgacgtggtatgacgcgaaataaaaaggatcc

SEQ ID NO: 2638 - DNA, 2712 bp, Artificial Sequence
  Description of Artificial Sequence: Synthetic DNA sequence of Bacillus caldolyticus EA1 DNA polymerase Q603L
atgaaatacctgctgccgaccgctgctgctggtctgctgctcctcgctgcccagccggcgatggccatgggattgaaaaaaaagcttgttttaatcgacggcagcagcgtggcgtaccgcgcctttttcgccttgccgcttttgcataacgacaaaggcatccatacgaacgccgtctacgggtttacgatgatgttgaataaaattttggcggaagaagagccaactcatatgcttgtcgcgtttgacgccgggaaaacgacgttccggcatgaagcgtttcaagagtataaaggtgggcgccagcagacgccaccggagctgtcggagcagtttccgctgttgcgcgagctgctgagggcgtatcgcatccccgcctatgaactcgagaactacgaagcggacgatattatcggaacgcttgccgcccgcgctgagcaggaagggtttgaggtgaaagtcatttccggcgaccgcgatctgacccagctcgcctccccccatgtgacggtggacattacgaaaaaagggattaccgatatcgaaccgtacacgccggaggcggtccgcgaaaaatacggcttaactccggaacaaatcgttgatttgaaaggattgatgggcgacaaatcggacaacattcccggagtgccgggcatcggggaaaagacggcggtcaagctgctcaagcaattcggcacggtcgaaaacgtgcttgcctccattgacgagatcaaaggcgaaaagttgaaagaaacgctgcgccaacaccgggagatggcgctgttaagcaaaaagctcgccgccattcgccgcgacgccccggtcgagctctcgcttgatgacatcgtctatcaaggggaagaccgggagaaagtggtcgctttatttaaagagcttgggtttcaatcgtttttagagaaaatggaatcgccgtcatcagaagaggaaaaaccgcttgccaagatggcatttacgcttgctgaccgcgtgacggaggagatgcttgccgacaaggcggcgcttgtcgttgaagtggtcgaggaaaattatcatgatgcgccgatcgtcggcatcgctgtggtcaacgaacatggacggtttttcctgcgcccggagacggcgcttgccgatccgcagtttgtcgcctggcttggtgatgaaacgaagaaaaaaagcatgtttgactcaaagcgcgcggcagtcgccttgaaatggaaaggaattgagctatgcggcgtttcctttgatttattgctggccgcctatttgcttgatccggcgcaaggtgttgatgatgtggctgccgcagcaaaaatgaagcaatacgaagcggtgcgctcggatgaagcggtgtatggcaaaggggcgaagcgggccgtgccggatgagccagtgctcgccgagcatctcgtccgcaaggcggcggcgatttgggcgctcgaacgtccgtttttggatgagctgcgccgcaacgaacaagatcggttgctcgtcgagctcgagcagccgttgtcttcgattttggcggaaatggaatttgccggagtgaaagtggatacgaagcggctcgaacagatgggcgaagagctcgccgagcagctgcgcacggtcgagcagcgcatttatgagctcgccggccaagaattcaacatcaattcaccgaaacagctcggcgtcattttatttgaaaaactgcagctgcccgtcttgaaaaaaacgaaaaccggctactccacttcggcggatgtgcttgaaaaacttgcgccttatcacgagatcgtggaaaacattttgcattaccgcttacttggcaagttgcagtcgacgtatattgaaggattgctgaaagtcgtgcgacccgatacaaagaaggtgcatacgattttcaatcaggcgttgacgcaaaccggacggctcagctcgacggagccgaacttgcaaaacattccgattcggcttgaggaaggacggaaaatccgccaagcgttcgtgccgtcggagtctgattggctcattttcgctgccgactactcgcaaattgagttgcgcgtcctcgcccatattgcggaagatgacaatttaatggaagcgttccgccgcgatttggatatccatacgaaaacagcgatggacattttccaagtgagcgaggacgaagtgacgcccaacatgcgccgtcaggcgaaggcggtcaactttgggatcgtttacgggatcagtgattacggcttggcgcaaaacttaaatatttcacgcaaagaggccgctgaattcatcgagcgctacttcgaaagcttccctggcgtgaagcggtatatggaaaacattgtgcaagaagcaaaacagaaagggtatgtgacgacgctgctgcatcggcgccgctatttgccggatatcacgagccgcaacttcaacgtccgcagctttgctgaacggatggcgatgaacacgccgattcaagggagcgccgctgacattattaaaaaggcgatgatcgatctgaacgctagactgaaggaagagcggctgcaagcgcgccttttgctacaggtgcatgacgagctcattttggaggcgccgaaagaagagatggagcggctgtgccggctcgttccggaagtgatggagcaagcggtcacacttcgcgtgccgctcaaagtcgattaccattatggctcgacgtggtatgacgcgaaataaaaaggatcc

SEQ ID NO: 2639 - DNA, 2712 bp, Artificial Sequence
  Description of Artificial Sequence: Synthetic DNA sequence of Bacillus caldolyticus EA1 DNA polymerase Q603K
atgaaatacctgctgccgaccgctgctgctggtctgctgctcctcgctgcccagccggcgatggccatgggattgaaaaaaaagcttgttttaatcgacggcagcagcgtggcgtaccgcgcctttttcgccttgccgcttttgcataacgacaaaggcatccatacgaacgccgtctacgggtttacgatgatgttgaataaaattttggcggaagaagagccaactcatatgcttgtcgcgtttgacgccgggaaaacgacgttccggcatgaagcgtttcaagagtataaaggtgggcgccagcagacgccaccggagctgtcggagcagtttccgctgttgcgcgagctgctgagggcgtatcgcatccccgcctatgaactcgagaactacgaagcggacgatattatcggaacgcttgccgcccgcgctgagcaggaagggtttgaggtgaaagtcatttccggcgaccgcgatctgacccagctcgcctccccccatgtgacggtggacattacgaaaaaagggattaccgatatcgaaccgtacacgccggaggcggtccgcgaaaaatacggcttaactccggaacaaatcgttgatttgaaaggattgatgggcgacaaatcggacaacattcccggagtgccgggcatcggggaaaagacggcggtcaagctgctcaagcaattcggcacggtcgaaaacgtgcttgcctccattgacgagatcaaaggcgaaaagttgaaagaaacgctgcgccaacaccgggagatggcgctgttaagcaaaaagctcgccgccattcgccgcgacgccccggtcgagctctcgcttgatgacatcgtctatcaaggggaagaccgggagaaagtggtcgctttatttaaagagcttgggtttcaatcgtttttagagaaaatggaatcgccgtcatcagaagaggaaaaaccgcttgccaagatggcatttacgcttgctgaccgcgtgacggaggagatgcttgccgacaaggcggcgcttgtcgttgaagtggtcgaggaaaattatcatgatgcgccgatcgtcggcatcgctgtggtcaacgaacatggacggtttttcctgcgcccggagacggcgcttgccgatccgcagtttgtcgcctggcttggtgatgaaacgaagaaaaaaagcatgtttgactcaaagcgcgcggcagtcgccttgaaatggaaaggaattgagctatgcggcgtttcctttgatttattgctggccgcctatttgcttgatccggcgcaaggtgttgatgatgtggctgccgcagcaaaaatgaagcaatacgaagcggtgcgctcggatgaagcggtgtatggcaaaggggcgaagcgggccgtgccggatgagccagtgctcgccgagcatctcgtccgcaaggcggcggcgatttgggcgctcgaacgtccgtttttggatgagctgcgccgcaacgaacaagatcggttgctcgtcgagctcgagcagccgttgtcttcgattttggcggaaatggaatttgccggagtgaaagtggatacgaagcggctcgaacagatgggcgaagagctcgccgagcagctgcgcacggtcgagcagcgcatttatgagctcgccggccaagaattcaacatcaattcaccgaaacagctcggcgtcattttatttgaaaaactgcagctgcccgtcttgaaaaaaacgaaaaccggctactccacttcggcggatgtgcttgaaaaacttgcgccttatcacgagatcgtggaaaacattttgcattaccgcaaacttggcaagttgcagtcgacgtatattgaaggattgctgaaagtcgtgcgacccgatacaaagaaggtgcatacgattttcaatcaggcgttgacgcaaaccggacggctcagctcgacggagccgaacttgcaaaacattccgattcggcttgaggaaggacggaaaatccgccaagcgttcgtgccgtcggagtctgattggctcattttcgctgccgactactcgcaaattgagttgcgcgtcctcgcccatattgcggaagatgacaatttaatggaagcgttccgccgcgatttggatatccatacgaaaacagcgatggacattttccaagtgagcgaggacgaagtgacgcccaacatgcgccgtcaggcgaaggcggtcaactttgggatcgtttacgggatcagtgattacggcttggcgcaaaacttaaatatttcacgcaaagaggccgctgaattcatcgagcgctacttcgaaagcttccctggcgtgaagcggtatatggaaaacattgtgcaagaagcaaaacagaaagggtatgtgacgacgctgctgcatcggcgccgctatttgccggatatcacgagccgcaacttcaacgtccgcagctttgctgaacggatggcgatgaacacgccgattcaagggagcgccgctgacattattaaaaaggcgatgatcgatctgaacgctagactgaaggaagagcggctgcaagcgcgccttttgctacaggtgcatgacgagctcattttggaggcgccgaaagaagagatggagcggctgtgccggctcgttccggaagtgatggagcaagcggtcacacttcgcgtgccgctcaaagtcgattaccattatggctcgacgtggtatgacgcgaaataaaaaggatcc

SEQ ID NO: 2640 - DNA, 2712 bp, Artificial Sequence
  Description of Artificial Sequence: Synthetic DNA sequence of Bacillus caldolyticus EA1 DNA polymerase Q603E
atgaaatacctgctgccgaccgctgctgctggtctgctgctcctcgctgcccagccggcgatggccatgggattgaaaaaaaagcttgttttaatcgacggcagcagcgtggcgtaccgcgcctttttcgccttgccgcttttgcataacgacaaaggcatccatacgaacgccgtctacgggtttacgatgatgttgaataaaattttggcggaagaagagccaactcatatgcttgtcgcgtttgacgccgggaaaacgacgttccggcatgaagcgtttcaagagtataaaggtgggcgccagcagacgccaccggagctgtcggagcagtttccgctgttgcgcgagctgctgagggcgtatcgcatccccgcctatgaactcgagaactacgaagcggacgatattatcggaacgcttgccgcccgcgctgagcaggaagggtttgaggtgaaagtcatttccggcgaccgcgatctgacccagctcgcctccccccatgtgacggtggacattacgaaaaaagggattaccgatatcgaaccgtacacgccggaggcggtccgcgaaaaatacggcttaactccggaacaaatcgttgatttgaaaggattgatgggcgacaaatcggacaacattcccggagtgccgggcatcggggaaaagacggcggtcaagctgctcaagcaattcggcacggtcgaaaacgtgcttgcctccattgacgagatcaaaggcgaaaagttgaaagaaacgctgcgccaacaccgggagatggcgctgttaagcaaaaagctcgccgccattcgccgcgacgccccggtcgagctctcgcttgatgacatcgtctatcaaggggaagaccgggagaaagtggtcgctttatttaaagagcttgggtttcaatcgtttttagagaaaatggaatcgccgtcatcagaagaggaaaaaccgcttgccaagatggcatttacgcttgctgaccgcgtgacggaggagatgcttgccgacaaggcggcgcttgtcgttgaagtggtcgaggaaaattatcatgatgcgccgatcgtcggcatcgctgtggtcaacgaacatggacggtttttcctgcgcccggagacggcgcttgccgatccgcagtttgtcgcctggcttggtgatgaaacgaagaaaaaaagcatgtttgactcaaagcgcgcggcagtcgccttgaaatggaaaggaattgagctatgcggcgtttcctttgatttattgctggccgcctatttgcttgatccggcgcaaggtgttgatgatgtggctgccgcagcaaaaatgaagcaatacgaagcggtgcgctcggatgaagcggtgtatggcaaaggggcgaagcgggccgtgccggatgagccagtgctcgccgagcatctcgtccgcaaggcggcggcgatttgggcgctcgaacgtccgtttttggatgagctgcgccgcaacgaacaagatcggttgctcgtcgagctcgagcagccgttgtcttcgattttggcggaaatggaatttgccggagtgaaagtggatacgaagcggctcgaacagatgggcgaagagctcgccgagcagctgcgcacggtcgagcagcgcatttatgagctcgccggccaagaattcaacatcaattcaccgaaacagctcggcgtcattttatttgaaaaactgcagctgcccgtcttgaaaaaaacgaaaaccggctactccacttcggcggatgtgcttgaaaaacttgcgccttatcacgagatcgtggaaaacattttgcattaccgcgaacttggcaagttgcagtcgacgtatattgaaggattgctgaaagtcgtgcgacccgatacaaagaaggtgcatacgattttcaatcaggcgttgacgcaaaccggacggctcagctcgacggagccgaacttgcaaaacattccgattcggcttgaggaaggacggaaaatccgccaagcgttcgtgccgtcggagtctgattggctcattttcgctgccgactactcgcaaattgagttgcgcgtcctcgcccatattgcggaagatgacaatttaatggaagcgttccgccgcgatttggatatccatacgaaaacagcgatggacattttccaagtgagcgaggacgaagtgacgcccaacatgcgccgtcaggcgaaggcggtcaactttgggatcgtttacgggatcagtgattacggcttggcgcaaaacttaaatatttcacgcaaagaggccgctgaattcatcgagcgctacttcgaaagcttccctggcgtgaagcggtatatggaaaacattgtgcaagaagcaaaacagaaagggtatgtgacgacgctgctgcatcggcgccgctatttgccggatatcacgagccgcaacttcaacgtccgcagctttgctgaacggatggcgatgaacacgccgattcaagggagcgccgctgacattattaaaaaggcgatgatcgatctgaacgctagactgaaggaagagcggctgcaagcgcgccttttgctacaggtgcatgacgagctcattttggaggcgccgaaagaagagatggagcggctgtgccggctcgttccggaagtgatggagcaagcggtcacacttcgcgtgccgctcaaagtcgattaccattatggctcgacgtggtatgacgcgaaataaaaaggatcc

SEQ ID NO: 2641 - DNA, 2712 bp, Artificial Sequence
  Description of Artificial Sequence: Synthetic DNA sequence of Bacillus caldolyticus EA1 DNA polymerase Q603D
atgaaatacctgctgccgaccgctgctgctggtctgctgctcctcgctgcccagccggcgatggccatgggattgaaaaaaaagcttgttttaatcgacggcagcagcgtggcgtaccgcgcctttttcgccttgccgcttttgcataacgacaaaggcatccatacgaacgccgtctacgggtttacgatgatgttgaataaaattttggcggaagaagagccaactcatatgcttgtcgcgtttgacgccgggaaaacgacgttccggcatgaagcgtttcaagagtataaaggtgggcgccagcagacgccaccggagctgtcggagcagtttccgctgttgcgcgagctgctgagggcgtatcgcatccccgcctatgaactcgagaactacgaagcggacgatattatcggaacgcttgccgcccgcgctgagcaggaagggtttgaggtgaaagtcatttccggcgaccgcgatctgacccagctcgcctccccccatgtgacggtggacattacgaaaaaagggattaccgatatcgaaccgtacacgccggaggcggtccgcgaaaaatacggcttaactccggaacaaatcgttgatttgaaaggattgatgggcgacaaatcggacaacattcccggagtgccgggcatcggggaaaagacggcggtcaagctgctcaagcaattcggcacggtcgaaaacgtgcttgcctccattgacgagatcaaaggcgaaaagttgaaagaaacgctgcgccaacaccgggagatggcgctgttaagcaaaaagctcgccgccattcgccgcgacgccccggtcgagctctcgcttgatgacatcgtctatcaaggggaagaccgggagaaagtggtcgctttatttaaagagcttgggtttcaatcgtttttagagaaaatggaatcgccgtcatcagaagaggaaaaaccgcttgccaagatggcatttacgcttgctgaccgcgtgacggaggagatgcttgccgacaaggcggcgcttgtcgttgaagtggtcgaggaaaattatcatgatgcgccgatcgtcggcatcgctgtggtcaacgaacatggacggtttttcctgcgcccggagacggcgcttgccgatccgcagtttgtcgcctggcttggtgatgaaacgaagaaaaaaagcatgtttgactcaaagcgcgcggcagtcgccttgaaatggaaaggaattgagctatgcggcgtttcctttgatttattgctggccgcctatttgcttgatccggcgcaaggtgttgatgatgtggctgccgcagcaaaaatgaagcaatacgaagcggtgcgctcggatgaagcggtgtatggcaaaggggcgaagcgggccgtgccggatgagccagtgctcgccgagcatctcgtccgcaaggcggcggcgatttgggcgctcgaacgtccgtttttggatgagctgcgccgcaacgaacaagatcggttgctcgtcgagctcgagcagccgttgtcttcgattttggcggaaatggaatttgccggagtgaaagtggatacgaagcggctcgaacagatgggcgaagagctcgccgagcagctgcgcacggtcgagcagcgcatttatgagctcgccggccaagaattcaacatcaattcaccgaaacagctcggcgtcattttatttgaaaaactgcagctgcccgtcttgaaaaaaacgaaaaccggctactccacttcggcggatgtgcttgaaaaacttgcgccttatcacgagatcgtggaaaacattttgcattaccgcgatcttggcaagttgcagtcgacgtatattgaaggattgctgaaagtcgtgcgacccgatacaaagaaggtgcatacgattttcaatcaggcgttgacgcaaaccggacggctcagctcgacggagccgaacttgcaaaacattccgattcggcttgaggaaggacggaaaatccgccaagcgttcgtgccgtcggagtctgattggctcattttcgctgccgactactcgcaaattgagttgcgcgtcctcgcccatattgcggaagatgacaatttaatggaagcgttccgccgcgatttggatatccatacgaaaacagcgatggacattttccaagtgagcgaggacgaagtgacgcccaacatgcgccgtcaggcgaaggcggtcaactttgggatcgtttacgggatcagtgattacggcttggcgcaaaacttaaatatttcacgcaaagaggccgctgaattcatcgagcgctacttcgaaagcttccctggcgtgaagcggtatatggaaaacattgtgcaagaagcaaaacagaaagggtatgtgacgacgctgctgcatcggcgccgctatttgccggatatcacgagccgcaacttcaacgtccgcagctttgctgaacggatggcgatgaacacgccgattcaagggagcgccgctgacattattaaaaaggcgatgatcgatctgaacgctagactgaaggaagagcggctgcaagcgcgccttttgctacaggtgcatgacgagctcattttggaggcgccgaaagaagagatggagcggctgtgccggctcgttccggaagtgatggagcaagcggtcacacttcgcgtgccgctcaaagtcgattaccattatggctcgacgtggtatgacgcgaaataaaaaggatcc

SEQ ID NO: 2642 - DNA, 2712 bp, Artificial Sequence
  Description of Artificial Sequence: Synthetic DNA sequence of Bacillus caldolyticus EA1 DNA polymerase Q603F
atgaaatacctgctgccgaccgctgctgctggtctgctgctcctcgctgcccagccggcgatggccatgggattgaaaaaaaagcttgttttaatcgacggcagcagcgtggcgtaccgcgcctttttcgccttgccgcttttgcataacgacaaaggcatccatacgaacgccgtctacgggtttacgatgatgttgaataaaattttggcggaagaagagccaactcatatgcttgtcgcgtttgacgccgggaaaacgacgttccggcatgaagcgtttcaagagtataaaggtgggcgccagcagacgccaccggagctgtcggagcagtttccgctgttgcgcgagctgctgagggcgtatcgcatccccgcctatgaactcgagaactacgaagcggacgatattatcggaacgcttgccgcccgcgctgagcaggaagggtttgaggtgaaagtcatttccggcgaccgcgatctgacccagctcgcctccccccatgtgacggtggacattacgaaaaaagggattaccgatatcgaaccgtacacgccggaggcggtccgcgaaaaatacggcttaactccggaacaaatcgttgatttgaaaggattgatgggcgacaaatcggacaacattcccggagtgccgggcatcggggaaaagacggcggtcaagctgctcaagcaattcggcacggtcgaaaacgtgcttgcctccattgacgagatcaaaggcgaaaagttgaaagaaacgctgcgccaacaccgggagatggcgctgttaagcaaaaagctcgccgccattcgccgcgacgccccggtcgagctctcgcttgatgacatcgtctatcaaggggaagaccgggagaaagtggtcgctttatttaaagagcttgggtttcaatcgtttttagagaaaatggaatcgccgtcatcagaagaggaaaaaccgcttgccaagatggcatttacgcttgctgaccgcgtgacggaggagatgcttgccgacaaggcggcgcttgtcgttgaagtggtcgaggaaaattatcatgatgcgccgatcgtcggcatcgctgtggtcaacgaacatggacggtttttcctgcgcccggagacggcgcttgccgatccgcagtttgtcgcctggcttggtgatgaaacgaagaaaaaaagcatgtttgactcaaagcgcgcggcagtcgccttgaaatggaaaggaattgagctatgcggcgtttcctttgatttattgctggccgcctatttgcttgatccggcgcaaggtgttgatgatgtggctgccgcagcaaaaatgaagcaatacgaagcggtgcgctcggatgaagcggtgtatggcaaaggggcgaagcgggccgtgccggatgagccagtgctcgccgagcatctcgtccgcaaggcggcggcgatttgggcgctcgaacgtccgtttttggatgagctgcgccgcaacgaacaagatcggttgctcgtcgagctcgagcagccgttgtcttcgattttggcggaaatggaatttgccggagtgaaagtggatacgaagcggctcgaacagatgggcgaagagctcgccgagcagctgcgcacggtcgagcagcgcatttatgagctcgccggccaagaattcaacatcaattcaccgaaacagctcggcgtcattttatttgaaaaactgcagctgcccgtcttgaaaaaaacgaaaaccggctactccacttcggcggatgtgcttgaaaaacttgcgccttatcacgagatcgtggaaaacattttgcattaccgctttcttggcaagttgcagtcgacgtatattgaaggattgctgaaagtcgtgcgacccgatacaaagaaggtgcatacgattttcaatcaggcgttgacgcaaaccggacggctcagctcgacggagccgaacttgcaaaacattccgattcggcttgaggaaggacggaaaatccgccaagcgttcgtgccgtcggagtctgattggctcattttcgctgccgactactcgcaaattgagttgcgcgtcctcgcccatattgcggaagatgacaatttaatggaagcgttccgccgcgatttggatatccatacgaaaacagcgatggacattttccaagtgagcgaggacgaagtgacgcccaacatgcgccgtcaggcgaaggcggtcaactttgggatcgtttacgggatcagtgattacggcttggcgcaaaacttaaatatttcacgcaaagaggccgctgaattcatcgagcgctacttcgaaagcttccctggcgtgaagcggtatatggaaaacattgtgcaagaagcaaaacagaaagggtatgtgacgacgctgctgcatcggcgccgctatttgccggatatcacgagccgcaacttcaacgtccgcagctttgctgaacggatggcgatgaacacgccgattcaagggagcgccgctgacattattaaaaaggcgatgatcgatctgaacgctagactgaaggaagagcggctgcaagcgcgccttttgctacaggtgcatgacgagctcattttggaggcgccgaaagaagagatggagcggctgtgccggctcgttccggaagtgatggagcaagcggtcacacttcgcgtgccgctcaaagtcgattaccattatggctcgacgtggtatgacgcgaaataaaaaggatcc

SEQ ID NO: 2643 - DNA, 2712 bp, Artificial Sequence
  Description of Artificial Sequence: Synthetic DNA sequence of Bacillus caldolyticus EA1 DNA polymerase Q603S
atgaaatacctgctgccgaccgctgctgctggtctgctgctcctcgctgcccagccggcgatggccatgggattgaaaaaaaagcttgttttaatcgacggcagcagcgtggcgtaccgcgcctttttcgccttgccgcttttgcataacgacaaaggcatccatacgaacgccgtctacgggtttacgatgatgttgaataaaattttggcggaagaagagccaactcatatgcttgtcgcgtttgacgccgggaaaacgacgttccggcatgaagcgtttcaagagtataaaggtgggcgccagcagacgccaccggagctgtcggagcagtttccgctgttgcgcgagctgctgagggcgtatcgcatccccgcctatgaactcgagaactacgaagcggacgatattatcggaacgcttgccgcccgcgctgagcaggaagggtttgaggtgaaagtcatttccggcgaccgcgatctgacccagctcgcctccccccatgtgacggtggacattacgaaaaaagggattaccgatatcgaaccgtacacgccggaggcggtccgcgaaaaatacggcttaactccggaacaaatcgttgatttgaaaggattgatgggcgacaaatcggacaacattcccggagtgccgggcatcggggaaaagacggcggtcaagctgctcaagcaattcggcacggtcgaaaacgtgcttgcctccattgacgagatcaaaggcgaaaagttgaaagaaacgctgcgccaacaccgggagatggcgctgttaagcaaaaagctcgccgccattcgccgcgacgccccggtcgagctctcgcttgatgacatcgtctatcaaggggaagaccgggagaaagtggtcgctttatttaaagagcttgggtttcaatcgtttttagagaaaatggaatcgccgtcatcagaagaggaaaaaccgcttgccaagatggcatttacgcttgctgaccgcgtgacggaggagatgcttgccgacaaggcggcgcttgtcgttgaagtggtcgaggaaaattatcatgatgcgccgatcgtcggcatcgctgtggtcaacgaacatggacggtttttcctgcgcccggagacggcgcttgccgatccgcagtttgtcgcctggcttggtgatgaaacgaagaaaaaaagcatgtttgactcaaagcgcgcggcagtcgccttgaaatggaaaggaattgagctatgcggcgtttcctttgatttattgctggccgcctatttgcttgatccggcgcaaggtgttgatgatgtggctgccgcagcaaaaatgaagcaatacgaagcggtgcgctcggatgaagcggtgtatggcaaaggggcgaagcgggccgtgccggatgagccagtgctcgccgagcatctcgtccgcaaggcggcggcgatttgggcgctcgaacgtccgtttttggatgagctgcgccgcaacgaacaagatcggttgctcgtcgagctcgagcagccgttgtcttcgattttggcggaaatggaatttgccggagtgaaagtggatacgaagcggctcgaacagatgggcgaagagctcgccgagcagctgcgcacggtcgagcagcgcatttatgagctcgccggccaagaattcaacatcaattcaccgaaacagctcggcgtcattttatttgaaaaactgcagctgcccgtcttgaaaaaaacgaaaaccggctactccacttcggcggatgtgcttgaaaaacttgcgccttatcacgagatcgtggaaaacattttgcattaccgctctcttggcaagttgcagtcgacgtatattgaaggattgctgaaagtcgtgcgacccgatacaaagaaggtgcatacgattttcaatcaggcgttgacgcaaaccggacggctcagctcgacggagccgaacttgcaaaacattccgattcggcttgaggaaggacggaaaatccgccaagcgttcgtgccgtcggagtctgattggctcattttcgctgccgactactcgcaaattgagttgcgcgtcctcgcccatattgcggaagatgacaatttaatggaagcgttccgccgcgatttggatatccatacgaaaacagcgatggacattttccaagtgagcgaggacgaagtgacgcccaacatgcgccgtcaggcgaaggcggtcaactttgggatcgtttacgggatcagtgattacggcttggcgcaaaacttaaatatttcacgcaaagaggccgctgaattcatcgagcgctacttcgaaagcttccctggcgtgaagcggtatatggaaaacattgtgcaagaagcaaaacagaaagggtatgtgacgacgctgctgcatcggcgccgctatttgccggatatcacgagccgcaacttcaacgtccgcagctttgctgaacggatggcgatgaacacgccgattcaagggagcgccgctgacattattaaaaaggcgatgatcgatctgaacgctagactgaaggaagagcggctgcaagcgcgccttttgctacaggtgcatgacgagctcattttggaggcgccgaaagaagagatggagcggctgtgccggctcgttccggaagtgatggagcaagcggtcacacttcgcgtgccgctcaaagtcgattaccattatggctcgacgtggtatgacgcgaaataaaaaggatcc

SEQ ID NO: 2644 - DNA, 2712 bp, Artificial Sequence
  Description of Artificial Sequence: Synthetic DNA sequence of Bacillus caldolyticus EA1 DNA polymerase Q603Y
atgaaatacctgctgccgaccgctgctgctggtctgctgctcctcgctgcccagccggcgatggccatgggattgaaaaaaaagcttgttttaatcgacggcagcagcgtggcgtaccgcgcctttttcgccttgccgcttttgcataacgacaaaggcatccatacgaacgccgtctacgggtttacgatgatgttgaataaaattttggcggaagaagagccaactcatatgcttgtcgcgtttgacgccgggaaaacgacgttccggcatgaagcgtttcaagagtataaaggtgggcgccagcagacgccaccggagctgtcggagcagtttccgctgttgcgcgagctgctgagggcgtatcgcatccccgcctatgaactcgagaactacgaagcggacgatattatcggaacgcttgccgcccgcgctgagcaggaagggtttgaggtgaaagtcatttccggcgaccgcgatctgacccagctcgcctccccccatgtgacggtggacattacgaaaaaagggattaccgatatcgaaccgtacacgccggaggcggtccgcgaaaaatacggcttaactccggaacaaatcgttgatttgaaaggattgatgggcgacaaatcggacaacattcccggagtgccgggcatcggggaaaagacggcggtcaagctgctcaagcaattcggcacggtcgaaaacgtgcttgcctccattgacgagatcaaaggcgaaaagttgaaagaaacgctgcgccaacaccgggagatggcgctgttaagcaaaaagctcgccgccattcgccgcgacgccccggtcgagctctcgcttgatgacatcgtctatcaaggggaagaccgggagaaagtggtcgctttatttaaagagcttgggtttcaatcgtttttagagaaaatggaatcgccgtcatcagaagaggaaaaaccgcttgccaagatggcatttacgcttgctgaccgcgtgacggaggagatgcttgccgacaaggcggcgcttgtcgttgaagtggtcgaggaaaattatcatgatgcgccgatcgtcggcatcgctgtggtcaacgaacatggacggtttttcctgcgcccggagacggcgcttgccgatccgcagtttgtcgcctggcttggtgatgaaacgaagaaaaaaagcatgtttgactcaaagcgcgcggcagtcgccttgaaatggaaaggaattgagctatgcggcgtttcctttgatttattgctggccgcctatttgcttgatccggcgcaaggtgttgatgatgtggctgccgcagcaaaaatgaagcaatacgaagcggtgcgctcggatgaagcggtgtatggcaaaggggcgaagcgggccgtgccggatgagccagtgctcgccgagcatctcgtccgcaaggcggcggcgatttgggcgctcgaacgtccgtttttggatgagctgcgccgcaacgaacaagatcggttgctcgtcgagctcgagcagccgttgtcttcgattttggcggaaatggaatttgccggagtgaaagtggatacgaagcggctcgaacagatgggcgaagagctcgccgagcagctgcgcacggtcgagcagcgcatttatgagctcgccggccaagaattcaacatcaattcaccgaaacagctcggcgtcattttatttgaaaaactgcagctgcccgtcttgaaaaaaacgaaaaccggctactccacttcggcggatgtgcttgaaaaacttgcgccttatcacgagatcgtggaaaacattttgcattaccgctatcttggcaagttgcagtcgacgtatattgaaggattgctgaaagtcgtgcgacccgatacaaagaaggtgcatacgattttcaatcaggcgttgacgcaaaccggacggctcagctcgacggagccgaacttgcaaaacattccgattcggcttgaggaaggacggaaaatccgccaagcgttcgtgccgtcggagtctgattggctcattttcgctgccgactactcgcaaattgagttgcgcgtcctcgcccatattgcggaagatgacaatttaatggaagcgttccgccgcgatttggatatccatacgaaaacagcgatggacattttccaagtgagcgaggacgaagtgacgcccaacatgcgccgtcaggcgaaggcggtcaactttgggatcgtttacgggatcagtgattacggcttggcgcaaaacttaaatatttcacgcaaagaggccgctgaattcatcgagcgctacttcgaaagcttccctggcgtgaagcggtatatggaaaacattgtgcaagaagcaaaacagaaagggtatgtgacgacgctgctgcatcggcgccgctatttgccggatatcacgagccgcaacttcaacgtccgcagctttgctgaacggatggcgatgaacacgccgattcaagggagcgccgctgacattattaaaaaggcgatgatcgatctgaacgctagactgaaggaagagcggctgcaagcgcgccttttgctacaggtgcatgacgagctcattttggaggcgccgaaagaagagatggagcggctgtgccggctcgttccggaagtgatggagcaagcggtcacacttcgcgtgccgctcaaagtcgattaccattatggctcgacgtggtatgacgcgaaataaaaaggatcc

SEQ ID NO: 2645 - DNA, 2712 bp, Artificial Sequence
  Description of Artificial Sequence: Synthetic DNA sequence of Bacillus caldolyticus EA1 DNA polymerase Q603W
atgaaatacctgctgccgaccgctgctgctggtctgctgctcctcgctgcccagccggcgatggccatgggattgaaaaaaaagcttgttttaatcgacggcagcagcgtggcgtaccgcgcctttttcgccttgccgcttttgcataacgacaaaggcatccatacgaacgccgtctacgggtttacgatgatgttgaataaaattttggcggaagaagagccaactcatatgcttgtcgcgtttgacgccgggaaaacgacgttccggcatgaagcgtttcaagagtataaaggtgggcgccagcagacgccaccggagctgtcggagcagtttccgctgttgcgcgagctgctgagggcgtatcgcatccccgcctatgaactcgagaactacgaagcggacgatattatcggaacgcttgccgcccgcgctgagcaggaagggtttgaggtgaaagtcatttccggcgaccgcgatctgacccagctcgcctccccccatgtgacggtggacattacgaaaaaagggattaccgatatcgaaccgtacacgccggaggcggtccgcgaaaaatacggcttaactccggaacaaatcgttgatttgaaaggattgatgggcgacaaatcggacaacattcccggagtgccgggcatcggggaaaagacggcggtcaagctgctcaagcaattcggcacggtcgaaaacgtgcttgcctccattgacgagatcaaaggcgaaaagttgaaagaaacgctgcgccaacaccgggagatggcgctgttaagcaaaaagctcgccgccattcgccgcgacgccccggtcgagctctcgcttgatgacatcgtctatcaaggggaagaccgggagaaagtggtcgctttatttaaagagcttgggtttcaatcgtttttagagaaaatggaatcgccgtcatcagaagaggaaaaaccgcttgccaagatggcatttacgcttgctgaccgcgtgacggaggagatgcttgccgacaaggcggcgcttgtcgttgaagtggtcgaggaaaattatcatgatgcgccgatcgtcggcatcgctgtggtcaacgaacatggacggtttttcctgcgcccggagacggcgcttgccgatccgcagtttgtcgcctggcttggtgatgaaacgaagaaaaaaagcatgtttgactcaaagcgcgcggcagtcgccttgaaatggaaaggaattgagctatgcggcgtttcctttgatttattgctggccgcctatttgcttgatccggcgcaaggtgttgatgatgtggctgccgcagcaaaaatgaagcaatacgaagcggtgcgctcggatgaagcggtgtatggcaaaggggcgaagcgggccgtgccggatgagccagtgctcgccgagcatctcgtccgcaaggcggcggcgatttgggcgctcgaacgtccgtttttggatgagctgcgccgcaacgaacaagatcggttgctcgtcgagctcgagcagccgttgtcttcgattttggcggaaatggaatttgccggagtgaaagtggatacgaagcggctcgaacagatgggcgaagagctcgccgagcagctgcgcacggtcgagcagcgcatttatgagctcgccggccaagaattcaacatcaattcaccgaaacagctcggcgtcattttatttgaaaaactgcagctgcccgtcttgaaaaaaacgaaaaccggctactccacttcggcggatgtgcttgaaaaacttgcgccttatcacgagatcgtggaaaacattttgcattaccgctggcttggcaagttgcagtcgacgtatattgaaggattgctgaaagtcgtgcgacccgatacaaagaaggtgcatacgattttcaatcaggcgttgacgcaaaccggacggctcagctcgacggagccgaacttgcaaaacattccgattcggcttgaggaaggacggaaaatccgccaagcgttcgtgccgtcggagtctgattggctcattttcgctgccgactactcgcaaattgagttgcgcgtcctcgcccatattgcggaagatgacaatttaatggaagcgttccgccgcgatttggatatccatacgaaaacagcgatggacattttccaagtgagcgaggacgaagtgacgcccaacatgcgccgtcaggcgaaggcggtcaactttgggatcgtttacgggatcagtgattacggcttggcgcaaaacttaaatatttcacgcaaagaggccgctgaattcatcgagcgctacttcgaaagcttccctggcgtgaagcggtatatggaaaacattgtgcaagaagcaaaacagaaagggtatgtgacgacgctgctgcatcggcgccgctatttgccggatatcacgagccgcaacttcaacgtccgcagctttgctgaacggatggcgatgaacacgccgattcaagggagcgccgctgacattattaaaaaggcgatgatcgatctgaacgctagactgaaggaagagcggctgcaagcgcgccttttgctacaggtgcatgacgagctcattttggaggcgccgaaagaagagatggagcggctgtgccggctcgttccggaagtgatggagcaagcggtcacacttcgcgtgccgctcaaagtcgattaccattatggctcgacgtggtatgacgcgaaataaaaaggatcc

SEQ ID NO: 2646 - DNA, 2712 bp, Artificial Sequence
  Description of Artificial Sequence: Synthetic DNA sequence of Bacillus caldolyticus EA1 DNA polymerase Q603P
atgaaatacctgctgccgaccgctgctgctggtctgctgctcctcgctgcccagccggcgatggccatgggattgaaaaaaaagcttgttttaatcgacggcagcagcgtggcgtaccgcgcctttttcgccttgccgcttttgcataacgacaaaggcatccatacgaacgccgtctacgggtttacgatgatgttgaataaaattttggcggaagaagagccaactcatatgcttgtcgcgtttgacgccgggaaaacgacgttccggcatgaagcgtttcaagagtataaaggtgggcgccagcagacgccaccggagctgtcggagcagtttccgctgttgcgcgagctgctgagggcgtatcgcatccccgcctatgaactcgagaactacgaagcggacgatattatcggaacgcttgccgcccgcgctgagcaggaagggtttgaggtgaaagtcatttccggcgaccgcgatctgacccagctcgcctccccccatgtgacggtggacattacgaaaaaagggattaccgatatcgaaccgtacacgccggaggcggtccgcgaaaaatacggcttaactccggaacaaatcgttgatttgaaaggattgatgggcgacaaatcggacaacattcccggagtgccgggcatcggggaaaagacggcggtcaagctgctcaagcaattcggcacggtcgaaaacgtgcttgcctccattgacgagatcaaaggcgaaaagttgaaagaaacgctgcgccaacaccgggagatggcgctgttaagcaaaaagctcgccgccattcgccgcgacgccccggtcgagctctcgcttgatgacatcgtctatcaaggggaagaccgggagaaagtggtcgctttatttaaagagcttgggtttcaatcgtttttagagaaaatggaatcgccgtcatcagaagaggaaaaaccgcttgccaagatggcatttacgcttgctgaccgcgtgacggaggagatgcttgccgacaaggcggcgcttgtcgttgaagtggtcgaggaaaattatcatgatgcgccgatcgtcggcatcgctgtggtcaacgaacatggacggtttttcctgcgcccggagacggcgcttgccgatccgcagtttgtcgcctggcttggtgatgaaacgaagaaaaaaagcatgtttgactcaaagcgcgcggcagtcgccttgaaatggaaaggaattgagctatgcggcgtttcctttgatttattgctggccgcctatttgcttgatccggcgcaaggtgttgatgatgtggctgccgcagcaaaaatgaagcaatacgaagcggtgcgctcggatgaagcggtgtatggcaaaggggcgaagcgggccgtgccggatgagccagtgctcgccgagcatctcgtccgcaaggcggcggcgatttgggcgctcgaacgtccgtttttggatgagctgcgccgcaacgaacaagatcggttgctcgtcgagctcgagcagccgttgtcttcgattttggcggaaatggaatttgccggagtgaaagtggatacgaagcggctcgaacagatgggcgaagagctcgccgagcagctgcgcacggtcgagcagcgcatttatgagctcgccggccaagaattcaacatcaattcaccgaaacagctcggcgtcattttatttgaaaaactgcagctgcccgtcttgaaaaaaacgaaaaccggctactccacttcggcggatgtgcttgaaaaacttgcgccttatcacgagatcgtggaaaacattttgcattaccgccctcttggcaagttgcagtcgacgtatattgaaggattgctgaaagtcgtgcgacccgatacaaagaaggtgcatacgattttcaatcaggcgttgacgcaaaccggacggctcagctcgacggagccgaacttgcaaaacattccgattcggcttgaggaaggacggaaaatccgccaagcgttcgtgccgtcggagtctgattggctcattttcgctgccgactactcgcaaattgagttgcgcgtcctcgcccatattgcggaagatgacaatttaatggaagcgttccgccgcgatttggatatccatacgaaaacagcgatggacattttccaagtgagcgaggacgaagtgacgcccaacatgcgccgtcaggcgaaggcggtcaactttgggatcgtttacgggatcagtgattacggcttggcgcaaaacttaaatatttcacgcaaagaggccgctgaattcatcgagcgctacttcgaaagcttccctggcgtgaagcggtatatggaaaacattgtgcaagaagcaaaacagaaagggtatgtgacgacgctgctgcatcggcgccgctatttgccggatatcacgagccgcaacttcaacgtccgcagctttgctgaacggatggcgatgaacacgccgattcaagggagcgccgctgacattattaaaaaggcgatgatcgatctgaacgctagactgaaggaagagcggctgcaagcgcgccttttgctacaggtgcatgacgagctcattttggaggcgccgaaagaagagatggagcggctgtgccggctcgttccggaagtgatggagcaagcggtcacacttcgcgtgccgctcaaagtcgattaccattatggctcgacgtggtatgacgcgaaataaaaaggatcc

SEQ ID NO: 2647 - DNA, 2712 bp, Artificial Sequence
  Description of Artificial Sequence: Synthetic DNA sequence of Bacillus caldolyticus EA1 DNA polymerase Q603M
atgaaatacctgctgccgaccgctgctgctggtctgctgctcctcgctgcccagccggcgatggccatgggattgaaaaaaaagcttgttttaatcgacggcagcagcgtggcgtaccgcgcctttttcgccttgccgcttttgcataacgacaaaggcatccatacgaacgccgtctacgggtttacgatgatgttgaataaaattttggcggaagaagagccaactcatatgcttgtcgcgtttgacgccgggaaaacgacgttccggcatgaagcgtttcaagagtataaaggtgggcgccagcagacgccaccggagctgtcggagcagtttccgctgttgcgcgagctgctgagggcgtatcgcatccccgcctatgaactcgagaactacgaagcggacgatattatcggaacgcttgccgcccgcgctgagcaggaagggtttgaggtgaaagtcatttccggcgaccgcgatctgacccagctcgcctccccccatgtgacggtggacattacgaaaaaagggattaccgatatcgaaccgtacacgccggaggcggtccgcgaaaaatacggcttaactccggaacaaatcgttgatttgaaaggattgatgggcgacaaatcggacaacattcccggagtgccgggcatcggggaaaagacggcggtcaagctgctcaagcaattcggcacggtcgaaaacgtgcttgcctccattgacgagatcaaaggcgaaaagttgaaagaaacgctgcgccaacaccgggagatggcgctgttaagcaaaaagctcgccgccattcgccgcgacgccccggtcgagctctcgcttgatgacatcgtctatcaaggggaagaccgggagaaagtggtcgctttatttaaagagcttgggtttcaatcgtttttagagaaaatggaatcgccgtcatcagaagaggaaaaaccgcttgccaagatggcatttacgcttgctgaccgcgtgacggaggagatgcttgccgacaaggcggcgcttgtcgttgaagtggtcgaggaaaattatcatgatgcgccgatcgtcggcatcgctgtggtcaacgaacatggacggtttttcctgcgcccggagacggcgcttgccgatccgcagtttgtcgcctggcttggtgatgaaacgaagaaaaaaagcatgtttgactcaaagcgcgcggcagtcgccttgaaatggaaaggaattgagctatgcggcgtttcctttgatttattgctggccgcctatttgcttgatccggcgcaaggtgttgatgatgtggctgccgcagcaaaaatgaagcaatacgaagcggtgcgctcggatgaagcggtgtatggcaaaggggcgaagcgggccgtgccggatgagccagtgctcgccgagcatctcgtccgcaaggcggcggcgatttgggcgctcgaacgtccgtttttggatgagctgcgccgcaacgaacaagatcggttgctcgtcgagctcgagcagccgttgtcttcgattttggcggaaatggaatttgccggagtgaaagtggatacgaagcggctcgaacagatgggcgaagagctcgccgagcagctgcgcacggtcgagcagcgcatttatgagctcgccggccaagaattcaacatcaattcaccgaaacagctcggcgtcattttatttgaaaaactgcagctgcccgtcttgaaaaaaacgaaaaccggctactccacttcggcggatgtgcttgaaaaacttgcgccttatcacgagatcgtggaaaacattttgcattaccgcatgcttggcaagttgcagtcgacgtatattgaaggattgctgaaagtcgtgcgacccgatacaaagaaggtgcatacgattttcaatcaggcgttgacgcaaaccggacggctcagctcgacggagccgaacttgcaaaacattccgattcggcttgaggaaggacggaaaatccgccaagcgttcgtgccgtcggagtctgattggctcattttcgctgccgactactcgcaaattgagttgcgcgtcctcgcccatattgcggaagatgacaatttaatggaagcgttccgccgcgatttggatatccatacgaaaacagcgatggacattttccaagtgagcgaggacgaagtgacgcccaacatgcgccgtcaggcgaaggcggtcaactttgggatcgtttacgggatcagtgattacggcttggcgcaaaacttaaatatttcacgcaaagaggccgctgaattcatcgagcgctacttcgaaagcttccctggcgtgaagcggtatatggaaaacattgtgcaagaagcaaaacagaaagggtatgtgacgacgctgctgcatcggcgccgctatttgccggatatcacgagccgcaacttcaacgtccgcagctttgctgaacggatggcgatgaacacgccgattcaagggagcgccgctgacattattaaaaaggcgatgatcgatctgaacgctagactgaaggaagagcggctgcaagcgcgccttttgctacaggtgcatgacgagctcattttggaggcgccgaaagaagagatggagcggctgtgccggctcgttccggaagtgatggagcaagcggtcacacttcgcgtgccgctcaaagtcgattaccattatggctcgacgtggtatgacgcgaaataaaaaggatcc

SEQ ID NO: 2648 - DNA, 2712 bp, Artificial Sequence
  Description of Artificial Sequence: Synthetic DNA sequence of Bacillus caldolyticus EA1 DNA polymerase Q603T
atgaaatacctgctgccgaccgctgctgctggtctgctgctcctcgctgcccagccggcgatggccatgggattgaaaaaaaagcttgttttaatcgacggcagcagcgtggcgtaccgcgcctttttcgccttgccgcttttgcataacgacaaaggcatccatacgaacgccgtctacgggtttacgatgatgttgaataaaattttggcggaagaagagccaactcatatgcttgtcgcgtttgacgccgggaaaacgacgttccggcatgaagcgtttcaagagtataaaggtgggcgccagcagacgccaccggagctgtcggagcagtttccgctgttgcgcgagctgctgagggcgtatcgcatccccgcctatgaactcgagaactacgaagcggacgatattatcggaacgcttgccgcccgcgctgagcaggaagggtttgaggtgaaagtcatttccggcgaccgcgatctgacccagctcgcctccccccatgtgacggtggacattacgaaaaaagggattaccgatatcgaaccgtacacgccggaggcggtccgcgaaaaatacggcttaactccggaacaaatcgttgatttgaaaggattgatgggcgacaaatcggacaacattcccggagtgccgggcatcggggaaaagacggcggtcaagctgctcaagcaattcggcacggtcgaaaacgtgcttgcctccattgacgagatcaaaggcgaaaagttgaaagaaacgctgcgccaacaccgggagatggcgctgttaagcaaaaagctcgccgccattcgccgcgacgccccggtcgagctctcgcttgatgacatcgtctatcaaggggaagaccgggagaaagtggtcgctttatttaaagagcttgggtttcaatcgtttttagagaaaatggaatcgccgtcatcagaagaggaaaaaccgcttgccaagatggcatttacgcttgctgaccgcgtgacggaggagatgcttgccgacaaggcggcgcttgtcgttgaagtggtcgaggaaaattatcatgatgcgccgatcgtcggcatcgctgtggtcaacgaacatggacggtttttcctgcgcccggagacggcgcttgccgatccgcagtttgtcgcctggcttggtgatgaaacgaagaaaaaaagcatgtttgactcaaagcgcgcggcagtcgccttgaaatggaaaggaattgagctatgcggcgtttcctttgatttattgctggccgcctatttgcttgatccggcgcaaggtgttgatgatgtggctgccgcagcaaaaatgaagcaatacgaagcggtgcgctcggatgaagcggtgtatggcaaaggggcgaagcgggccgtgccggatgagccagtgctcgccgagcatctcgtccgcaaggcggcggcgatttgggcgctcgaacgtccgtttttggatgagctgcgccgcaacgaacaagatcggttgctcgtcgagctcgagcagccgttgtcttcgattttggcggaaatggaatttgccggagtgaaagtggatacgaagcggctcgaacagatgggcgaagagctcgccgagcagctgcgcacggtcgagcagcgcatttatgagctcgccggccaagaattcaacatcaattcaccgaaacagctcggcgtcattttatttgaaaaactgcagctgcccgtcttgaaaaaaacgaaaaccggctactccacttcggcggatgtgcttgaaaaacttgcgccttatcacgagatcgtggaaaacattttgcattaccgcactcttggcaagttgcagtcgacgtatattgaaggattgctgaaagtcgtgcgacccgatacaaagaaggtgcatacgattttcaatcaggcgttgacgcaaaccggacggctcagctcgacggagccgaacttgcaaaacattccgattcggcttgaggaaggacggaaaatccgccaagcgttcgtgccgtcggagtctgattggctcattttcgctgccgactactcgcaaattgagttgcgcgtcctcgcccatattgcggaagatgacaatttaatggaagcgttccgccgcgatttggatatccatacgaaaacagcgatggacattttccaagtgagcgaggacgaagtgacgcccaacatgcgccgtcaggcgaaggcggtcaactttgggatcgtttacgggatcagtgattacggcttggcgcaaaacttaaatatttcacgcaaagaggccgctgaattcatcgagcgctacttcgaaagcttccctggcgtgaagcggtatatggaaaacattgtgcaagaagcaaaacagaaagggtatgtgacgacgctgctgcatcggcgccgctatttgccggatatcacgagccgcaacttcaacgtccgcagctttgctgaacggatggcgatgaacacgccgattcaagggagcgccgctgacattattaaaaaggcgatgatcgatctgaacgctagactgaaggaagagcggctgcaagcgcgccttttgctacaggtgcatgacgagctcattttggaggcgccgaaagaagagatggagcggctgtgccggctcgttccggaagtgatggagcaagcggtcacacttcgcgtgccgctcaaagtcgattaccattatggctcgacgtggtatgacgcgaaataaaaaggatcc

SEQ ID NO: 2649 - DNA, 2712 bp, Artificial Sequence
  Description of Artificial Sequence: Synthetic DNA sequence of Bacillus caldolyticus EA1 DNA polymerase Q603N
atgaaatacctgctgccgaccgctgctgctggtctgctgctcctcgctgcccagccggcgatggccatgggattgaaaaaaaagcttgttttaatcgacggcagcagcgtggcgtaccgcgcctttttcgccttgccgcttttgcataacgacaaaggcatccatacgaacgccgtctacgggtttacgatgatgttgaataaaattttggcggaagaagagccaactcatatgcttgtcgcgtttgacgccgggaaaacgacgttccggcatgaagcgtttcaagagtataaaggtgggcgccagcagacgccaccggagctgtcggagcagtttccgctgttgcgcgagctgctgagggcgtatcgcatccccgcctatgaactcgagaactacgaagcggacgatattatcggaacgcttgccgcccgcgctgagcaggaagggtttgaggtgaaagtcatttccggcgaccgcgatctgacccagctcgcctccccccatgtgacggtggacattacgaaaaaagggattaccgatatcgaaccgtacacgccggaggcggtccgcgaaaaatacggcttaactccggaacaaatcgttgatttgaaaggattgatgggcgacaaatcggacaacattcccggagtgccgggcatcggggaaaagacggcggtcaagctgctcaagcaattcggcacggtcgaaaacgtgcttgcctccattgacgagatcaaaggcgaaaagttgaaagaaacgctgcgccaacaccgggagatggcgctgttaagcaaaaagctcgccgccattcgccgcgacgccccggtcgagctctcgcttgatgacatcgtctatcaaggggaagaccgggagaaagtggtcgctttatttaaagagcttgggtttcaatcgtttttagagaaaatggaatcgccgtcatcagaagaggaaaaaccgcttgccaagatggcatttacgcttgctgaccgcgtgacggaggagatgcttgccgacaaggcggcgcttgtcgttgaagtggtcgaggaaaattatcatgatgcgccgatcgtcggcatcgctgtggtcaacgaacatggacggtttttcctgcgcccggagacggcgcttgccgatccgcagtttgtcgcctggcttggtgatgaaacgaagaaaaaaagcatgtttgactcaaagcgcgcggcagtcgccttgaaatggaaaggaattgagctatgcggcgtttcctttgatttattgctggccgcctatttgcttgatccggcgcaaggtgttgatgatgtggctgccgcagcaaaaatgaagcaatacgaagcggtgcgctcggatgaagcggtgtatggcaaaggggcgaagcgggccgtgccggatgagccagtgctcgccgagcatctcgtccgcaaggcggcggcgatttgggcgctcgaacgtccgtttttggatgagctgcgccgcaacgaacaagatcggttgctcgtcgagctcgagcagccgttgtcttcgattttggcggaaatggaatttgccggagtgaaagtggatacgaagcggctcgaacagatgggcgaagagctcgccgagcagctgcgcacggtcgagcagcgcatttatgagctcgccggccaagaattcaacatcaattcaccgaaacagctcggcgtcattttatttgaaaaactgcagctgcccgtcttgaaaaaaacgaaaaccggctactccacttcggcggatgtgcttgaaaaacttgcgccttatcacgagatcgtggaaaacattttgcattaccgcaatcttggcaagttgcagtcgacgtatattgaaggattgctgaaagtcgtgcgacccgatacaaagaaggtgcatacgattttcaatcaggcgttgacgcaaaccggacggctcagctcgacggagccgaacttgcaaaacattccgattcggcttgaggaaggacggaaaatccgccaagcgttcgtgccgtcggagtctgattggctcattttcgctgccgactactcgcaaattgagttgcgcgtcctcgcccatattgcggaagatgacaatttaatggaagcgttccgccgcgatttggatatccatacgaaaacagcgatggacattttccaagtgagcgaggacgaagtgacgcccaacatgcgccgtcaggcgaaggcggtcaactttgggatcgtttacgggatcagtgattacggcttggcgcaaaacttaaatatttcacgcaaagaggccgctgaattcatcgagcgctacttcgaaagcttccctggcgtgaagcggtatatggaaaacattgtgcaagaagcaaaacagaaagggtatgtgacgacgctgctgcatcggcgccgctatttgccggatatcacgagccgcaacttcaacgtccgcagctttgctgaacggatggcgatgaacacgccgattcaagggagcgccgctgacattattaaaaaggcgatgatcgatctgaacgctagactgaaggaagagcggctgcaagcgcgccttttgctacaggtgcatgacgagctcattttggaggcgccgaaagaagagatggagcggctgtgccggctcgttccggaagtgatggagcaagcggtcacacttcgcgtgccgctcaaagtcgattaccattatggctcgacgtggtatgacgcgaaataaaaaggatcc

SEQ ID NO: 2650 - DNA, 2712 bp, Artificial Sequence
  Description of Artificial Sequence: Synthetic DNA sequence of Bacillus caldolyticus EA1 DNA polymerase Q603V
atgaaatacctgctgccgaccgctgctgctggtctgctgctcctcgctgcccagccggcgatggccatgggattgaaaaaaaagcttgttttaatcgacggcagcagcgtggcgtaccgcgcctttttcgccttgccgcttttgcataacgacaaaggcatccatacgaacgccgtctacgggtttacgatgatgttgaataaaattttggcggaagaagagccaactcatatgcttgtcgcgtttgacgccgggaaaacgacgttccggcatgaagcgtttcaagagtataaaggtgggcgccagcagacgccaccggagctgtcggagcagtttccgctgttgcgcgagctgctgagggcgtatcgcatccccgcctatgaactcgagaactacgaagcggacgatattatcggaacgcttgccgcccgcgctgagcaggaagggtttgaggtgaaagtcatttccggcgaccgcgatctgacccagctcgcctccccccatgtgacggtggacattacgaaaaaagggattaccgatatcgaaccgtacacgccggaggcggtccgcgaaaaatacggcttaactccggaacaaatcgttgatttgaaaggattgatgggcgacaaatcggacaacattcccggagtgccgggcatcggggaaaagacggcggtcaagctgctcaagcaattcggcacggtcgaaaacgtgcttgcctccattgacgagatcaaaggcgaaaagttgaaagaaacgctgcgccaacaccgggagatggcgctgttaagcaaaaagctcgccgccattcgccgcgacgccccggtcgagctctcgcttgatgacatcgtctatcaaggggaagaccgggagaaagtggtcgctttatttaaagagcttgggtttcaatcgtttttagagaaaatggaatcgccgtcatcagaagaggaaaaaccgcttgccaagatggcatttacgcttgctgaccgcgtgacggaggagatgcttgccgacaaggcggcgcttgtcgttgaagtggtcgaggaaaattatcatgatgcgccgatcgtcggcatcgctgtggtcaacgaacatggacggtttttcctgcgcccggagacggcgcttgccgatccgcagtttgtcgcctggcttggtgatgaaacgaagaaaaaaagcatgtttgactcaaagcgcgcggcagtcgccttgaaatggaaaggaattgagctatgcggcgtttcctttgatttattgctggccgcctatttgcttgatccggcgcaaggtgttgatgatgtggctgccgcagcaaaaatgaagcaatacgaagcggtgcgctcggatgaagcggtgtatggcaaaggggcgaagcgggccgtgccggatgagccagtgctcgccgagcatctcgtccgcaaggcggcggcgatttgggcgctcgaacgtccgtttttggatgagctgcgccgcaacgaacaagatcggttgctcgtcgagctcgagcagccgttgtcttcgattttggcggaaatggaatttgccggagtgaaagtggatacgaagcggctcgaacagatgggcgaagagctcgccgagcagctgcgcacggtcgagcagcgcatttatgagctcgccggccaagaattcaacatcaattcaccgaaacagctcggcgtcattttatttgaaaaactgcagctgcccgtcttgaaaaaaacgaaaaccggctactccacttcggcggatgtgcttgaaaaacttgcgccttatcacgagatcgtggaaaacattttgcattaccgcgtccttggcaagttgcagtcgacgtatattgaaggattgctgaaagtcgtgcgacccgatacaaagaaggtgcatacgattttcaatcaggcgttgacgcaaaccggacggctcagctcgacggagccgaacttgcaaaacattccgattcggcttgaggaaggacggaaaatccgccaagcgttcgtgccgtcggagtctgattggctcattttcgctgccgactactcgcaaattgagttgcgcgtcctcgcccatattgcggaagatgacaatttaatggaagcgttccgccgcgatttggatatccatacgaaaacagcgatggacattttccaagtgagcgaggacgaagtgacgcccaacatgcgccgtcaggcgaaggcggtcaactttgggatcgtttacgggatcagtgattacggcttggcgcaaaacttaaatatttcacgcaaagaggccgctgaattcatcgagcgctacttcgaaagcttccctggcgtgaagcggtatatggaaaacattgtgcaagaagcaaaacagaaagggtatgtgacgacgctgctgcatcggcgccgctatttgccggatatcacgagccgcaacttcaacgtccgcagctttgctgaacggatggcgatgaacacgccgattcaagggagcgccgctgacattattaaaaaggcgatgatcgatctgaacgctagactgaaggaagagcggctgcaagcgcgccttttgctacaggtgcatgacgagctcattttggaggcgccgaaagaagagatggagcggctgtgccggctcgttccggaagtgatggagcaagcggtcacacttcgcgtgccgctcaaagtcgattaccattatggctcgacgtggtatgacgcgaaataaaaaggatcc

SEQ ID NO: 2651 - DNA, 2712 bp, Artificial Sequence
  Description of Artificial Sequence: Synthetic DNA sequence of Bacillus caldolyticus EA1 DNA polymerase L634A
atgaaatacctgctgccgaccgctgctgctggtctgctgctcctcgctgcccagccggcgatggccatgggattgaaaaaaaagcttgttttaatcgacggcagcagcgtggcgtaccgcgcctttttcgccttgccgcttttgcataacgacaaaggcatccatacgaacgccgtctacgggtttacgatgatgttgaataaaattttggcggaagaagagccaactcatatgcttgtcgcgtttgacgccgggaaaacgacgttccggcatgaagcgtttcaagagtataaaggtgggcgccagcagacgccaccggagctgtcggagcagtttccgctgttgcgcgagctgctgagggcgtatcgcatccccgcctatgaactcgagaactacgaagcggacgatattatcggaacgcttgccgcccgcgctgagcaggaagggtttgaggtgaaagtcatttccggcgaccgcgatctgacccagctcgcctccccccatgtgacggtggacattacgaaaaaagggattaccgatatcgaaccgtacacgccggaggcggtccgcgaaaaatacggcttaactccggaacaaatcgttgatttgaaaggattgatgggcgacaaatcggacaacattcccggagtgccgggcatcggggaaaagacggcggtcaagctgctcaagcaattcggcacggtcgaaaacgtgcttgcctccattgacgagatcaaaggcgaaaagttgaaagaaacgctgcgccaacaccgggagatggcgctgttaagcaaaaagctcgccgccattcgccgcgacgccccggtcgagctctcgcttgatgacatcgtctatcaaggggaagaccgggagaaagtggtcgctttatttaaagagcttgggtttcaatcgtttttagagaaaatggaatcgccgtcatcagaagaggaaaaaccgcttgccaagatggcatttacgcttgctgaccgcgtgacggaggagatgcttgccgacaaggcggcgcttgtcgttgaagtggtcgaggaaaattatcatgatgcgccgatcgtcggcatcgctgtggtcaacgaacatggacggtttttcctgcgcccggagacggcgcttgccgatccgcagtttgtcgcctggcttggtgatgaaacgaagaaaaaaagcatgtttgactcaaagcgcgcggcagtcgccttgaaatggaaaggaattgagctatgcggcgtttcctttgatttattgctggccgcctatttgcttgatccggcgcaaggtgttgatgatgtggctgccgcagcaaaaatgaagcaatacgaagcggtgcgctcggatgaagcggtgtatggcaaaggggcgaagcgggccgtgccggatgagccagtgctcgccgagcatctcgtccgcaaggcggcggcgatttgggcgctcgaacgtccgtttttggatgagctgcgccgcaacgaacaagatcggttgctcgtcgagctcgagcagccgttgtcttcgattttggcggaaatggaatttgccggagtgaaagtggatacgaagcggctcgaacagatgggcgaagagctcgccgagcagctgcgcacggtcgagcagcgcatttatgagctcgccggccaagaattcaacatcaattcaccgaaacagctcggcgtcattttatttgaaaaactgcagctgcccgtcttgaaaaaaacgaaaaccggctactccacttcggcggatgtgcttgaaaaacttgcgccttatcacgagatcgtggaaaacattttgcattaccgccagcttggcaagttgcagtcgacgtatattgaaggattgctgaaagtcgtgcgacccgatacaaagaaggtgcatacgattttcaatcaggcggctacgcaaaccggacggctcagctcgacggagccgaacttgcaaaacattccgattcggcttgaggaaggacggaaaatccgccaagcgttcgtgccgtcggagtctgattggctcattttcgctgccgactactcgcaaattgagttgcgcgtcctcgcccatattgcggaagatgacaatttaatggaagcgttccgccgcgatttggatatccatacgaaaacagcgatggacattttccaagtgagcgaggacgaagtgacgcccaacatgcgccgtcaggcgaaggcggtcaactttgggatcgtttacgggatcagtgattacggcttggcgcaaaacttaaatatttcacgcaaagaggccgctgaattcatcgagcgctacttcgaaagcttccctggcgtgaagcggtatatggaaaacattgtgcaagaagcaaaacagaaagggtatgtgacgacgctgctgcatcggcgccgctatttgccggatatcacgagccgcaacttcaacgtccgcagctttgctgaacggatggcgatgaacacgccgattcaagggagcgccgctgacattattaaaaaggcgatgatcgatctgaacgctagactgaaggaagagcggctgcaagcgcgccttttgctacaggtgcatgacgagctcattttggaggcgccgaaagaagagatggagcggctgtgccggctcgttccggaagtgatggagcaagcggtcacacttcgcgtgccgctcaaagtcgattaccattatggctcgacgtggtatgacgcgaaataaaaaggatcc

SEQ ID NO: 2652 - DNA, 2712 bp, Artificial Sequence
  Description of Artificial Sequence: Synthetic DNA sequence of Bacillus caldolyticus EA1 DNA polymerase L634R
atgaaatacctgctgccgaccgctgctgctggtctgctgctcctcgctgcccagccggcgatggccatgggattgaaaaaaaagcttgttttaatcgacggcagcagcgtggcgtaccgcgcctttttcgccttgccgcttttgcataacgacaaaggcatccatacgaacgccgtctacgggtttacgatgatgttgaataaaattttggcggaagaagagccaactcatatgcttgtcgcgtttgacgccgggaaaacgacgttccggcatgaagcgtttcaagagtataaaggtgggcgccagcagacgccaccggagctgtcggagcagtttccgctgttgcgcgagctgctgagggcgtatcgcatccccgcctatgaactcgagaactacgaagcggacgatattatcggaacgcttgccgcccgcgctgagcaggaagggtttgaggtgaaagtcatttccggcgaccgcgatctgacccagctcgcctccccccatgtgacggtggacattacgaaaaaagggattaccgatatcgaaccgtacacgccggaggcggtccgcgaaaaatacggcttaactccggaacaaatcgttgatttgaaaggattgatgggcgacaaatcggacaacattcccggagtgccgggcatcggggaaaagacggcggtcaagctgctcaagcaattcggcacggtcgaaaacgtgcttgcctccattgacgagatcaaaggcgaaaagttgaaagaaacgctgcgccaacaccgggagatggcgctgttaagcaaaaagctcgccgccattcgccgcgacgccccggtcgagctctcgcttgatgacatcgtctatcaaggggaagaccgggagaaagtggtcgctttatttaaagagcttgggtttcaatcgtttttagagaaaatggaatcgccgtcatcagaagaggaaaaaccgcttgccaagatggcatttacgcttgctgaccgcgtgacggaggagatgcttgccgacaaggcggcgcttgtcgttgaagtggtcgaggaaaattatcatgatgcgccgatcgtcggcatcgctgtggtcaacgaacatggacggtttttcctgcgcccggagacggcgcttgccgatccgcagtttgtcgcctggcttggtgatgaaacgaagaaaaaaagcatgtttgactcaaagcgcgcggcagtcgccttgaaatggaaaggaattgagctatgcggcgtttcctttgatttattgctggccgcctatttgcttgatccggcgcaaggtgttgatgatgtggctgccgcagcaaaaatgaagcaatacgaagcggtgcgctcggatgaagcggtgtatggcaaaggggcgaagcgggccgtgccggatgagccagtgctcgccgagcatctcgtccgcaaggcggcggcgatttgggcgctcgaacgtccgtttttggatgagctgcgccgcaacgaacaagatcggttgctcgtcgagctcgagcagccgttgtcttcgattttggcggaaatggaatttgccggagtgaaagtggatacgaagcggctcgaacagatgggcgaagagctcgccgagcagctgcgcacggtcgagcagcgcatttatgagctcgccggccaagaattcaacatcaattcaccgaaacagctcggcgtcattttatttgaaaaactgcagctgcccgtcttgaaaaaaacgaaaaccggctactccacttcggcggatgtgcttgaaaaacttgcgccttatcacgagatcgtggaaaacattttgcattaccgccagcttggcaagttgcagtcgacgtatattgaaggattgctgaaagtcgtgcgacccgatacaaagaaggtgcatacgattttcaatcaggcgcgaacgcaaaccggacggctcagctcgacggagccgaacttgcaaaacattccgattcggcttgaggaaggacggaaaatccgccaagcgttcgtgccgtcggagtctgattggctcattttcgctgccgactactcgcaaattgagttgcgcgtcctcgcccatattgcggaagatgacaatttaatggaagcgttccgccgcgatttggatatccatacgaaaacagcgatggacattttccaagtgagcgaggacgaagtgacgcccaacatgcgccgtcaggcgaaggcggtcaactttgggatcgtttacgggatcagtgattacggcttggcgcaaaacttaaatatttcacgcaaagaggccgctgaattcatcgagcgctacttcgaaagcttccctggcgtgaagcggtatatggaaaacattgtgcaagaagcaaaacagaaagggtatgtgacgacgctgctgcatcggcgccgctatttgccggatatcacgagccgcaacttcaacgtccgcagctttgctgaacggatggcgatgaacacgccgattcaagggagcgccgctgacattattaaaaaggcgatgatcgatctgaacgctagactgaaggaagagcggctgcaagcgcgccttttgctacaggtgcatgacgagctcattttggaggcgccgaaagaagagatggagcggctgtgccggctcgttccggaagtgatggagcaagcggtcacacttcgcgtgccgctcaaagtcgattaccattatggctcgacgtggtatgacgcgaaataaaaaggatcc

SEQ ID NO: 2653 - DNA, 2712 bp, Artificial Sequence
  Description of Artificial Sequence: Synthetic DNA sequence of Bacillus caldolyticus EA1 DNA polymerase L634C
atgaaatacctgctgccgaccgctgctgctggtctgctgctcctcgctgcccagccggcgatggccatgggattgaaaaaaaagcttgttttaatcgacggcagcagcgtggcgtaccgcgcctttttcgccttgccgcttttgcataacgacaaaggcatccatacgaacgccgtctacgggtttacgatgatgttgaataaaattttggcggaagaagagccaactcatatgcttgtcgcgtttgacgccgggaaaacgacgttccggcatgaagcgtttcaagagtataaaggtgggcgccagcagacgccaccggagctgtcggagcagtttccgctgttgcgcgagctgctgagggcgtatcgcatccccgcctatgaactcgagaactacgaagcggacgatattatcggaacgcttgccgcccgcgctgagcaggaagggtttgaggtgaaagtcatttccggcgaccgcgatctgacccagctcgcctccccccatgtgacggtggacattacgaaaaaagggattaccgatatcgaaccgtacacgccggaggcggtccgcgaaaaatacggcttaactccggaacaaatcgttgatttgaaaggattgatgggcgacaaatcggacaacattcccggagtgccgggcatcggggaaaagacggcggtcaagctgctcaagcaattcggcacggtcgaaaacgtgcttgcctccattgacgagatcaaaggcgaaaagttgaaagaaacgctgcgccaacaccgggagatggcgctgttaagcaaaaagctcgccgccattcgccgcgacgccccggtcgagctctcgcttgatgacatcgtctatcaaggggaagaccgggagaaagtggtcgctttatttaaagagcttgggtttcaatcgtttttagagaaaatggaatcgccgtcatcagaagaggaaaaaccgcttgccaagatggcatttacgcttgctgaccgcgtgacggaggagatgcttgccgacaaggcggcgcttgtcgttgaagtggtcgaggaaaattatcatgatgcgccgatcgtcggcatcgctgtggtcaacgaacatggacggtttttcctgcgcccggagacggcgcttgccgatccgcagtttgtcgcctggcttggtgatgaaacgaagaaaaaaagcatgtttgactcaaagcgcgcggcagtcgccttgaaatggaaaggaattgagctatgcggcgtttcctttgatttattgctggccgcctatttgcttgatccggcgcaaggtgttgatgatgtggctgccgcagcaaaaatgaagcaatacgaagcggtgcgctcggatgaagcggtgtatggcaaaggggcgaagcgggccgtgccggatgagccagtgctcgccgagcatctcgtccgcaaggcggcggcgatttgggcgctcgaacgtccgtttttggatgagctgcgccgcaacgaacaagatcggttgctcgtcgagctcgagcagccgttgtcttcgattttggcggaaatggaatttgccggagtgaaagtggatacgaagcggctcgaacagatgggcgaagagctcgccgagcagctgcgcacggtcgagcagcgcatttatgagctcgccggccaagaattcaacatcaattcaccgaaacagctcggcgtcattttatttgaaaaactgcagctgcccgtcttgaaaaaaacgaaaaccggctactccacttcggcggatgtgcttgaaaaacttgcgccttatcacgagatcgtggaaaacattttgcattaccgccagcttggcaagttgcagtcgacgtatattgaaggattgctgaaagtcgtgcgacccgatacaaagaaggtgcatacgattttcaatcaggcgtgtacgcaaaccggacggctcagctcgacggagccgaacttgcaaaacattccgattcggcttgaggaaggacggaaaatccgccaagcgttcgtgccgtcggagtctgattggctcattttcgctgccgactactcgcaaattgagttgcgcgtcctcgcccatattgcggaagatgacaatttaatggaagcgttccgccgcgatttggatatccatacgaaaacagcgatggacattttccaagtgagcgaggacgaagtgacgcccaacatgcgccgtcaggcgaaggcggtcaactttgggatcgtttacgggatcagtgattacggcttggcgcaaaacttaaatatttcacgcaaagaggccgctgaattcatcgagcgctacttcgaaagcttccctggcgtgaagcggtatatggaaaacattgtgcaagaagcaaaacagaaagggtatgtgacgacgctgctgcatcggcgccgctatttgccggatatcacgagccgcaacttcaacgtccgcagctttgctgaacggatggcgatgaacacgccgattcaagggagcgccgctgacattattaaaaaggcgatgatcgatctgaacgctagactgaaggaagagcggctgcaagcgcgccttttgctacaggtgcatgacgagctcattttggaggcgccgaaagaagagatggagcggctgtgccggctcgttccggaagtgatggagcaagcggtcacacttcgcgtgccgctcaaagtcgattaccattatggctcgacgtggtatgacgcgaaataaaaaggatcc

SEQ ID NO: 2654 - DNA, 2712 bp, Artificial Sequence
  Description of Artificial Sequence: Synthetic DNA sequence of Bacillus caldolyticus EA1 DNA polymerase L634G
atgaaatacctgctgccgaccgctgctgctggtctgctgctcctcgctgcccagccggcgatggccatgggattgaaaaaaaagcttgttttaatcgacggcagcagcgtggcgtaccgcgcctttttcgccttgccgcttttgcataacgacaaaggcatccatacgaacgccgtctacgggtttacgatgatgttgaataaaattttggcggaagaagagccaactcatatgcttgtcgcgtttgacgccgggaaaacgacgttccggcatgaagcgtttcaagagtataaaggtgggcgccagcagacgccaccggagctgtcggagcagtttccgctgttgcgcgagctgctgagggcgtatcgcatccccgcctatgaactcgagaactacgaagcggacgatattatcggaacgcttgccgcccgcgctgagcaggaagggtttgaggtgaaagtcatttccggcgaccgcgatctgacccagctcgcctccccccatgtgacggtggacattacgaaaaaagggattaccgatatcgaaccgtacacgccggaggcggtccgcgaaaaatacggcttaactccggaacaaatcgttgatttgaaaggattgatgggcgacaaatcggacaacattcccggagtgccgggcatcggggaaaagacggcggtcaagctgctcaagcaattcggcacggtcgaaaacgtgcttgcctccattgacgagatcaaaggcgaaaagttgaaagaaacgctgcgccaacaccgggagatggcgctgttaagcaaaaagctcgccgccattcgccgcgacgccccggtcgagctctcgcttgatgacatcgtctatcaaggggaagaccgggagaaagtggtcgctttatttaaagagcttgggtttcaatcgtttttagagaaaatggaatcgccgtcatcagaagaggaaaaaccgcttgccaagatggcatttacgcttgctgaccgcgtgacggaggagatgcttgccgacaaggcggcgcttgtcgttgaagtggtcgaggaaaattatcatgatgcgccgatcgtcggcatcgctgtggtcaacgaacatggacggtttttcctgcgcccggagacggcgcttgccgatccgcagtttgtcgcctggcttggtgatgaaacgaagaaaaaaagcatgtttgactcaaagcgcgcggcagtcgccttgaaatggaaaggaattgagctatgcggcgtttcctttgatttattgctggccgcctatttgcttgatccggcgcaaggtgttgatgatgtggctgccgcagcaaaaatgaagcaatacgaagcggtgcgctcggatgaagcggtgtatggcaaaggggcgaagcgggccgtgccggatgagccagtgctcgccgagcatctcgtccgcaaggcggcggcgatttgggcgctcgaacgtccgtttttggatgagctgcgccgcaacgaacaagatcggttgctcgtcgagctcgagcagccgttgtcttcgattttggcggaaatggaatttgccggagtgaaagtggatacgaagcggctcgaacagatgggcgaagagctcgccgagcagctgcgcacggtcgagcagcgcatttatgagctcgccggccaagaattcaacatcaattcaccgaaacagctcggcgtcattttatttgaaaaactgcagctgcccgtcttgaaaaaaacgaaaaccggctactccacttcggcggatgtgcttgaaaaacttgcgccttatcacgagatcgtggaaaacattttgcattaccgccagcttggcaagttgcagtcgacgtatattgaaggattgctgaaagtcgtgcgacccgatacaaagaaggtgcatacgattttcaatcaggcgggtacgcaaaccggacggctcagctcgacggagccgaacttgcaaaacattccgattcggcttgaggaaggacggaaaatccgccaagcgttcgtgccgtcggagtctgattggctcattttcgctgccgactactcgcaaattgagttgcgcgtcctcgcccatattgcggaagatgacaatttaatggaagcgttccgccgcgatttggatatccatacgaaaacagcgatggacattttccaagtgagcgaggacgaagtgacgcccaacatgcgccgtcaggcgaaggcggtcaactttgggatcgtttacgggatcagtgattacggcttggcgcaaaacttaaatatttcacgcaaagaggccgctgaattcatcgagcgctacttcgaaagcttccctggcgtgaagcggtatatggaaaacattgtgcaagaagcaaaacagaaagggtatgtgacgacgctgctgcatcggcgccgctatttgccggatatcacgagccgcaacttcaacgtccgcagctttgctgaacggatggcgatgaacacgccgattcaagggagcgccgctgacattattaaaaaggcgatgatcgatctgaacgctagactgaaggaagagcggctgcaagcgcgccttttgctacaggtgcatgacgagctcattttggaggcgccgaaagaagagatggagcggctgtgccggctcgttccggaagtgatggagcaagcggtcacacttcgcgtgccgctcaaagtcgattaccattatggctcgacgtggtatgacgcgaaataaaaaggatcc

SEQ ID NO: 2655 - DNA, 2712 bp, Artificial Sequence
  Description of Artificial Sequence: Synthetic DNA sequence of Bacillus caldolyticus EA1 DNA polymerase L634Q
atgaaatacctgctgccgaccgctgctgctggtctgctgctcctcgctgcccagccggcgatggccatgggattgaaaaaaaagcttgttttaatcgacggcagcagcgtggcgtaccgcgcctttttcgccttgccgcttttgcataacgacaaaggcatccatacgaacgccgtctacgggtttacgatgatgttgaataaaattttggcggaagaagagccaactcatatgcttgtcgcgtttgacgccgggaaaacgacgttccggcatgaagcgtttcaagagtataaaggtgggcgccagcagacgccaccggagctgtcggagcagtttccgctgttgcgcgagctgctgagggcgtatcgcatccccgcctatgaactcgagaactacgaagcggacgatattatcggaacgcttgccgcccgcgctgagcaggaagggtttgaggtgaaagtcatttccggcgaccgcgatctgacccagctcgcctccccccatgtgacggtggacattacgaaaaaagggattaccgatatcgaaccgtacacgccggaggcggtccgcgaaaaatacggcttaactccggaacaaatcgttgatttgaaaggattgatgggcgacaaatcggacaacattcccggagtgccgggcatcggggaaaagacggcggtcaagctgctcaagcaattcggcacggtcgaaaacgtgcttgcctccattgacgagatcaaaggcgaaaagttgaaagaaacgctgcgccaacaccgggagatggcgctgttaagcaaaaagctcgccgccattcgccgcgacgccccggtcgagctctcgcttgatgacatcgtctatcaaggggaagaccgggagaaagtggtcgctttatttaaagagcttgggtttcaatcgtttttagagaaaatggaatcgccgtcatcagaagaggaaaaaccgcttgccaagatggcatttacgcttgctgaccgcgtgacggaggagatgcttgccgacaaggcggcgcttgtcgttgaagtggtcgaggaaaattatcatgatgcgccgatcgtcggcatcgctgtggtcaacgaacatggacggtttttcctgcgcccggagacggcgcttgccgatccgcagtttgtcgcctggcttggtgatgaaacgaagaaaaaaagcatgtttgactcaaagcgcgcggcagtcgccttgaaatggaaaggaattgagctatgcggcgtttcctttgatttattgctggccgcctatttgcttgatccggcgcaaggtgttgatgatgtggctgccgcagcaaaaatgaagcaatacgaagcggtgcgctcggatgaagcggtgtatggcaaaggggcgaagcgggccgtgccggatgagccagtgctcgccgagcatctcgtccgcaaggcggcggcgatttgggcgctcgaacgtccgtttttggatgagctgcgccgcaacgaacaagatcggttgctcgtcgagctcgagcagccgttgtcttcgattttggcggaaatggaatttgccggagtgaaagtggatacgaagcggctcgaacagatgggcgaagagctcgccgagcagctgcgcacggtcgagcagcgcatttatgagctcgccggccaagaattcaacatcaattcaccgaaacagctcggcgtcattttatttgaaaaactgcagctgcccgtcttgaaaaaaacgaaaaccggctactccacttcggcggatgtgcttgaaaaacttgcgccttatcacgagatcgtggaaaacattttgcattaccgccagcttggcaagttgcagtcgacgtatattgaaggattgctgaaagtcgtgcgacccgatacaaagaaggtgcatacgattttcaatcaggcgcaaacgcaaaccggacggctcagctcgacggagccgaacttgcaaaacattccgattcggcttgaggaaggacggaaaatccgccaagcgttcgtgccgtcggagtctgattggctcattttcgctgccgactactcgcaaattgagttgcgcgtcctcgcccatattgcggaagatgacaatttaatggaagcgttccgccgcgatttggatatccatacgaaaacagcgatggacattttccaagtgagcgaggacgaagtgacgcccaacatgcgccgtcaggcgaaggcggtcaactttgggatcgtttacgggatcagtgattacggcttggcgcaaaacttaaatatttcacgcaaagaggccgctgaattcatcgagcgctacttcgaaagcttccctggcgtgaagcggtatatggaaaacattgtgcaagaagcaaaacagaaagggtatgtgacgacgctgctgcatcggcgccgctatttgccggatatcacgagccgcaacttcaacgtccgcagctttgctgaacggatggcgatgaacacgccgattcaagggagcgccgctgacattattaaaaaggcgatgatcgatctgaacgctagactgaaggaagagcggctgcaagcgcgccttttgctacaggtgcatgacgagctcattttggaggcgccgaaagaagagatggagcggctgtgccggctcgttccggaagtgatggagcaagcggtcacacttcgcgtgccgctcaaagtcgattaccattatggctcgacgtggtatgacgcgaaataaaaaggatcc

SEQ ID NO: 2656 - DNA, 2712 bp, Artificial Sequence
  Description of Artificial Sequence: Synthetic DNA sequence of Bacillus caldolyticus EA1 DNA polymerase L634H
atgaaatacctgctgccgaccgctgctgctggtctgctgctcctcgctgcccagccggcgatggccatgggattgaaaaaaaagcttgttttaatcgacggcagcagcgtggcgtaccgcgcctttttcgccttgccgcttttgcataacgacaaaggcatccatacgaacgccgtctacgggtttacgatgatgttgaataaaattttggcggaagaagagccaactcatatgcttgtcgcgtttgacgccgggaaaacgacgttccggcatgaagcgtttcaagagtataaaggtgggcgccagcagacgccaccggagctgtcggagcagtttccgctgttgcgcgagctgctgagggcgtatcgcatccccgcctatgaactcgagaactacgaagcggacgatattatcggaacgcttgccgcccgcgctgagcaggaagggtttgaggtgaaagtcatttccggcgaccgcgatctgacccagctcgcctccccccatgtgacggtggacattacgaaaaaagggattaccgatatcgaaccgtacacgccggaggcggtccgcgaaaaatacggcttaactccggaacaaatcgttgatttgaaaggattgatgggcgacaaatcggacaacattcccggagtgccgggcatcggggaaaagacggcggtcaagctgctcaagcaattcggcacggtcgaaaacgtgcttgcctccattgacgagatcaaaggcgaaaagttgaaagaaacgctgcgccaacaccgggagatggcgctgttaagcaaaaagctcgccgccattcgccgcgacgccccggtcgagctctcgcttgatgacatcgtctatcaaggggaagaccgggagaaagtggtcgctttatttaaagagcttgggtttcaatcgtttttagagaaaatggaatcgccgtcatcagaagaggaaaaaccgcttgccaagatggcatttacgcttgctgaccgcgtgacggaggagatgcttgccgacaaggcggcgcttgtcgttgaagtggtcgaggaaaattatcatgatgcgccgatcgtcggcatcgctgtggtcaacgaacatggacggtttttcctgcgcccggagacggcgcttgccgatccgcagtttgtcgcctggcttggtgatgaaacgaagaaaaaaagcatgtttgactcaaagcgcgcggcagtcgccttgaaatggaaaggaattgagctatgcggcgtttcctttgatttattgctggccgcctatttgcttgatccggcgcaaggtgttgatgatgtggctgccgcagcaaaaatgaagcaatacgaagcggtgcgctcggatgaagcggtgtatggcaaaggggcgaagcgggccgtgccggatgagccagtgctcgccgagcatctcgtccgcaaggcggcggcgatttgggcgctcgaacgtccgtttttggatgagctgcgccgcaacgaacaagatcggttgctcgtcgagctcgagcagccgttgtcttcgattttggcggaaatggaatttgccggagtgaaagtggatacgaagcggctcgaacagatgggcgaagagctcgccgagcagctgcgcacggtcgagcagcgcatttatgagctcgccggccaagaattcaacatcaattcaccgaaacagctcggcgtcattttatttgaaaaactgcagctgcccgtcttgaaaaaaacgaaaaccggctactccacttcggcggatgtgcttgaaaaacttgcgccttatcacgagatcgtggaaaacattttgcattaccgccagcttggcaagttgcagtcgacgtatattgaaggattgctgaaagtcgtgcgacccgatacaaagaaggtgcatacgattttcaatcaggcgcatacgcaaaccggacggctcagctcgacggagccgaacttgcaaaacattccgattcggcttgaggaaggacggaaaatccgccaagcgttcgtgccgtcggagtctgattggctcattttcgctgccgactactcgcaaattgagttgcgcgtcctcgcccatattgcggaagatgacaatttaatggaagcgttccgccgcgatttggatatccatacgaaaacagcgatggacattttccaagtgagcgaggacgaagtgacgcccaacatgcgccgtcaggcgaaggcggtcaactttgggatcgtttacgggatcagtgattacggcttggcgcaaaacttaaatatttcacgcaaagaggccgctgaattcatcgagcgctacttcgaaagcttccctggcgtgaagcggtatatggaaaacattgtgcaagaagcaaaacagaaagggtatgtgacgacgctgctgcatcggcgccgctatttgccggatatcacgagccgcaacttcaacgtccgcagctttgctgaacggatggcgatgaacacgccgattcaagggagcgccgctgacattattaaaaaggcgatgatcgatctgaacgctagactgaaggaagagcggctgcaagcgcgccttttgctacaggtgcatgacgagctcattttggaggcgccgaaagaagagatggagcggctgtgccggctcgttccggaagtgatggagcaagcggtcacacttcgcgtgccgctcaaagtcgattaccattatggctcgacgtggtatgacgcgaaataaaaaggatcc

SEQ ID NO: 2657 - DNA, 2712 bp, Artificial Sequence
  Description of Artificial Sequence: Synthetic DNA sequence of Bacillus caldolyticus EA1 DNA polymerase L634I
atgaaatacctgctgccgaccgctgctgctggtctgctgctcctcgctgcccagccggcgatggccatgggattgaaaaaaaagcttgttttaatcgacggcagcagcgtggcgtaccgcgcctttttcgccttgccgcttttgcataacgacaaaggcatccatacgaacgccgtctacgggtttacgatgatgttgaataaaattttggcggaagaagagccaactcatatgcttgtcgcgtttgacgccgggaaaacgacgttccggcatgaagcgtttcaagagtataaaggtgggcgccagcagacgccaccggagctgtcggagcagtttccgctgttgcgcgagctgctgagggcgtatcgcatccccgcctatgaactcgagaactacgaagcggacgatattatcggaacgcttgccgcccgcgctgagcaggaagggtttgaggtgaaagtcatttccggcgaccgcgatctgacccagctcgcctccccccatgtgacggtggacattacgaaaaaagggattaccgatatcgaaccgtacacgccggaggcggtccgcgaaaaatacggcttaactccggaacaaatcgttgatttgaaaggattgatgggcgacaaatcggacaacattcccggagtgccgggcatcggggaaaagacggcggtcaagctgctcaagcaattcggcacggtcgaaaacgtgcttgcctccattgacgagatcaaaggcgaaaagttgaaagaaacgctgcgccaacaccgggagatggcgctgttaagcaaaaagctcgccgccattcgccgcgacgccccggtcgagctctcgcttgatgacatcgtctatcaaggggaagaccgggagaaagtggtcgctttatttaaagagcttgggtttcaatcgtttttagagaaaatggaatcgccgtcatcagaagaggaaaaaccgcttgccaagatggcatttacgcttgctgaccgcgtgacggaggagatgcttgccgacaaggcggcgcttgtcgttgaagtggtcgaggaaaattatcatgatgcgccgatcgtcggcatcgctgtggtcaacgaacatggacggtttttcctgcgcccggagacggcgcttgccgatccgcagtttgtcgcctggcttggtgatgaaacgaagaaaaaaagcatgtttgactcaaagcgcgcggcagtcgccttgaaatggaaaggaattgagctatgcggcgtttcctttgatttattgctggccgcctatttgcttgatccggcgcaaggtgttgatgatgtggctgccgcagcaaaaatgaagcaatacgaagcggtgcgctcggatgaagcggtgtatggcaaaggggcgaagcgggccgtgccggatgagccagtgctcgccgagcatctcgtccgcaaggcggcggcgatttgggcgctcgaacgtccgtttttggatgagctgcgccgcaacgaacaagatcggttgctcgtcgagctcgagcagccgttgtcttcgattttggcggaaatggaatttgccggagtgaaagtggatacgaagcggctcgaacagatgggcgaagagctcgccgagcagctgcgcacggtcgagcagcgcatttatgagctcgccggccaagaattcaacatcaattcaccgaaacagctcggcgtcattttatttgaaaaactgcagctgcccgtcttgaaaaaaacgaaaaccggctactccacttcggcggatgtgcttgaaaaacttgcgccttatcacgagatcgtggaaaacattttgcattaccgccagcttggcaagttgcagtcgacgtatattgaaggattgctgaaagtcgtgcgacccgatacaaagaaggtgcatacgattttcaatcaggcgattacgcaaaccggacggctcagctcgacggagccgaacttgcaaaacattccgattcggcttgaggaaggacggaaaatccgccaagcgttcgtgccgtcggagtctgattggctcattttcgctgccgactactcgcaaattgagttgcgcgtcctcgcccatattgcggaagatgacaatttaatggaagcgttccgccgcgatttggatatccatacgaaaacagcgatggacattttccaagtgagcgaggacgaagtgacgcccaacatgcgccgtcaggcgaaggcggtcaactttgggatcgtttacgggatcagtgattacggcttggcgcaaaacttaaatatttcacgcaaagaggccgctgaattcatcgagcgctacttcgaaagcttccctggcgtgaagcggtatatggaaaacattgtgcaagaagcaaaacagaaagggtatgtgacgacgctgctgcatcggcgccgctatttgccggatatcacgagccgcaacttcaacgtccgcagctttgctgaacggatggcgatgaacacgccgattcaagggagcgccgctgacattattaaaaaggcgatgatcgatctgaacgctagactgaaggaagagcggctgcaagcgcgccttttgctacaggtgcatgacgagctcattttggaggcgccgaaagaagagatggagcggctgtgccggctcgttccggaagtgatggagcaagcggtcacacttcgcgtgccgctcaaagtcgattaccattatggctcgacgtggtatgacgcgaaataaaaaggatcc

SEQ ID NO: 2658 - DNA, 2712 bp, Artificial Sequence
  Description of Artificial Sequence: Synthetic DNA sequence of Bacillus caldolyticus EA1 DNA polymerase L634K
atgaaatacctgctgccgaccgctgctgctggtctgctgctcctcgctgcccagccggcgatggccatgggattgaaaaaaaagcttgttttaatcgacggcagcagcgtggcgtaccgcgcctttttcgccttgccgcttttgcataacgacaaaggcatccatacgaacgccgtctacgggtttacgatgatgttgaataaaattttggcggaagaagagccaactcatatgcttgtcgcgtttgacgccgggaaaacgacgttccggcatgaagcgtttcaagagtataaaggtgggcgccagcagacgccaccggagctgtcggagcagtttccgctgttgcgcgagctgctgagggcgtatcgcatccccgcctatgaactcgagaactacgaagcggacgatattatcggaacgcttgccgcccgcgctgagcaggaagggtttgaggtgaaagtcatttccggcgaccgcgatctgacccagctcgcctccccccatgtgacggtggacattacgaaaaaagggattaccgatatcgaaccgtacacgccggaggcggtccgcgaaaaatacggcttaactccggaacaaatcgttgatttgaaaggattgatgggcgacaaatcggacaacattcccggagtgccgggcatcggggaaaagacggcggtcaagctgctcaagcaattcggcacggtcgaaaacgtgcttgcctccattgacgagatcaaaggcgaaaagttgaaagaaacgctgcgccaacaccgggagatggcgctgttaagcaaaaagctcgccgccattcgccgcgacgccccggtcgagctctcgcttgatgacatcgtctatcaaggggaagaccgggagaaagtggtcgctttatttaaagagcttgggtttcaatcgtttttagagaaaatggaatcgccgtcatcagaagaggaaaaaccgcttgccaagatggcatttacgcttgctgaccgcgtgacggaggagatgcttgccgacaaggcggcgcttgtcgttgaagtggtcgaggaaaattatcatgatgcgccgatcgtcggcatcgctgtggtcaacgaacatggacggtttttcctgcgcccggagacggcgcttgccgatccgcagtttgtcgcctggcttggtgatgaaacgaagaaaaaaagcatgtttgactcaaagcgcgcggcagtcgccttgaaatggaaaggaattgagctatgcggcgtttcctttgatttattgctggccgcctatttgcttgatccggcgcaaggtgttgatgatgtggctgccgcagcaaaaatgaagcaatacgaagcggtgcgctcggatgaagcggtgtatggcaaaggggcgaagcgggccgtgccggatgagccagtgctcgccgagcatctcgtccgcaaggcggcggcgatttgggcgctcgaacgtccgtttttggatgagctgcgccgcaacgaacaagatcggttgctcgtcgagctcgagcagccgttgtcttcgattttggcggaaatggaatttgccggagtgaaagtggatacgaagcggctcgaacagatgggcgaagagctcgccgagcagctgcgcacggtcgagcagcgcatttatgagctcgccggccaagaattcaacatcaattcaccgaaacagctcggcgtcattttatttgaaaaactgcagctgcccgtcttgaaaaaaacgaaaaccggctactccacttcggcggatgtgcttgaaaaacttgcgccttatcacgagatcgtggaaaacattttgcattaccgccagcttggcaagttgcagtcgacgtatattgaaggattgctgaaagtcgtgcgacccgatacaaagaaggtgcatacgattttcaatcaggcgaaaacgcaaaccggacggctcagctcgacggagccgaacttgcaaaacattccgattcggcttgaggaaggacggaaaatccgccaagcgttcgtgccgtcggagtctgattggctcattttcgctgccgactactcgcaaattgagttgcgcgtcctcgcccatattgcggaagatgacaatttaatggaagcgttccgccgcgatttggatatccatacgaaaacagcgatggacattttccaagtgagcgaggacgaagtgacgcccaacatgcgccgtcaggcgaaggcggtcaactttgggatcgtttacgggatcagtgattacggcttggcgcaaaacttaaatatttcacgcaaagaggccgctgaattcatcgagcgctacttcgaaagcttccctggcgtgaagcggtatatggaaaacattgtgcaagaagcaaaacagaaagggtatgtgacgacgctgctgcatcggcgccgctatttgccggatatcacgagccgcaacttcaacgtccgcagctttgctgaacggatggcgatgaacacgccgattcaagggagcgccgctgacattattaaaaaggcgatgatcgatctgaacgctagactgaaggaagagcggctgcaagcgcgccttttgctacaggtgcatgacgagctcattttggaggcgccgaaagaagagatggagcggctgtgccggctcgttccggaagtgatggagcaagcggtcacacttcgcgtgccgctcaaagtcgattaccattatggctcgacgtggtatgacgcgaaataaaaaggatcc

SEQ ID NO: 2659 - DNA, 2712 bp, Artificial Sequence
  Description of Artificial Sequence: Synthetic DNA sequence of Bacillus caldolyticus EA1 DNA polymerase L634E
atgaaatacctgctgccgaccgctgctgctggtctgctgctcctcgctgcccagccggcgatggccatgggattgaaaaaaaagcttgttttaatcgacggcagcagcgtggcgtaccgcgcctttttcgccttgccgcttttgcataacgacaaaggcatccatacgaacgccgtctacgggtttacgatgatgttgaataaaattttggcggaagaagagccaactcatatgcttgtcgcgtttgacgccgggaaaacgacgttccggcatgaagcgtttcaagagtataaaggtgggcgccagcagacgccaccggagctgtcggagcagtttccgctgttgcgcgagctgctgagggcgtatcgcatccccgcctatgaactcgagaactacgaagcggacgatattatcggaacgcttgccgcccgcgctgagcaggaagggtttgaggtgaaagtcatttccggcgaccgcgatctgacccagctcgcctccccccatgtgacggtggacattacgaaaaaagggattaccgatatcgaaccgtacacgccggaggcggtccgcgaaaaatacggcttaactccggaacaaatcgttgatttgaaaggattgatgggcgacaaatcggacaacattcccggagtgccgggcatcggggaaaagacggcggtcaagctgctcaagcaattcggcacggtcgaaaacgtgcttgcctccattgacgagatcaaaggcgaaaagttgaaagaaacgctgcgccaacaccgggagatggcgctgttaagcaaaaagctcgccgccattcgccgcgacgccccggtcgagctctcgcttgatgacatcgtctatcaaggggaagaccgggagaaagtggtcgctttatttaaagagcttgggtttcaatcgtttttagagaaaatggaatcgccgtcatcagaagaggaaaaaccgcttgccaagatggcatttacgcttgctgaccgcgtgacggaggagatgcttgccgacaaggcggcgcttgtcgttgaagtggtcgaggaaaattatcatgatgcgccgatcgtcggcatcgctgtggtcaacgaacatggacggtttttcctgcgcccggagacggcgcttgccgatccgcagtttgtcgcctggcttggtgatgaaacgaagaaaaaaagcatgtttgactcaaagcgcgcggcagtcgccttgaaatggaaaggaattgagctatgcggcgtttcctttgatttattgctggccgcctatttgcttgatccggcgcaaggtgttgatgatgtggctgccgcagcaaaaatgaagcaatacgaagcggtgcgctcggatgaagcggtgtatggcaaaggggcgaagcgggccgtgccggatgagccagtgctcgccgagcatctcgtccgcaaggcggcggcgatttgggcgctcgaacgtccgtttttggatgagctgcgccgcaacgaacaagatcggttgctcgtcgagctcgagcagccgttgtcttcgattttggcggaaatggaatttgccggagtgaaagtggatacgaagcggctcgaacagatgggcgaagagctcgccgagcagctgcgcacggtcgagcagcgcatttatgagctcgccggccaagaattcaacatcaattcaccgaaacagctcggcgtcattttatttgaaaaactgcagctgcccgtcttgaaaaaaacgaaaaccggctactccacttcggcggatgtgcttgaaaaacttgcgccttatcacgagatcgtggaaaacattttgcattaccgccagcttggcaagttgcagtcgacgtatattgaaggattgctgaaagtcgtgcgacccgatacaaagaaggtgcatacgattttcaatcaggcggaaacgcaaaccggacggctcagctcgacggagccgaacttgcaaaacattccgattcggcttgaggaaggacggaaaatccgccaagcgttcgtgccgtcggagtctgattggctcattttcgctgccgactactcgcaaattgagttgcgcgtcctcgcccatattgcggaagatgacaatttaatggaagcgttccgccgcgatttggatatccatacgaaaacagcgatggacattttccaagtgagcgaggacgaagtgacgcccaacatgcgccgtcaggcgaaggcggtcaactttgggatcgtttacgggatcagtgattacggcttggcgcaaaacttaaatatttcacgcaaagaggccgctgaattcatcgagcgctacttcgaaagcttccctggcgtgaagcggtatatggaaaacattgtgcaagaagcaaaacagaaagggtatgtgacgacgctgctgcatcggcgccgctatttgccggatatcacgagccgcaacttcaacgtccgcagctttgctgaacggatggcgatgaacacgccgattcaagggagcgccgctgacattattaaaaaggcgatgatcgatctgaacgctagactgaaggaagagcggctgcaagcgcgccttttgctacaggtgcatgacgagctcattttggaggcgccgaaagaagagatggagcggctgtgccggctcgttccggaagtgatggagcaagcggtcacacttcgcgtgccgctcaaagtcgattaccattatggctcgacgtggtatgacgcgaaataaaaaggatcc

SEQ ID NO: 2660 - DNA, 2712 bp, Artificial Sequence
  Description of Artificial Sequence: Synthetic DNA sequence of Bacillus caldolyticus EA1 DNA polymerase L634D
atgaaatacctgctgccgaccgctgctgctggtctgctgctcctcgctgcccagccggcgatggccatgggattgaaaaaaaagcttgttttaatcgacggcagcagcgtggcgtaccgcgcctttttcgccttgccgcttttgcataacgacaaaggcatccatacgaacgccgtctacgggtttacgatgatgttgaataaaattttggcggaagaagagccaactcatatgcttgtcgcgtttgacgccgggaaaacgacgttccggcatgaagcgtttcaagagtataaaggtgggcgccagcagacgccaccggagctgtcggagcagtttccgctgttgcgcgagctgctgagggcgtatcgcatccccgcctatgaactcgagaactacgaagcggacgatattatcggaacgcttgccgcccgcgctgagcaggaagggtttgaggtgaaagtcatttccggcgaccgcgatctgacccagctcgcctccccccatgtgacggtggacattacgaaaaaagggattaccgatatcgaaccgtacacgccggaggcggtccgcgaaaaatacggcttaactccggaacaaatcgttgatttgaaaggattgatgggcgacaaatcggacaacattcccggagtgccgggcatcggggaaaagacggcggtcaagctgctcaagcaattcggcacggtcgaaaacgtgcttgcctccattgacgagatcaaaggcgaaaagttgaaagaaacgctgcgccaacaccgggagatggcgctgttaagcaaaaagctcgccgccattcgccgcgacgccccggtcgagctctcgcttgatgacatcgtctatcaaggggaagaccgggagaaagtggtcgctttatttaaagagcttgggtttcaatcgtttttagagaaaatggaatcgccgtcatcagaagaggaaaaaccgcttgccaagatggcatttacgcttgctgaccgcgtgacggaggagatgcttgccgacaaggcggcgcttgtcgttgaagtggtcgaggaaaattatcatgatgcgccgatcgtcggcatcgctgtggtcaacgaacatggacggtttttcctgcgcccggagacggcgcttgccgatccgcagtttgtcgcctggcttggtgatgaaacgaagaaaaaaagcatgtttgactcaaagcgcgcggcagtcgccttgaaatggaaaggaattgagctatgcggcgtttcctttgatttattgctggccgcctatttgcttgatccggcgcaaggtgttgatgatgtggctgccgcagcaaaaatgaagcaatacgaagcggtgcgctcggatgaagcggtgtatggcaaaggggcgaagcgggccgtgccggatgagccagtgctcgccgagcatctcgtccgcaaggcggcggcgatttgggcgctcgaacgtccgtttttggatgagctgcgccgcaacgaacaagatcggttgctcgtcgagctcgagcagccgttgtcttcgattttggcggaaatggaatttgccggagtgaaagtggatacgaagcggctcgaacagatgggcgaagagctcgccgagcagctgcgcacggtcgagcagcgcatttatgagctcgccggccaagaattcaacatcaattcaccgaaacagctcggcgtcattttatttgaaaaactgcagctgcccgtcttgaaaaaaacgaaaaccggctactccacttcggcggatgtgcttgaaaaacttgcgccttatcacgagatcgtggaaaacattttgcattaccgccagcttggcaagttgcagtcgacgtatattgaaggattgctgaaagtcgtgcgacccgatacaaagaaggtgcatacgattttcaatcaggcggatacgcaaaccggacggctcagctcgacggagccgaacttgcaaaacattccgattcggcttgaggaaggacggaaaatccgccaagcgttcgtgccgtcggagtctgattggctcattttcgctgccgactactcgcaaattgagttgcgcgtcctcgcccatattgcggaagatgacaatttaatggaagcgttccgccgcgatttggatatccatacgaaaacagcgatggacattttccaagtgagcgaggacgaagtgacgcccaacatgcgccgtcaggcgaaggcggtcaactttgggatcgtttacgggatcagtgattacggcttggcgcaaaacttaaatatttcacgcaaagaggccgctgaattcatcgagcgctacttcgaaagcttccctggcgtgaagcggtatatggaaaacattgtgcaagaagcaaaacagaaagggtatgtgacgacgctgctgcatcggcgccgctatttgccggatatcacgagccgcaacttcaacgtccgcagctttgctgaacggatggcgatgaacacgccgattcaagggagcgccgctgacattattaaaaaggcgatgatcgatctgaacgctagactgaaggaagagcggctgcaagcgcgccttttgctacaggtgcatgacgagctcattttggaggcgccgaaagaagagatggagcggctgtgccggctcgttccggaagtgatggagcaagcggtcacacttcgcgtgccgctcaaagtcgattaccattatggctcgacgtggtatgacgcgaaataaaaaggatcc

SEQ ID NO: 2661 - DNA, 2712 bp, Artificial Sequence
  Description of Artificial Sequence: Synthetic DNA seqeucne of Bacillus caldolyticus EA1 DNA polymerase L634F
atgaaatacctgctgccgaccgctgctgctggtctgctgctcctcgctgcccagccggcgatggccatgggattgaaaaaaaagcttgttttaatcgacggcagcagcgtggcgtaccgcgcctttttcgccttgccgcttttgcataacgacaaaggcatccatacgaacgccgtctacgggtttacgatgatgttgaataaaattttggcggaagaagagccaactcatatgcttgtcgcgtttgacgccgggaaaacgacgttccggcatgaagcgtttcaagagtataaaggtgggcgccagcagacgccaccggagctgtcggagcagtttccgctgttgcgcgagctgctgagggcgtatcgcatccccgcctatgaactcgagaactacgaagcggacgatattatcggaacgcttgccgcccgcgctgagcaggaagggtttgaggtgaaagtcatttccggcgaccgcgatctgacccagctcgcctccccccatgtgacggtggacattacgaaaaaagggattaccgatatcgaaccgtacacgccggaggcggtccgcgaaaaatacggcttaactccggaacaaatcgttgatttgaaaggattgatgggcgacaaatcggacaacattcccggagtgccgggcatcggggaaaagacggcggtcaagctgctcaagcaattcggcacggtcgaaaacgtgcttgcctccattgacgagatcaaaggcgaaaagttgaaagaaacgctgcgccaacaccgggagatggcgctgttaagcaaaaagctcgccgccattcgccgcgacgccccggtcgagctctcgcttgatgacatcgtctatcaaggggaagaccgggagaaagtggtcgctttatttaaagagcttgggtttcaatcgtttttagagaaaatggaatcgccgtcatcagaagaggaaaaaccgcttgccaagatggcatttacgcttgctgaccgcgtgacggaggagatgcttgccgacaaggcggcgcttgtcgttgaagtggtcgaggaaaattatcatgatgcgccgatcgtcggcatcgctgtggtcaacgaacatggacggtttttcctgcgcccggagacggcgcttgccgatccgcagtttgtcgcctggcttggtgatgaaacgaagaaaaaaagcatgtttgactcaaagcgcgcggcagtcgccttgaaatggaaaggaattgagctatgcggcgtttcctttgatttattgctggccgcctatttgcttgatccggcgcaaggtgttgatgatgtggctgccgcagcaaaaatgaagcaatacgaagcggtgcgctcggatgaagcggtgtatggcaaaggggcgaagcgggccgtgccggatgagccagtgctcgccgagcatctcgtccgcaaggcggcggcgatttgggcgctcgaacgtccgtttttggatgagctgcgccgcaacgaacaagatcggttgctcgtcgagctcgagcagccgttgtcttcgattttggcggaaatggaatttgccggagtgaaagtggatacgaagcggctcgaacagatgggcgaagagctcgccgagcagctgcgcacggtcgagcagcgcatttatgagctcgccggccaagaattcaacatcaattcaccgaaacagctcggcgtcattttatttgaaaaactgcagctgcccgtcttgaaaaaaacgaaaaccggctactccacttcggcggatgtgcttgaaaaacttgcgccttatcacgagatcgtggaaaacattttgcattaccgccagcttggcaagttgcagtcgacgtatattgaaggattgctgaaagtcgtgcgacccgatacaaagaaggtgcatacgattttcaatcaggcgtttacgcaaaccggacggctcagctcgacggagccgaacttgcaaaacattccgattcggcttgaggaaggacggaaaatccgccaagcgttcgtgccgtcggagtctgattggctcattttcgctgccgactactcgcaaattgagttgcgcgtcctcgcccatattgcggaagatgacaatttaatggaagcgttccgccgcgatttggatatccatacgaaaacagcgatggacattttccaagtgagcgaggacgaagtgacgcccaacatgcgccgtcaggcgaaggcggtcaactttgggatcgtttacgggatcagtgattacggcttggcgcaaaacttaaatatttcacgcaaagaggccgctgaattcatcgagcgctacttcgaaagcttccctggcgtgaagcggtatatggaaaacattgtgcaagaagcaaaacagaaagggtatgtgacgacgctgctgcatcggcgccgctatttgccggatatcacgagccgcaacttcaacgtccgcagctttgctgaacggatggcgatgaacacgccgattcaagggagcgccgctgacattattaaaaaggcgatgatcgatctgaacgctagactgaaggaagagcggctgcaagcgcgccttttgctacaggtgcatgacgagctcattttggaggcgccgaaagaagagatggagcggctgtgccggctcgttccggaagtgatggagcaagcggtcacacttcgcgtgccgctcaaagtcgattaccattatggctcgacgtggtatgacgcgaaataaaaaggatcc

SEQ ID NO: 2662 - DNA, 2712 bp, Artificial Sequence
  Description of Artificial Sequence: Synthetic DNA sequence of Bacillus caldolyticus EA1 DNA polymerase L634S
atgaaatacctgctgccgaccgctgctgctggtctgctgctcctcgctgcccagccggcgatggccatgggattgaaaaaaaagcttgttttaatcgacggcagcagcgtggcgtaccgcgcctttttcgccttgccgcttttgcataacgacaaaggcatccatacgaacgccgtctacgggtttacgatgatgttgaataaaattttggcggaagaagagccaactcatatgcttgtcgcgtttgacgccgggaaaacgacgttccggcatgaagcgtttcaagagtataaaggtgggcgccagcagacgccaccggagctgtcggagcagtttccgctgttgcgcgagctgctgagggcgtatcgcatccccgcctatgaactcgagaactacgaagcggacgatattatcggaacgcttgccgcccgcgctgagcaggaagggtttgaggtgaaagtcatttccggcgaccgcgatctgacccagctcgcctccccccatgtgacggtggacattacgaaaaaagggattaccgatatcgaaccgtacacgccggaggcggtccgcgaaaaatacggcttaactccggaacaaatcgttgatttgaaaggattgatgggcgacaaatcggacaacattcccggagtgccgggcatcggggaaaagacggcggtcaagctgctcaagcaattcggcacggtcgaaaacgtgcttgcctccattgacgagatcaaaggcgaaaagttgaaagaaacgctgcgccaacaccgggagatggcgctgttaagcaaaaagctcgccgccattcgccgcgacgccccggtcgagctctcgcttgatgacatcgtctatcaaggggaagaccgggagaaagtggtcgctttatttaaagagcttgggtttcaatcgtttttagagaaaatggaatcgccgtcatcagaagaggaaaaaccgcttgccaagatggcatttacgcttgctgaccgcgtgacggaggagatgcttgccgacaaggcggcgcttgtcgttgaagtggtcgaggaaaattatcatgatgcgccgatcgtcggcatcgctgtggtcaacgaacatggacggtttttcctgcgcccggagacggcgcttgccgatccgcagtttgtcgcctggcttggtgatgaaacgaagaaaaaaagcatgtttgactcaaagcgcgcggcagtcgccttgaaatggaaaggaattgagctatgcggcgtttcctttgatttattgctggccgcctatttgcttgatccggcgcaaggtgttgatgatgtggctgccgcagcaaaaatgaagcaatacgaagcggtgcgctcggatgaagcggtgtatggcaaaggggcgaagcgggccgtgccggatgagccagtgctcgccgagcatctcgtccgcaaggcggcggcgatttgggcgctcgaacgtccgtttttggatgagctgcgccgcaacgaacaagatcggttgctcgtcgagctcgagcagccgttgtcttcgattttggcggaaatggaatttgccggagtgaaagtggatacgaagcggctcgaacagatgggcgaagagctcgccgagcagctgcgcacggtcgagcagcgcatttatgagctcgccggccaagaattcaacatcaattcaccgaaacagctcggcgtcattttatttgaaaaactgcagctgcccgtcttgaaaaaaacgaaaaccggctactccacttcggcggatgtgcttgaaaaacttgcgccttatcacgagatcgtggaaaacattttgcattaccgccagcttggcaagttgcagtcgacgtatattgaaggattgctgaaagtcgtgcgacccgatacaaagaaggtgcatacgattttcaatcaggcgtctacgcaaaccggacggctcagctcgacggagccgaacttgcaaaacattccgattcggcttgaggaaggacggaaaatccgccaagcgttcgtgccgtcggagtctgattggctcattttcgctgccgactactcgcaaattgagttgcgcgtcctcgcccatattgcggaagatgacaatttaatggaagcgttccgccgcgatttggatatccatacgaaaacagcgatggacattttccaagtgagcgaggacgaagtgacgcccaacatgcgccgtcaggcgaaggcggtcaactttgggatcgtttacgggatcagtgattacggcttggcgcaaaacttaaatatttcacgcaaagaggccgctgaattcatcgagcgctacttcgaaagcttccctggcgtgaagcggtatatggaaaacattgtgcaagaagcaaaacagaaagggtatgtgacgacgctgctgcatcggcgccgctatttgccggatatcacgagccgcaacttcaacgtccgcagctttgctgaacggatggcgatgaacacgccgattcaagggagcgccgctgacattattaaaaaggcgatgatcgatctgaacgctagactgaaggaagagcggctgcaagcgcgccttttgctacaggtgcatgacgagctcattttggaggcgccgaaagaagagatggagcggctgtgccggctcgttccggaagtgatggagcaagcggtcacacttcgcgtgccgctcaaagtcgattaccattatggctcgacgtggtatgacgcgaaataaaaaggatcc

SEQ ID NO: 2663 - DNA, 2712 bp, Artificial Sequence
  Description of Artificial Sequence: Synthetic DNA sequence of Bacillus caldolyticus EA1 DNA polymerase L634Y
atgaaatacctgctgccgaccgctgctgctggtctgctgctcctcgctgcccagccggcgatggccatgggattgaaaaaaaagcttgttttaatcgacggcagcagcgtggcgtaccgcgcctttttcgccttgccgcttttgcataacgacaaaggcatccatacgaacgccgtctacgggtttacgatgatgttgaataaaattttggcggaagaagagccaactcatatgcttgtcgcgtttgacgccgggaaaacgacgttccggcatgaagcgtttcaagagtataaaggtgggcgccagcagacgccaccggagctgtcggagcagtttccgctgttgcgcgagctgctgagggcgtatcgcatccccgcctatgaactcgagaactacgaagcggacgatattatcggaacgcttgccgcccgcgctgagcaggaagggtttgaggtgaaagtcatttccggcgaccgcgatctgacccagctcgcctccccccatgtgacggtggacattacgaaaaaagggattaccgatatcgaaccgtacacgccggaggcggtccgcgaaaaatacggcttaactccggaacaaatcgttgatttgaaaggattgatgggcgacaaatcggacaacattcccggagtgccgggcatcggggaaaagacggcggtcaagctgctcaagcaattcggcacggtcgaaaacgtgcttgcctccattgacgagatcaaaggcgaaaagttgaaagaaacgctgcgccaacaccgggagatggcgctgttaagcaaaaagctcgccgccattcgccgcgacgccccggtcgagctctcgcttgatgacatcgtctatcaaggggaagaccgggagaaagtggtcgctttatttaaagagcttgggtttcaatcgtttttagagaaaatggaatcgccgtcatcagaagaggaaaaaccgcttgccaagatggcatttacgcttgctgaccgcgtgacggaggagatgcttgccgacaaggcggcgcttgtcgttgaagtggtcgaggaaaattatcatgatgcgccgatcgtcggcatcgctgtggtcaacgaacatggacggtttttcctgcgcccggagacggcgcttgccgatccgcagtttgtcgcctggcttggtgatgaaacgaagaaaaaaagcatgtttgactcaaagcgcgcggcagtcgccttgaaatggaaaggaattgagctatgcggcgtttcctttgatttattgctggccgcctatttgcttgatccggcgcaaggtgttgatgatgtggctgccgcagcaaaaatgaagcaatacgaagcggtgcgctcggatgaagcggtgtatggcaaaggggcgaagcgggccgtgccggatgagccagtgctcgccgagcatctcgtccgcaaggcggcggcgatttgggcgctcgaacgtccgtttttggatgagctgcgccgcaacgaacaagatcggttgctcgtcgagctcgagcagccgttgtcttcgattttggcggaaatggaatttgccggagtgaaagtggatacgaagcggctcgaacagatgggcgaagagctcgccgagcagctgcgcacggtcgagcagcgcatttatgagctcgccggccaagaattcaacatcaattcaccgaaacagctcggcgtcattttatttgaaaaactgcagctgcccgtcttgaaaaaaacgaaaaccggctactccacttcggcggatgtgcttgaaaaacttgcgccttatcacgagatcgtggaaaacattttgcattaccgccagcttggcaagttgcagtcgacgtatattgaaggattgctgaaagtcgtgcgacccgatacaaagaaggtgcatacgattttcaatcaggcgtatacgcaaaccggacggctcagctcgacggagccgaacttgcaaaacattccgattcggcttgaggaaggacggaaaatccgccaagcgttcgtgccgtcggagtctgattggctcattttcgctgccgactactcgcaaattgagttgcgcgtcctcgcccatattgcggaagatgacaatttaatggaagcgttccgccgcgatttggatatccatacgaaaacagcgatggacattttccaagtgagcgaggacgaagtgacgcccaacatgcgccgtcaggcgaaggcggtcaactttgggatcgtttacgggatcagtgattacggcttggcgcaaaacttaaatatttcacgcaaagaggccgctgaattcatcgagcgctacttcgaaagcttccctggcgtgaagcggtatatggaaaacattgtgcaagaagcaaaacagaaagggtatgtgacgacgctgctgcatcggcgccgctatttgccggatatcacgagccgcaacttcaacgtccgcagctttgctgaacggatggcgatgaacacgccgattcaagggagcgccgctgacattattaaaaaggcgatgatcgatctgaacgctagactgaaggaagagcggctgcaagcgcgccttttgctacaggtgcatgacgagctcattttggaggcgccgaaagaagagatggagcggctgtgccggctcgttccggaagtgatggagcaagcggtcacacttcgcgtgccgctcaaagtcgattaccattatggctcgacgtggtatgacgcgaaataaaaaggatcc

SEQ ID NO: 2664 - DNA, 2712 bp, Artificial Sequence
  Description of Artificial Sequence: Synthetic DNA sequence of Bacillus caldolyticus EA1 DNA polymerase L634W
atgaaatacctgctgccgaccgctgctgctggtctgctgctcctcgctgcccagccggcgatggccatgggattgaaaaaaaagcttgttttaatcgacggcagcagcgtggcgtaccgcgcctttttcgccttgccgcttttgcataacgacaaaggcatccatacgaacgccgtctacgggtttacgatgatgttgaataaaattttggcggaagaagagccaactcatatgcttgtcgcgtttgacgccgggaaaacgacgttccggcatgaagcgtttcaagagtataaaggtgggcgccagcagacgccaccggagctgtcggagcagtttccgctgttgcgcgagctgctgagggcgtatcgcatccccgcctatgaactcgagaactacgaagcggacgatattatcggaacgcttgccgcccgcgctgagcaggaagggtttgaggtgaaagtcatttccggcgaccgcgatctgacccagctcgcctccccccatgtgacggtggacattacgaaaaaagggattaccgatatcgaaccgtacacgccggaggcggtccgcgaaaaatacggcttaactccggaacaaatcgttgatttgaaaggattgatgggcgacaaatcggacaacattcccggagtgccgggcatcggggaaaagacggcggtcaagctgctcaagcaattcggcacggtcgaaaacgtgcttgcctccattgacgagatcaaaggcgaaaagttgaaagaaacgctgcgccaacaccgggagatggcgctgttaagcaaaaagctcgccgccattcgccgcgacgccccggtcgagctctcgcttgatgacatcgtctatcaaggggaagaccgggagaaagtggtcgctttatttaaagagcttgggtttcaatcgtttttagagaaaatggaatcgccgtcatcagaagaggaaaaaccgcttgccaagatggcatttacgcttgctgaccgcgtgacggaggagatgcttgccgacaaggcggcgcttgtcgttgaagtggtcgaggaaaattatcatgatgcgccgatcgtcggcatcgctgtggtcaacgaacatggacggtttttcctgcgcccggagacggcgcttgccgatccgcagtttgtcgcctggcttggtgatgaaacgaagaaaaaaagcatgtttgactcaaagcgcgcggcagtcgccttgaaatggaaaggaattgagctatgcggcgtttcctttgatttattgctggccgcctatttgcttgatccggcgcaaggtgttgatgatgtggctgccgcagcaaaaatgaagcaatacgaagcggtgcgctcggatgaagcggtgtatggcaaaggggcgaagcgggccgtgccggatgagccagtgctcgccgagcatctcgtccgcaaggcggcggcgatttgggcgctcgaacgtccgtttttggatgagctgcgccgcaacgaacaagatcggttgctcgtcgagctcgagcagccgttgtcttcgattttggcggaaatggaatttgccggagtgaaagtggatacgaagcggctcgaacagatgggcgaagagctcgccgagcagctgcgcacggtcgagcagcgcatttatgagctcgccggccaagaattcaacatcaattcaccgaaacagctcggcgtcattttatttgaaaaactgcagctgcccgtcttgaaaaaaacgaaaaccggctactccacttcggcggatgtgcttgaaaaacttgcgccttatcacgagatcgtggaaaacattttgcattaccgccagcttggcaagttgcagtcgacgtatattgaaggattgctgaaagtcgtgcgacccgatacaaagaaggtgcatacgattttcaatcaggcgtggacgcaaaccggacggctcagctcgacggagccgaacttgcaaaacattccgattcggcttgaggaaggacggaaaatccgccaagcgttcgtgccgtcggagtctgattggctcattttcgctgccgactactcgcaaattgagttgcgcgtcctcgcccatattgcggaagatgacaatttaatggaagcgttccgccgcgatttggatatccatacgaaaacagcgatggacattttccaagtgagcgaggacgaagtgacgcccaacatgcgccgtcaggcgaaggcggtcaactttgggatcgtttacgggatcagtgattacggcttggcgcaaaacttaaatatttcacgcaaagaggccgctgaattcatcgagcgctacttcgaaagcttccctggcgtgaagcggtatatggaaaacattgtgcaagaagcaaaacagaaagggtatgtgacgacgctgctgcatcggcgccgctatttgccggatatcacgagccgcaacttcaacgtccgcagctttgctgaacggatggcgatgaacacgccgattcaagggagcgccgctgacattattaaaaaggcgatgatcgatctgaacgctagactgaaggaagagcggctgcaagcgcgccttttgctacaggtgcatgacgagctcattttggaggcgccgaaagaagagatggagcggctgtgccggctcgttccggaagtgatggagcaagcggtcacacttcgcgtgccgctcaaagtcgattaccattatggctcgacgtggtatgacgcgaaataaaaaggatcc

SEQ ID NO: 2665 - DNA, 2712 bp, Artificial Sequence
  Description of Artificial Sequence: Synthetic DNA sequence of Bacillus caldolyticus EA1 DNA polymerase L634P
atgaaatacctgctgccgaccgctgctgctggtctgctgctcctcgctgcccagccggcgatggccatgggattgaaaaaaaagcttgttttaatcgacggcagcagcgtggcgtaccgcgcctttttcgccttgccgcttttgcataacgacaaaggcatccatacgaacgccgtctacgggtttacgatgatgttgaataaaattttggcggaagaagagccaactcatatgcttgtcgcgtttgacgccgggaaaacgacgttccggcatgaagcgtttcaagagtataaaggtgggcgccagcagacgccaccggagctgtcggagcagtttccgctgttgcgcgagctgctgagggcgtatcgcatccccgcctatgaactcgagaactacgaagcggacgatattatcggaacgcttgccgcccgcgctgagcaggaagggtttgaggtgaaagtcatttccggcgaccgcgatctgacccagctcgcctccccccatgtgacggtggacattacgaaaaaagggattaccgatatcgaaccgtacacgccggaggcggtccgcgaaaaatacggcttaactccggaacaaatcgttgatttgaaaggattgatgggcgacaaatcggacaacattcccggagtgccgggcatcggggaaaagacggcggtcaagctgctcaagcaattcggcacggtcgaaaacgtgcttgcctccattgacgagatcaaaggcgaaaagttgaaagaaacgctgcgccaacaccgggagatggcgctgttaagcaaaaagctcgccgccattcgccgcgacgccccggtcgagctctcgcttgatgacatcgtctatcaaggggaagaccgggagaaagtggtcgctttatttaaagagcttgggtttcaatcgtttttagagaaaatggaatcgccgtcatcagaagaggaaaaaccgcttgccaagatggcatttacgcttgctgaccgcgtgacggaggagatgcttgccgacaaggcggcgcttgtcgttgaagtggtcgaggaaaattatcatgatgcgccgatcgtcggcatcgctgtggtcaacgaacatggacggtttttcctgcgcccggagacggcgcttgccgatccgcagtttgtcgcctggcttggtgatgaaacgaagaaaaaaagcatgtttgactcaaagcgcgcggcagtcgccttgaaatggaaaggaattgagctatgcggcgtttcctttgatttattgctggccgcctatttgcttgatccggcgcaaggtgttgatgatgtggctgccgcagcaaaaatgaagcaatacgaagcggtgcgctcggatgaagcggtgtatggcaaaggggcgaagcgggccgtgccggatgagccagtgctcgccgagcatctcgtccgcaaggcggcggcgatttgggcgctcgaacgtccgtttttggatgagctgcgccgcaacgaacaagatcggttgctcgtcgagctcgagcagccgttgtcttcgattttggcggaaatggaatttgccggagtgaaagtggatacgaagcggctcgaacagatgggcgaagagctcgccgagcagctgcgcacggtcgagcagcgcatttatgagctcgccggccaagaattcaacatcaattcaccgaaacagctcggcgtcattttatttgaaaaactgcagctgcccgtcttgaaaaaaacgaaaaccggctactccacttcggcggatgtgcttgaaaaacttgcgccttatcacgagatcgtggaaaacattttgcattaccgccagcttggcaagttgcagtcgacgtatattgaaggattgctgaaagtcgtgcgacccgatacaaagaaggtgcatacgattttcaatcaggcgcctacgcaaaccggacggctcagctcgacggagccgaacttgcaaaacattccgattcggcttgaggaaggacggaaaatccgccaagcgttcgtgccgtcggagtctgattggctcattttcgctgccgactactcgcaaattgagttgcgcgtcctcgcccatattgcggaagatgacaatttaatggaagcgttccgccgcgatttggatatccatacgaaaacagcgatggacattttccaagtgagcgaggacgaagtgacgcccaacatgcgccgtcaggcgaaggcggtcaactttgggatcgtttacgggatcagtgattacggcttggcgcaaaacttaaatatttcacgcaaagaggccgctgaattcatcgagcgctacttcgaaagcttccctggcgtgaagcggtatatggaaaacattgtgcaagaagcaaaacagaaagggtatgtgacgacgctgctgcatcggcgccgctatttgccggatatcacgagccgcaacttcaacgtccgcagctttgctgaacggatggcgatgaacacgccgattcaagggagcgccgctgacattattaaaaaggcgatgatcgatctgaacgctagactgaaggaagagcggctgcaagcgcgccttttgctacaggtgcatgacgagctcattttggaggcgccgaaagaagagatggagcggctgtgccggctcgttccggaagtgatggagcaagcggtcacacttcgcgtgccgctcaaagtcgattaccattatggctcgacgtggtatgacgcgaaataaaaaggatcc

SEQ ID NO: 2666 - DNA, 2712 bp, Artificial Sequence
  Description of Artificial Sequence: Synthetic DNA sequence of Bacillus caldolyticus EA1 DNA polymerase L634M
atgaaatacctgctgccgaccgctgctgctggtctgctgctcctcgctgcccagccggcgatggccatgggattgaaaaaaaagcttgttttaatcgacggcagcagcgtggcgtaccgcgcctttttcgccttgccgcttttgcataacgacaaaggcatccatacgaacgccgtctacgggtttacgatgatgttgaataaaattttggcggaagaagagccaactcatatgcttgtcgcgtttgacgccgggaaaacgacgttccggcatgaagcgtttcaagagtataaaggtgggcgccagcagacgccaccggagctgtcggagcagtttccgctgttgcgcgagctgctgagggcgtatcgcatccccgcctatgaactcgagaactacgaagcggacgatattatcggaacgcttgccgcccgcgctgagcaggaagggtttgaggtgaaagtcatttccggcgaccgcgatctgacccagctcgcctccccccatgtgacggtggacattacgaaaaaagggattaccgatatcgaaccgtacacgccggaggcggtccgcgaaaaatacggcttaactccggaacaaatcgttgatttgaaaggattgatgggcgacaaatcggacaacattcccggagtgccgggcatcggggaaaagacggcggtcaagctgctcaagcaattcggcacggtcgaaaacgtgcttgcctccattgacgagatcaaaggcgaaaagttgaaagaaacgctgcgccaacaccgggagatggcgctgttaagcaaaaagctcgccgccattcgccgcgacgccccggtcgagctctcgcttgatgacatcgtctatcaaggggaagaccgggagaaagtggtcgctttatttaaagagcttgggtttcaatcgtttttagagaaaatggaatcgccgtcatcagaagaggaaaaaccgcttgccaagatggcatttacgcttgctgaccgcgtgacggaggagatgcttgccgacaaggcggcgcttgtcgttgaagtggtcgaggaaaattatcatgatgcgccgatcgtcggcatcgctgtggtcaacgaacatggacggtttttcctgcgcccggagacggcgcttgccgatccgcagtttgtcgcctggcttggtgatgaaacgaagaaaaaaagcatgtttgactcaaagcgcgcggcagtcgccttgaaatggaaaggaattgagctatgcggcgtttcctttgatttattgctggccgcctatttgcttgatccggcgcaaggtgttgatgatgtggctgccgcagcaaaaatgaagcaatacgaagcggtgcgctcggatgaagcggtgtatggcaaaggggcgaagcgggccgtgccggatgagccagtgctcgccgagcatctcgtccgcaaggcggcggcgatttgggcgctcgaacgtccgtttttggatgagctgcgccgcaacgaacaagatcggttgctcgtcgagctcgagcagccgttgtcttcgattttggcggaaatggaatttgccggagtgaaagtggatacgaagcggctcgaacagatgggcgaagagctcgccgagcagctgcgcacggtcgagcagcgcatttatgagctcgccggccaagaattcaacatcaattcaccgaaacagctcggcgtcattttatttgaaaaactgcagctgcccgtcttgaaaaaaacgaaaaccggctactccacttcggcggatgtgcttgaaaaacttgcgccttatcacgagatcgtggaaaacattttgcattaccgccagcttggcaagttgcagtcgacgtatattgaaggattgctgaaagtcgtgcgacccgatacaaagaaggtgcatacgattttcaatcaggcgatgacgcaaaccggacggctcagctcgacggagccgaacttgcaaaacattccgattcggcttgaggaaggacggaaaatccgccaagcgttcgtgccgtcggagtctgattggctcattttcgctgccgactactcgcaaattgagttgcgcgtcctcgcccatattgcggaagatgacaatttaatggaagcgttccgccgcgatttggatatccatacgaaaacagcgatggacattttccaagtgagcgaggacgaagtgacgcccaacatgcgccgtcaggcgaaggcggtcaactttgggatcgtttacgggatcagtgattacggcttggcgcaaaacttaaatatttcacgcaaagaggccgctgaattcatcgagcgctacttcgaaagcttccctggcgtgaagcggtatatggaaaacattgtgcaagaagcaaaacagaaagggtatgtgacgacgctgctgcatcggcgccgctatttgccggatatcacgagccgcaacttcaacgtccgcagctttgctgaacggatggcgatgaacacgccgattcaagggagcgccgctgacattattaaaaaggcgatgatcgatctgaacgctagactgaaggaagagcggctgcaagcgcgccttttgctacaggtgcatgacgagctcattttggaggcgccgaaagaagagatggagcggctgtgccggctcgttccggaagtgatggagcaagcggtcacacttcgcgtgccgctcaaagtcgattaccattatggctcgacgtggtatgacgcgaaataaaaaggatcc

SEQ ID NO: 2667 - DNA, 2712 bp, Artificial Sequence
  Description of Artificial Sequence: Synthetic DNA sequence of Bacillus caldolyticus EA1 DNA polymerase L634T
atgaaatacctgctgccgaccgctgctgctggtctgctgctcctcgctgcccagccggcgatggccatgggattgaaaaaaaagcttgttttaatcgacggcagcagcgtggcgtaccgcgcctttttcgccttgccgcttttgcataacgacaaaggcatccatacgaacgccgtctacgggtttacgatgatgttgaataaaattttggcggaagaagagccaactcatatgcttgtcgcgtttgacgccgggaaaacgacgttccggcatgaagcgtttcaagagtataaaggtgggcgccagcagacgccaccggagctgtcggagcagtttccgctgttgcgcgagctgctgagggcgtatcgcatccccgcctatgaactcgagaactacgaagcggacgatattatcggaacgcttgccgcccgcgctgagcaggaagggtttgaggtgaaagtcatttccggcgaccgcgatctgacccagctcgcctccccccatgtgacggtggacattacgaaaaaagggattaccgatatcgaaccgtacacgccggaggcggtccgcgaaaaatacggcttaactccggaacaaatcgttgatttgaaaggattgatgggcgacaaatcggacaacattcccggagtgccgggcatcggggaaaagacggcggtcaagctgctcaagcaattcggcacggtcgaaaacgtgcttgcctccattgacgagatcaaaggcgaaaagttgaaagaaacgctgcgccaacaccgggagatggcgctgttaagcaaaaagctcgccgccattcgccgcgacgccccggtcgagctctcgcttgatgacatcgtctatcaaggggaagaccgggagaaagtggtcgctttatttaaagagcttgggtttcaatcgtttttagagaaaatggaatcgccgtcatcagaagaggaaaaaccgcttgccaagatggcatttacgcttgctgaccgcgtgacggaggagatgcttgccgacaaggcggcgcttgtcgttgaagtggtcgaggaaaattatcatgatgcgccgatcgtcggcatcgctgtggtcaacgaacatggacggtttttcctgcgcccggagacggcgcttgccgatccgcagtttgtcgcctggcttggtgatgaaacgaagaaaaaaagcatgtttgactcaaagcgcgcggcagtcgccttgaaatggaaaggaattgagctatgcggcgtttcctttgatttattgctggccgcctatttgcttgatccggcgcaaggtgttgatgatgtggctgccgcagcaaaaatgaagcaatacgaagcggtgcgctcggatgaagcggtgtatggcaaaggggcgaagcgggccgtgccggatgagccagtgctcgccgagcatctcgtccgcaaggcggcggcgatttgggcgctcgaacgtccgtttttggatgagctgcgccgcaacgaacaagatcggttgctcgtcgagctcgagcagccgttgtcttcgattttggcggaaatggaatttgccggagtgaaagtggatacgaagcggctcgaacagatgggcgaagagctcgccgagcagctgcgcacggtcgagcagcgcatttatgagctcgccggccaagaattcaacatcaattcaccgaaacagctcggcgtcattttatttgaaaaactgcagctgcccgtcttgaaaaaaacgaaaaccggctactccacttcggcggatgtgcttgaaaaacttgcgccttatcacgagatcgtggaaaacattttgcattaccgccagcttggcaagttgcagtcgacgtatattgaaggattgctgaaagtcgtgcgacccgatacaaagaaggtgcatacgattttcaatcaggcgactacgcaaaccggacggctcagctcgacggagccgaacttgcaaaacattccgattcggcttgaggaaggacggaaaatccgccaagcgttcgtgccgtcggagtctgattggctcattttcgctgccgactactcgcaaattgagttgcgcgtcctcgcccatattgcggaagatgacaatttaatggaagcgttccgccgcgatttggatatccatacgaaaacagcgatggacattttccaagtgagcgaggacgaagtgacgcccaacatgcgccgtcaggcgaaggcggtcaactttgggatcgtttacgggatcagtgattacggcttggcgcaaaacttaaatatttcacgcaaagaggccgctgaattcatcgagcgctacttcgaaagcttccctggcgtgaagcggtatatggaaaacattgtgcaagaagcaaaacagaaagggtatgtgacgacgctgctgcatcggcgccgctatttgccggatatcacgagccgcaacttcaacgtccgcagctttgctgaacggatggcgatgaacacgccgattcaagggagcgccgctgacattattaaaaaggcgatgatcgatctgaacgctagactgaaggaagagcggctgcaagcgcgccttttgctacaggtgcatgacgagctcattttggaggcgccgaaagaagagatggagcggctgtgccggctcgttccggaagtgatggagcaagcggtcacacttcgcgtgccgctcaaagtcgattaccattatggctcgacgtggtatgacgcgaaataaaaaggatcc

SEQ ID NO: 2668 - DNA, 2712 bp, Artificial Sequence
  Description of Artificial Sequence: Synthetic DNA sequence of Bacillus caldolyticus EA1 DNA polymerase L634N
atgaaatacctgctgccgaccgctgctgctggtctgctgctcctcgctgcccagccggcgatggccatgggattgaaaaaaaagcttgttttaatcgacggcagcagcgtggcgtaccgcgcctttttcgccttgccgcttttgcataacgacaaaggcatccatacgaacgccgtctacgggtttacgatgatgttgaataaaattttggcggaagaagagccaactcatatgcttgtcgcgtttgacgccgggaaaacgacgttccggcatgaagcgtttcaagagtataaaggtgggcgccagcagacgccaccggagctgtcggagcagtttccgctgttgcgcgagctgctgagggcgtatcgcatccccgcctatgaactcgagaactacgaagcggacgatattatcggaacgcttgccgcccgcgctgagcaggaagggtttgaggtgaaagtcatttccggcgaccgcgatctgacccagctcgcctccccccatgtgacggtggacattacgaaaaaagggattaccgatatcgaaccgtacacgccggaggcggtccgcgaaaaatacggcttaactccggaacaaatcgttgatttgaaaggattgatgggcgacaaatcggacaacattcccggagtgccgggcatcggggaaaagacggcggtcaagctgctcaagcaattcggcacggtcgaaaacgtgcttgcctccattgacgagatcaaaggcgaaaagttgaaagaaacgctgcgccaacaccgggagatggcgctgttaagcaaaaagctcgccgccattcgccgcgacgccccggtcgagctctcgcttgatgacatcgtctatcaaggggaagaccgggagaaagtggtcgctttatttaaagagcttgggtttcaatcgtttttagagaaaatggaatcgccgtcatcagaagaggaaaaaccgcttgccaagatggcatttacgcttgctgaccgcgtgacggaggagatgcttgccgacaaggcggcgcttgtcgttgaagtggtcgaggaaaattatcatgatgcgccgatcgtcggcatcgctgtggtcaacgaacatggacggtttttcctgcgcccggagacggcgcttgccgatccgcagtttgtcgcctggcttggtgatgaaacgaagaaaaaaagcatgtttgactcaaagcgcgcggcagtcgccttgaaatggaaaggaattgagctatgcggcgtttcctttgatttattgctggccgcctatttgcttgatccggcgcaaggtgttgatgatgtggctgccgcagcaaaaatgaagcaatacgaagcggtgcgctcggatgaagcggtgtatggcaaaggggcgaagcgggccgtgccggatgagccagtgctcgccgagcatctcgtccgcaaggcggcggcgatttgggcgctcgaacgtccgtttttggatgagctgcgccgcaacgaacaagatcggttgctcgtcgagctcgagcagccgttgtcttcgattttggcggaaatggaatttgccggagtgaaagtggatacgaagcggctcgaacagatgggcgaagagctcgccgagcagctgcgcacggtcgagcagcgcatttatgagctcgccggccaagaattcaacatcaattcaccgaaacagctcggcgtcattttatttgaaaaactgcagctgcccgtcttgaaaaaaacgaaaaccggctactccacttcggcggatgtgcttgaaaaacttgcgccttatcacgagatcgtggaaaacattttgcattaccgccagcttggcaagttgcagtcgacgtatattgaaggattgctgaaagtcgtgcgacccgatacaaagaaggtgcatacgattttcaatcaggcgaatacgcaaaccggacggctcagctcgacggagccgaacttgcaaaacattccgattcggcttgaggaaggacggaaaatccgccaagcgttcgtgccgtcggagtctgattggctcattttcgctgccgactactcgcaaattgagttgcgcgtcctcgcccatattgcggaagatgacaatttaatggaagcgttccgccgcgatttggatatccatacgaaaacagcgatggacattttccaagtgagcgaggacgaagtgacgcccaacatgcgccgtcaggcgaaggcggtcaactttgggatcgtttacgggatcagtgattacggcttggcgcaaaacttaaatatttcacgcaaagaggccgctgaattcatcgagcgctacttcgaaagcttccctggcgtgaagcggtatatggaaaacattgtgcaagaagcaaaacagaaagggtatgtgacgacgctgctgcatcggcgccgctatttgccggatatcacgagccgcaacttcaacgtccgcagctttgctgaacggatggcgatgaacacgccgattcaagggagcgccgctgacattattaaaaaggcgatgatcgatctgaacgctagactgaaggaagagcggctgcaagcgcgccttttgctacaggtgcatgacgagctcattttggaggcgccgaaagaagagatggagcggctgtgccggctcgttccggaagtgatggagcaagcggtcacacttcgcgtgccgctcaaagtcgattaccattatggctcgacgtggtatgacgcgaaataaaaaggatcc

SEQ ID NO: 2669 - DNA, 2712 bp, Artificial Sequence
  Description of Artificial Sequence: Synthetic DNA sequence of Bacillus caldolyticus EA1 DNA polymerase L634V
atgaaatacctgctgccgaccgctgctgctggtctgctgctcctcgctgcccagccggcgatggccatgggattgaaaaaaaagcttgttttaatcgacggcagcagcgtggcgtaccgcgcctttttcgccttgccgcttttgcataacgacaaaggcatccatacgaacgccgtctacgggtttacgatgatgttgaataaaattttggcggaagaagagccaactcatatgcttgtcgcgtttgacgccgggaaaacgacgttccggcatgaagcgtttcaagagtataaaggtgggcgccagcagacgccaccggagctgtcggagcagtttccgctgttgcgcgagctgctgagggcgtatcgcatccccgcctatgaactcgagaactacgaagcggacgatattatcggaacgcttgccgcccgcgctgagcaggaagggtttgaggtgaaagtcatttccggcgaccgcgatctgacccagctcgcctccccccatgtgacggtggacattacgaaaaaagggattaccgatatcgaaccgtacacgccggaggcggtccgcgaaaaatacggcttaactccggaacaaatcgttgatttgaaaggattgatgggcgacaaatcggacaacattcccggagtgccgggcatcggggaaaagacggcggtcaagctgctcaagcaattcggcacggtcgaaaacgtgcttgcctccattgacgagatcaaaggcgaaaagttgaaagaaacgctgcgccaacaccgggagatggcgctgttaagcaaaaagctcgccgccattcgccgcgacgccccggtcgagctctcgcttgatgacatcgtctatcaaggggaagaccgggagaaagtggtcgctttatttaaagagcttgggtttcaatcgtttttagagaaaatggaatcgccgtcatcagaagaggaaaaaccgcttgccaagatggcatttacgcttgctgaccgcgtgacggaggagatgcttgccgacaaggcggcgcttgtcgttgaagtggtcgaggaaaattatcatgatgcgccgatcgtcggcatcgctgtggtcaacgaacatggacggtttttcctgcgcccggagacggcgcttgccgatccgcagtttgtcgcctggcttggtgatgaaacgaagaaaaaaagcatgtttgactcaaagcgcgcggcagtcgccttgaaatggaaaggaattgagctatgcggcgtttcctttgatttattgctggccgcctatttgcttgatccggcgcaaggtgttgatgatgtggctgccgcagcaaaaatgaagcaatacgaagcggtgcgctcggatgaagcggtgtatggcaaaggggcgaagcgggccgtgccggatgagccagtgctcgccgagcatctcgtccgcaaggcggcggcgatttgggcgctcgaacgtccgtttttggatgagctgcgccgcaacgaacaagatcggttgctcgtcgagctcgagcagccgttgtcttcgattttggcggaaatggaatttgccggagtgaaagtggatacgaagcggctcgaacagatgggcgaagagctcgccgagcagctgcgcacggtcgagcagcgcatttatgagctcgccggccaagaattcaacatcaattcaccgaaacagctcggcgtcattttatttgaaaaactgcagctgcccgtcttgaaaaaaacgaaaaccggctactccacttcggcggatgtgcttgaaaaacttgcgccttatcacgagatcgtggaaaacattttgcattaccgccagcttggcaagttgcagtcgacgtatattgaaggattgctgaaagtcgtgcgacccgatacaaagaaggtgcatacgattttcaatcaggcggtcacgcaaaccggacggctcagctcgacggagccgaacttgcaaaacattccgattcggcttgaggaaggacggaaaatccgccaagcgttcgtgccgtcggagtctgattggctcattttcgctgccgactactcgcaaattgagttgcgcgtcctcgcccatattgcggaagatgacaatttaatggaagcgttccgccgcgatttggatatccatacgaaaacagcgatggacattttccaagtgagcgaggacgaagtgacgcccaacatgcgccgtcaggcgaaggcggtcaactttgggatcgtttacgggatcagtgattacggcttggcgcaaaacttaaatatttcacgcaaagaggccgctgaattcatcgagcgctacttcgaaagcttccctggcgtgaagcggtatatggaaaacattgtgcaagaagcaaaacagaaagggtatgtgacgacgctgctgcatcggcgccgctatttgccggatatcacgagccgcaacttcaacgtccgcagctttgctgaacggatggcgatgaacacgccgattcaagggagcgccgctgacattattaaaaaggcgatgatcgatctgaacgctagactgaaggaagagcggctgcaagcgcgccttttgctacaggtgcatgacgagctcattttggaggcgccgaaagaagagatggagcggctgtgccggctcgttccggaagtgatggagcaagcggtcacacttcgcgtgccgctcaaagtcgattaccattatggctcgacgtggtatgacgcgaaataaaaaggatcc

SEQ ID NO: 2670 - DNA, 2712 bp, Artificial Sequence
  Description of Artificial Sequence: Synthetic DNA sequence of Bacillus caldolyticus EA1 DNA polymerase T643A
atgaaatacctgctgccgaccgctgctgctggtctgctgctcctcgctgcccagccggcgatggccatgggattgaaaaaaaagcttgttttaatcgacggcagcagcgtggcgtaccgcgcctttttcgccttgccgcttttgcataacgacaaaggcatccatacgaacgccgtctacgggtttacgatgatgttgaataaaattttggcggaagaagagccaactcatatgcttgtcgcgtttgacgccgggaaaacgacgttccggcatgaagcgtttcaagagtataaaggtgggcgccagcagacgccaccggagctgtcggagcagtttccgctgttgcgcgagctgctgagggcgtatcgcatccccgcctatgaactcgagaactacgaagcggacgatattatcggaacgcttgccgcccgcgctgagcaggaagggtttgaggtgaaagtcatttccggcgaccgcgatctgacccagctcgcctccccccatgtgacggtggacattacgaaaaaagggattaccgatatcgaaccgtacacgccggaggcggtccgcgaaaaatacggcttaactccggaacaaatcgttgatttgaaaggattgatgggcgacaaatcggacaacattcccggagtgccgggcatcggggaaaagacggcggtcaagctgctcaagcaattcggcacggtcgaaaacgtgcttgcctccattgacgagatcaaaggcgaaaagttgaaagaaacgctgcgccaacaccgggagatggcgctgttaagcaaaaagctcgccgccattcgccgcgacgccccggtcgagctctcgcttgatgacatcgtctatcaaggggaagaccgggagaaagtggtcgctttatttaaagagcttgggtttcaatcgtttttagagaaaatggaatcgccgtcatcagaagaggaaaaaccgcttgccaagatggcatttacgcttgctgaccgcgtgacggaggagatgcttgccgacaaggcggcgcttgtcgttgaagtggtcgaggaaaattatcatgatgcgccgatcgtcggcatcgctgtggtcaacgaacatggacggtttttcctgcgcccggagacggcgcttgccgatccgcagtttgtcgcctggcttggtgatgaaacgaagaaaaaaagcatgtttgactcaaagcgcgcggcagtcgccttgaaatggaaaggaattgagctatgcggcgtttcctttgatttattgctggccgcctatttgcttgatccggcgcaaggtgttgatgatgtggctgccgcagcaaaaatgaagcaatacgaagcggtgcgctcggatgaagcggtgtatggcaaaggggcgaagcgggccgtgccggatgagccagtgctcgccgagcatctcgtccgcaaggcggcggcgatttgggcgctcgaacgtccgtttttggatgagctgcgccgcaacgaacaagatcggttgctcgtcgagctcgagcagccgttgtcttcgattttggcggaaatggaatttgccggagtgaaagtggatacgaagcggctcgaacagatgggcgaagagctcgccgagcagctgcgcacggtcgagcagcgcatttatgagctcgccggccaagaattcaacatcaattcaccgaaacagctcggcgtcattttatttgaaaaactgcagctgcccgtcttgaaaaaaacgaaaaccggctactccacttcggcggatgtgcttgaaaaacttgcgccttatcacgagatcgtggaaaacattttgcattaccgccagcttggcaagttgcagtcgacgtatattgaaggattgctgaaagtcgtgcgacccgatacaaagaaggtgcatacgattttcaatcaggcgttgacgcaaaccggacggctcagctcggctgagccgaacttgcaaaacattccgattcggcttgaggaaggacggaaaatccgccaagcgttcgtgccgtcggagtctgattggctcattttcgctgccgactactcgcaaattgagttgcgcgtcctcgcccatattgcggaagatgacaatttaatggaagcgttccgccgcgatttggatatccatacgaaaacagcgatggacattttccaagtgagcgaggacgaagtgacgcccaacatgcgccgtcaggcgaaggcggtcaactttgggatcgtttacgggatcagtgattacggcttggcgcaaaacttaaatatttcacgcaaagaggccgctgaattcatcgagcgctacttcgaaagcttccctggcgtgaagcggtatatggaaaacattgtgcaagaagcaaaacagaaagggtatgtgacgacgctgctgcatcggcgccgctatttgccggatatcacgagccgcaacttcaacgtccgcagctttgctgaacggatggcgatgaacacgccgattcaagggagcgccgctgacattattaaaaaggcgatgatcgatctgaacgctagactgaaggaagagcggctgcaagcgcgccttttgctacaggtgcatgacgagctcattttggaggcgccgaaagaagagatggagcggctgtgccggctcgttccggaagtgatggagcaagcggtcacacttcgcgtgccgctcaaagtcgattaccattatggctcgacgtggtatgacgcgaaataaaaaggatcc

SEQ ID NO: 2671 - DNA, 2712 bp, Artificial Sequence
  Description of Artificial Sequence: Synthetic DNA sequence of Bacillus caldolyticus EA1 DNA polymerase T643R
atgaaatacctgctgccgaccgctgctgctggtctgctgctcctcgctgcccagccggcgatggccatgggattgaaaaaaaagcttgttttaatcgacggcagcagcgtggcgtaccgcgcctttttcgccttgccgcttttgcataacgacaaaggcatccatacgaacgccgtctacgggtttacgatgatgttgaataaaattttggcggaagaagagccaactcatatgcttgtcgcgtttgacgccgggaaaacgacgttccggcatgaagcgtttcaagagtataaaggtgggcgccagcagacgccaccggagctgtcggagcagtttccgctgttgcgcgagctgctgagggcgtatcgcatccccgcctatgaactcgagaactacgaagcggacgatattatcggaacgcttgccgcccgcgctgagcaggaagggtttgaggtgaaagtcatttccggcgaccgcgatctgacccagctcgcctccccccatgtgacggtggacattacgaaaaaagggattaccgatatcgaaccgtacacgccggaggcggtccgcgaaaaatacggcttaactccggaacaaatcgttgatttgaaaggattgatgggcgacaaatcggacaacattcccggagtgccgggcatcggggaaaagacggcggtcaagctgctcaagcaattcggcacggtcgaaaacgtgcttgcctccattgacgagatcaaaggcgaaaagttgaaagaaacgctgcgccaacaccgggagatggcgctgttaagcaaaaagctcgccgccattcgccgcgacgccccggtcgagctctcgcttgatgacatcgtctatcaaggggaagaccgggagaaagtggtcgctttatttaaagagcttgggtttcaatcgtttttagagaaaatggaatcgccgtcatcagaagaggaaaaaccgcttgccaagatggcatttacgcttgctgaccgcgtgacggaggagatgcttgccgacaaggcggcgcttgtcgttgaagtggtcgaggaaaattatcatgatgcgccgatcgtcggcatcgctgtggtcaacgaacatggacggtttttcctgcgcccggagacggcgcttgccgatccgcagtttgtcgcctggcttggtgatgaaacgaagaaaaaaagcatgtttgactcaaagcgcgcggcagtcgccttgaaatggaaaggaattgagctatgcggcgtttcctttgatttattgctggccgcctatttgcttgatccggcgcaaggtgttgatgatgtggctgccgcagcaaaaatgaagcaatacgaagcggtgcgctcggatgaagcggtgtatggcaaaggggcgaagcgggccgtgccggatgagccagtgctcgccgagcatctcgtccgcaaggcggcggcgatttgggcgctcgaacgtccgtttttggatgagctgcgccgcaacgaacaagatcggttgctcgtcgagctcgagcagccgttgtcttcgattttggcggaaatggaatttgccggagtgaaagtggatacgaagcggctcgaacagatgggcgaagagctcgccgagcagctgcgcacggtcgagcagcgcatttatgagctcgccggccaagaattcaacatcaattcaccgaaacagctcggcgtcattttatttgaaaaactgcagctgcccgtcttgaaaaaaacgaaaaccggctactccacttcggcggatgtgcttgaaaaacttgcgccttatcacgagatcgtggaaaacattttgcattaccgccagcttggcaagttgcagtcgacgtatattgaaggattgctgaaagtcgtgcgacccgatacaaagaaggtgcatacgattttcaatcaggcgttgacgcaaaccggacggctcagctcgcgagagccgaacttgcaaaacattccgattcggcttgaggaaggacggaaaatccgccaagcgttcgtgccgtcggagtctgattggctcattttcgctgccgactactcgcaaattgagttgcgcgtcctcgcccatattgcggaagatgacaatttaatggaagcgttccgccgcgatttggatatccatacgaaaacagcgatggacattttccaagtgagcgaggacgaagtgacgcccaacatgcgccgtcaggcgaaggcggtcaactttgggatcgtttacgggatcagtgattacggcttggcgcaaaacttaaatatttcacgcaaagaggccgctgaattcatcgagcgctacttcgaaagcttccctggcgtgaagcggtatatggaaaacattgtgcaagaagcaaaacagaaagggtatgtgacgacgctgctgcatcggcgccgctatttgccggatatcacgagccgcaacttcaacgtccgcagctttgctgaacggatggcgatgaacacgccgattcaagggagcgccgctgacattattaaaaaggcgatgatcgatctgaacgctagactgaaggaagagcggctgcaagcgcgccttttgctacaggtgcatgacgagctcattttggaggcgccgaaagaagagatggagcggctgtgccggctcgttccggaagtgatggagcaagcggtcacacttcgcgtgccgctcaaagtcgattaccattatggctcgacgtggtatgacgcgaaataaaaaggatcc

SEQ ID NO: 2672 - DNA, 2712 bp, Artificial Sequence
  Description of Artificial Sequence: Synthetic DNA sequence of Bacillus caldolyticus EA1 DNA polymerase T643C
atgaaatacctgctgccgaccgctgctgctggtctgctgctcctcgctgcccagccggcgatggccatgggattgaaaaaaaagcttgttttaatcgacggcagcagcgtggcgtaccgcgcctttttcgccttgccgcttttgcataacgacaaaggcatccatacgaacgccgtctacgggtttacgatgatgttgaataaaattttggcggaagaagagccaactcatatgcttgtcgcgtttgacgccgggaaaacgacgttccggcatgaagcgtttcaagagtataaaggtgggcgccagcagacgccaccggagctgtcggagcagtttccgctgttgcgcgagctgctgagggcgtatcgcatccccgcctatgaactcgagaactacgaagcggacgatattatcggaacgcttgccgcccgcgctgagcaggaagggtttgaggtgaaagtcatttccggcgaccgcgatctgacccagctcgcctccccccatgtgacggtggacattacgaaaaaagggattaccgatatcgaaccgtacacgccggaggcggtccgcgaaaaatacggcttaactccggaacaaatcgttgatttgaaaggattgatgggcgacaaatcggacaacattcccggagtgccgggcatcggggaaaagacggcggtcaagctgctcaagcaattcggcacggtcgaaaacgtgcttgcctccattgacgagatcaaaggcgaaaagttgaaagaaacgctgcgccaacaccgggagatggcgctgttaagcaaaaagctcgccgccattcgccgcgacgccccggtcgagctctcgcttgatgacatcgtctatcaaggggaagaccgggagaaagtggtcgctttatttaaagagcttgggtttcaatcgtttttagagaaaatggaatcgccgtcatcagaagaggaaaaaccgcttgccaagatggcatttacgcttgctgaccgcgtgacggaggagatgcttgccgacaaggcggcgcttgtcgttgaagtggtcgaggaaaattatcatgatgcgccgatcgtcggcatcgctgtggtcaacgaacatggacggtttttcctgcgcccggagacggcgcttgccgatccgcagtttgtcgcctggcttggtgatgaaacgaagaaaaaaagcatgtttgactcaaagcgcgcggcagtcgccttgaaatggaaaggaattgagctatgcggcgtttcctttgatttattgctggccgcctatttgcttgatccggcgcaaggtgttgatgatgtggctgccgcagcaaaaatgaagcaatacgaagcggtgcgctcggatgaagcggtgtatggcaaaggggcgaagcgggccgtgccggatgagccagtgctcgccgagcatctcgtccgcaaggcggcggcgatttgggcgctcgaacgtccgtttttggatgagctgcgccgcaacgaacaagatcggttgctcgtcgagctcgagcagccgttgtcttcgattttggcggaaatggaatttgccggagtgaaagtggatacgaagcggctcgaacagatgggcgaagagctcgccgagcagctgcgcacggtcgagcagcgcatttatgagctcgccggccaagaattcaacatcaattcaccgaaacagctcggcgtcattttatttgaaaaactgcagctgcccgtcttgaaaaaaacgaaaaccggctactccacttcggcggatgtgcttgaaaaacttgcgccttatcacgagatcgtggaaaacattttgcattaccgccagcttggcaagttgcagtcgacgtatattgaaggattgctgaaagtcgtgcgacccgatacaaagaaggtgcatacgattttcaatcaggcgttgacgcaaaccggacggctcagctcgtgtgagccgaacttgcaaaacattccgattcggcttgaggaaggacggaaaatccgccaagcgttcgtgccgtcggagtctgattggctcattttcgctgccgactactcgcaaattgagttgcgcgtcctcgcccatattgcggaagatgacaatttaatggaagcgttccgccgcgatttggatatccatacgaaaacagcgatggacattttccaagtgagcgaggacgaagtgacgcccaacatgcgccgtcaggcgaaggcggtcaactttgggatcgtttacgggatcagtgattacggcttggcgcaaaacttaaatatttcacgcaaagaggccgctgaattcatcgagcgctacttcgaaagcttccctggcgtgaagcggtatatggaaaacattgtgcaagaagcaaaacagaaagggtatgtgacgacgctgctgcatcggcgccgctatttgccggatatcacgagccgcaacttcaacgtccgcagctttgctgaacggatggcgatgaacacgccgattcaagggagcgccgctgacattattaaaaaggcgatgatcgatctgaacgctagactgaaggaagagcggctgcaagcgcgccttttgctacaggtgcatgacgagctcattttggaggcgccgaaagaagagatggagcggctgtgccggctcgttccggaagtgatggagcaagcggtcacacttcgcgtgccgctcaaagtcgattaccattatggctcgacgtggtatgacgcgaaataaaaaggatcc

SEQ ID NO: 2673 - DNA, 2712 bp, Artificial Sequence
  Description of Artificial Sequence: Synthetic DNA sequence of Bacillus caldolyticus EA1 DNA polymerase T643G
atgaaatacctgctgccgaccgctgctgctggtctgctgctcctcgctgcccagccggcgatggccatgggattgaaaaaaaagcttgttttaatcgacggcagcagcgtggcgtaccgcgcctttttcgccttgccgcttttgcataacgacaaaggcatccatacgaacgccgtctacgggtttacgatgatgttgaataaaattttggcggaagaagagccaactcatatgcttgtcgcgtttgacgccgggaaaacgacgttccggcatgaagcgtttcaagagtataaaggtgggcgccagcagacgccaccggagctgtcggagcagtttccgctgttgcgcgagctgctgagggcgtatcgcatccccgcctatgaactcgagaactacgaagcggacgatattatcggaacgcttgccgcccgcgctgagcaggaagggtttgaggtgaaagtcatttccggcgaccgcgatctgacccagctcgcctccccccatgtgacggtggacattacgaaaaaagggattaccgatatcgaaccgtacacgccggaggcggtccgcgaaaaatacggcttaactccggaacaaatcgttgatttgaaaggattgatgggcgacaaatcggacaacattcccggagtgccgggcatcggggaaaagacggcggtcaagctgctcaagcaattcggcacggtcgaaaacgtgcttgcctccattgacgagatcaaaggcgaaaagttgaaagaaacgctgcgccaacaccgggagatggcgctgttaagcaaaaagctcgccgccattcgccgcgacgccccggtcgagctctcgcttgatgacatcgtctatcaaggggaagaccgggagaaagtggtcgctttatttaaagagcttgggtttcaatcgtttttagagaaaatggaatcgccgtcatcagaagaggaaaaaccgcttgccaagatggcatttacgcttgctgaccgcgtgacggaggagatgcttgccgacaaggcggcgcttgtcgttgaagtggtcgaggaaaattatcatgatgcgccgatcgtcggcatcgctgtggtcaacgaacatggacggtttttcctgcgcccggagacggcgcttgccgatccgcagtttgtcgcctggcttggtgatgaaacgaagaaaaaaagcatgtttgactcaaagcgcgcggcagtcgccttgaaatggaaaggaattgagctatgcggcgtttcctttgatttattgctggccgcctatttgcttgatccggcgcaaggtgttgatgatgtggctgccgcagcaaaaatgaagcaatacgaagcggtgcgctcggatgaagcggtgtatggcaaaggggcgaagcgggccgtgccggatgagccagtgctcgccgagcatctcgtccgcaaggcggcggcgatttgggcgctcgaacgtccgtttttggatgagctgcgccgcaacgaacaagatcggttgctcgtcgagctcgagcagccgttgtcttcgattttggcggaaatggaatttgccggagtgaaagtggatacgaagcggctcgaacagatgggcgaagagctcgccgagcagctgcgcacggtcgagcagcgcatttatgagctcgccggccaagaattcaacatcaattcaccgaaacagctcggcgtcattttatttgaaaaactgcagctgcccgtcttgaaaaaaacgaaaaccggctactccacttcggcggatgtgcttgaaaaacttgcgccttatcacgagatcgtggaaaacattttgcattaccgccagcttggcaagttgcagtcgacgtatattgaaggattgctgaaagtcgtgcgacccgatacaaagaaggtgcatacgattttcaatcaggcgttgacgcaaaccggacggctcagctcgggtgagccgaacttgcaaaacattccgattcggcttgaggaaggacggaaaatccgccaagcgttcgtgccgtcggagtctgattggctcattttcgctgccgactactcgcaaattgagttgcgcgtcctcgcccatattgcggaagatgacaatttaatggaagcgttccgccgcgatttggatatccatacgaaaacagcgatggacattttccaagtgagcgaggacgaagtgacgcccaacatgcgccgtcaggcgaaggcggtcaactttgggatcgtttacgggatcagtgattacggcttggcgcaaaacttaaatatttcacgcaaagaggccgctgaattcatcgagcgctacttcgaaagcttccctggcgtgaagcggtatatggaaaacattgtgcaagaagcaaaacagaaagggtatgtgacgacgctgctgcatcggcgccgctatttgccggatatcacgagccgcaacttcaacgtccgcagctttgctgaacggatggcgatgaacacgccgattcaagggagcgccgctgacattattaaaaaggcgatgatcgatctgaacgctagactgaaggaagagcggctgcaagcgcgccttttgctacaggtgcatgacgagctcattttggaggcgccgaaagaagagatggagcggctgtgccggctcgttccggaagtgatggagcaagcggtcacacttcgcgtgccgctcaaagtcgattaccattatggctcgacgtggtatgacgcgaaataaaaaggatcc

SEQ ID NO: 2674 - DNA, 2712 bp, Artificial Sequence
  Description of Artificial Sequence: Synthetic DNA sequence of Bacillus caldolyticus EA1 DNA polymerase T643Q
atgaaatacctgctgccgaccgctgctgctggtctgctgctcctcgctgcccagccggcgatggccatgggattgaaaaaaaagcttgttttaatcgacggcagcagcgtggcgtaccgcgcctttttcgccttgccgcttttgcataacgacaaaggcatccatacgaacgccgtctacgggtttacgatgatgttgaataaaattttggcggaagaagagccaactcatatgcttgtcgcgtttgacgccgggaaaacgacgttccggcatgaagcgtttcaagagtataaaggtgggcgccagcagacgccaccggagctgtcggagcagtttccgctgttgcgcgagctgctgagggcgtatcgcatccccgcctatgaactcgagaactacgaagcggacgatattatcggaacgcttgccgcccgcgctgagcaggaagggtttgaggtgaaagtcatttccggcgaccgcgatctgacccagctcgcctccccccatgtgacggtggacattacgaaaaaagggattaccgatatcgaaccgtacacgccggaggcggtccgcgaaaaatacggcttaactccggaacaaatcgttgatttgaaaggattgatgggcgacaaatcggacaacattcccggagtgccgggcatcggggaaaagacggcggtcaagctgctcaagcaattcggcacggtcgaaaacgtgcttgcctccattgacgagatcaaaggcgaaaagttgaaagaaacgctgcgccaacaccgggagatggcgctgttaagcaaaaagctcgccgccattcgccgcgacgccccggtcgagctctcgcttgatgacatcgtctatcaaggggaagaccgggagaaagtggtcgctttatttaaagagcttgggtttcaatcgtttttagagaaaatggaatcgccgtcatcagaagaggaaaaaccgcttgccaagatggcatttacgcttgctgaccgcgtgacggaggagatgcttgccgacaaggcggcgcttgtcgttgaagtggtcgaggaaaattatcatgatgcgccgatcgtcggcatcgctgtggtcaacgaacatggacggtttttcctgcgcccggagacggcgcttgccgatccgcagtttgtcgcctggcttggtgatgaaacgaagaaaaaaagcatgtttgactcaaagcgcgcggcagtcgccttgaaatggaaaggaattgagctatgcggcgtttcctttgatttattgctggccgcctatttgcttgatccggcgcaaggtgttgatgatgtggctgccgcagcaaaaatgaagcaatacgaagcggtgcgctcggatgaagcggtgtatggcaaaggggcgaagcgggccgtgccggatgagccagtgctcgccgagcatctcgtccgcaaggcggcggcgatttgggcgctcgaacgtccgtttttggatgagctgcgccgcaacgaacaagatcggttgctcgtcgagctcgagcagccgttgtcttcgattttggcggaaatggaatttgccggagtgaaagtggatacgaagcggctcgaacagatgggcgaagagctcgccgagcagctgcgcacggtcgagcagcgcatttatgagctcgccggccaagaattcaacatcaattcaccgaaacagctcggcgtcattttatttgaaaaactgcagctgcccgtcttgaaaaaaacgaaaaccggctactccacttcggcggatgtgcttgaaaaacttgcgccttatcacgagatcgtggaaaacattttgcattaccgccagcttggcaagttgcagtcgacgtatattgaaggattgctgaaagtcgtgcgacccgatacaaagaaggtgcatacgattttcaatcaggcgttgacgcaaaccggacggctcagctcgcaagagccgaacttgcaaaacattccgattcggcttgaggaaggacggaaaatccgccaagcgttcgtgccgtcggagtctgattggctcattttcgctgccgactactcgcaaattgagttgcgcgtcctcgcccatattgcggaagatgacaatttaatggaagcgttccgccgcgatttggatatccatacgaaaacagcgatggacattttccaagtgagcgaggacgaagtgacgcccaacatgcgccgtcaggcgaaggcggtcaactttgggatcgtttacgggatcagtgattacggcttggcgcaaaacttaaatatttcacgcaaagaggccgctgaattcatcgagcgctacttcgaaagcttccctggcgtgaagcggtatatggaaaacattgtgcaagaagcaaaacagaaagggtatgtgacgacgctgctgcatcggcgccgctatttgccggatatcacgagccgcaacttcaacgtccgcagctttgctgaacggatggcgatgaacacgccgattcaagggagcgccgctgacattattaaaaaggcgatgatcgatctgaacgctagactgaaggaagagcggctgcaagcgcgccttttgctacaggtgcatgacgagctcattttggaggcgccgaaagaagagatggagcggctgtgccggctcgttccggaagtgatggagcaagcggtcacacttcgcgtgccgctcaaagtcgattaccattatggctcgacgtggtatgacgcgaaataaaaaggatcc

SEQ ID NO: 2675 - DNA, 2712 bp, Artificial Sequence
  Description of Artificial Sequence: Synthetic DNA sequence of Bacillus caldolyticus EA1 DNA polymerase T643H
atgaaatacctgctgccgaccgctgctgctggtctgctgctcctcgctgcccagccggcgatggccatgggattgaaaaaaaagcttgttttaatcgacggcagcagcgtggcgtaccgcgcctttttcgccttgccgcttttgcataacgacaaaggcatccatacgaacgccgtctacgggtttacgatgatgttgaataaaattttggcggaagaagagccaactcatatgcttgtcgcgtttgacgccgggaaaacgacgttccggcatgaagcgtttcaagagtataaaggtgggcgccagcagacgccaccggagctgtcggagcagtttccgctgttgcgcgagctgctgagggcgtatcgcatccccgcctatgaactcgagaactacgaagcggacgatattatcggaacgcttgccgcccgcgctgagcaggaagggtttgaggtgaaagtcatttccggcgaccgcgatctgacccagctcgcctccccccatgtgacggtggacattacgaaaaaagggattaccgatatcgaaccgtacacgccggaggcggtccgcgaaaaatacggcttaactccggaacaaatcgttgatttgaaaggattgatgggcgacaaatcggacaacattcccggagtgccgggcatcggggaaaagacggcggtcaagctgctcaagcaattcggcacggtcgaaaacgtgcttgcctccattgacgagatcaaaggcgaaaagttgaaagaaacgctgcgccaacaccgggagatggcgctgttaagcaaaaagctcgccgccattcgccgcgacgccccggtcgagctctcgcttgatgacatcgtctatcaaggggaagaccgggagaaagtggtcgctttatttaaagagcttgggtttcaatcgtttttagagaaaatggaatcgccgtcatcagaagaggaaaaaccgcttgccaagatggcatttacgcttgctgaccgcgtgacggaggagatgcttgccgacaaggcggcgcttgtcgttgaagtggtcgaggaaaattatcatgatgcgccgatcgtcggcatcgctgtggtcaacgaacatggacggtttttcctgcgcccggagacggcgcttgccgatccgcagtttgtcgcctggcttggtgatgaaacgaagaaaaaaagcatgtttgactcaaagcgcgcggcagtcgccttgaaatggaaaggaattgagctatgcggcgtttcctttgatttattgctggccgcctatttgcttgatccggcgcaaggtgttgatgatgtggctgccgcagcaaaaatgaagcaatacgaagcggtgcgctcggatgaagcggtgtatggcaaaggggcgaagcgggccgtgccggatgagccagtgctcgccgagcatctcgtccgcaaggcggcggcgatttgggcgctcgaacgtccgtttttggatgagctgcgccgcaacgaacaagatcggttgctcgtcgagctcgagcagccgttgtcttcgattttggcggaaatggaatttgccggagtgaaagtggatacgaagcggctcgaacagatgggcgaagagctcgccgagcagctgcgcacggtcgagcagcgcatttatgagctcgccggccaagaattcaacatcaattcaccgaaacagctcggcgtcattttatttgaaaaactgcagctgcccgtcttgaaaaaaacgaaaaccggctactccacttcggcggatgtgcttgaaaaacttgcgccttatcacgagatcgtggaaaacattttgcattaccgccagcttggcaagttgcagtcgacgtatattgaaggattgctgaaagtcgtgcgacccgatacaaagaaggtgcatacgattttcaatcaggcgttgacgcaaaccggacggctcagctcgcatgagccgaacttgcaaaacattccgattcggcttgaggaaggacggaaaatccgccaagcgttcgtgccgtcggagtctgattggctcattttcgctgccgactactcgcaaattgagttgcgcgtcctcgcccatattgcggaagatgacaatttaatggaagcgttccgccgcgatttggatatccatacgaaaacagcgatggacattttccaagtgagcgaggacgaagtgacgcccaacatgcgccgtcaggcgaaggcggtcaactttgggatcgtttacgggatcagtgattacggcttggcgcaaaacttaaatatttcacgcaaagaggccgctgaattcatcgagcgctacttcgaaagcttccctggcgtgaagcggtatatggaaaacattgtgcaagaagcaaaacagaaagggtatgtgacgacgctgctgcatcggcgccgctatttgccggatatcacgagccgcaacttcaacgtccgcagctttgctgaacggatggcgatgaacacgccgattcaagggagcgccgctgacattattaaaaaggcgatgatcgatctgaacgctagactgaaggaagagcggctgcaagcgcgccttttgctacaggtgcatgacgagctcattttggaggcgccgaaagaagagatggagcggctgtgccggctcgttccggaagtgatggagcaagcggtcacacttcgcgtgccgctcaaagtcgattaccattatggctcgacgtggtatgacgcgaaataaaaaggatcc

SEQ ID NO: 2676 - DNA, 2712 bp, Artificial Sequence
  Description of Artificial Sequence: Synthetic DNA sequence of Bacillus caldolyticus EA1 DNA polymerase T643I
atgaaatacctgctgccgaccgctgctgctggtctgctgctcctcgctgcccagccggcgatggccatgggattgaaaaaaaagcttgttttaatcgacggcagcagcgtggcgtaccgcgcctttttcgccttgccgcttttgcataacgacaaaggcatccatacgaacgccgtctacgggtttacgatgatgttgaataaaattttggcggaagaagagccaactcatatgcttgtcgcgtttgacgccgggaaaacgacgttccggcatgaagcgtttcaagagtataaaggtgggcgccagcagacgccaccggagctgtcggagcagtttccgctgttgcgcgagctgctgagggcgtatcgcatccccgcctatgaactcgagaactacgaagcggacgatattatcggaacgcttgccgcccgcgctgagcaggaagggtttgaggtgaaagtcatttccggcgaccgcgatctgacccagctcgcctccccccatgtgacggtggacattacgaaaaaagggattaccgatatcgaaccgtacacgccggaggcggtccgcgaaaaatacggcttaactccggaacaaatcgttgatttgaaaggattgatgggcgacaaatcggacaacattcccggagtgccgggcatcggggaaaagacggcggtcaagctgctcaagcaattcggcacggtcgaaaacgtgcttgcctccattgacgagatcaaaggcgaaaagttgaaagaaacgctgcgccaacaccgggagatggcgctgttaagcaaaaagctcgccgccattcgccgcgacgccccggtcgagctctcgcttgatgacatcgtctatcaaggggaagaccgggagaaagtggtcgctttatttaaagagcttgggtttcaatcgtttttagagaaaatggaatcgccgtcatcagaagaggaaaaaccgcttgccaagatggcatttacgcttgctgaccgcgtgacggaggagatgcttgccgacaaggcggcgcttgtcgttgaagtggtcgaggaaaattatcatgatgcgccgatcgtcggcatcgctgtggtcaacgaacatggacggtttttcctgcgcccggagacggcgcttgccgatccgcagtttgtcgcctggcttggtgatgaaacgaagaaaaaaagcatgtttgactcaaagcgcgcggcagtcgccttgaaatggaaaggaattgagctatgcggcgtttcctttgatttattgctggccgcctatttgcttgatccggcgcaaggtgttgatgatgtggctgccgcagcaaaaatgaagcaatacgaagcggtgcgctcggatgaagcggtgtatggcaaaggggcgaagcgggccgtgccggatgagccagtgctcgccgagcatctcgtccgcaaggcggcggcgatttgggcgctcgaacgtccgtttttggatgagctgcgccgcaacgaacaagatcggttgctcgtcgagctcgagcagccgttgtcttcgattttggcggaaatggaatttgccggagtgaaagtggatacgaagcggctcgaacagatgggcgaagagctcgccgagcagctgcgcacggtcgagcagcgcatttatgagctcgccggccaagaattcaacatcaattcaccgaaacagctcggcgtcattttatttgaaaaactgcagctgcccgtcttgaaaaaaacgaaaaccggctactccacttcggcggatgtgcttgaaaaacttgcgccttatcacgagatcgtggaaaacattttgcattaccgccagcttggcaagttgcagtcgacgtatattgaaggattgctgaaagtcgtgcgacccgatacaaagaaggtgcatacgattttcaatcaggcgttgacgcaaaccggacggctcagctcgattgagccgaacttgcaaaacattccgattcggcttgaggaaggacggaaaatccgccaagcgttcgtgccgtcggagtctgattggctcattttcgctgccgactactcgcaaattgagttgcgcgtcctcgcccatattgcggaagatgacaatttaatggaagcgttccgccgcgatttggatatccatacgaaaacagcgatggacattttccaagtgagcgaggacgaagtgacgcccaacatgcgccgtcaggcgaaggcggtcaactttgggatcgtttacgggatcagtgattacggcttggcgcaaaacttaaatatttcacgcaaagaggccgctgaattcatcgagcgctacttcgaaagcttccctggcgtgaagcggtatatggaaaacattgtgcaagaagcaaaacagaaagggtatgtgacgacgctgctgcatcggcgccgctatttgccggatatcacgagccgcaacttcaacgtccgcagctttgctgaacggatggcgatgaacacgccgattcaagggagcgccgctgacattattaaaaaggcgatgatcgatctgaacgctagactgaaggaagagcggctgcaagcgcgccttttgctacaggtgcatgacgagctcattttggaggcgccgaaagaagagatggagcggctgtgccggctcgttccggaagtgatggagcaagcggtcacacttcgcgtgccgctcaaagtcgattaccattatggctcgacgtggtatgacgcgaaataaaaaggatcc

SEQ ID NO: 2677 - DNA, 2712 bp, Artificial Sequence
  Description of Artificial Sequence: Synthetic DNA sequence of Bacillus caldolyticus EA1 DNA polymerase T643L
atgaaatacctgctgccgaccgctgctgctggtctgctgctcctcgctgcccagccggcgatggccatgggattgaaaaaaaagcttgttttaatcgacggcagcagcgtggcgtaccgcgcctttttcgccttgccgcttttgcataacgacaaaggcatccatacgaacgccgtctacgggtttacgatgatgttgaataaaattttggcggaagaagagccaactcatatgcttgtcgcgtttgacgccgggaaaacgacgttccggcatgaagcgtttcaagagtataaaggtgggcgccagcagacgccaccggagctgtcggagcagtttccgctgttgcgcgagctgctgagggcgtatcgcatccccgcctatgaactcgagaactacgaagcggacgatattatcggaacgcttgccgcccgcgctgagcaggaagggtttgaggtgaaagtcatttccggcgaccgcgatctgacccagctcgcctccccccatgtgacggtggacattacgaaaaaagggattaccgatatcgaaccgtacacgccggaggcggtccgcgaaaaatacggcttaactccggaacaaatcgttgatttgaaaggattgatgggcgacaaatcggacaacattcccggagtgccgggcatcggggaaaagacggcggtcaagctgctcaagcaattcggcacggtcgaaaacgtgcttgcctccattgacgagatcaaaggcgaaaagttgaaagaaacgctgcgccaacaccgggagatggcgctgttaagcaaaaagctcgccgccattcgccgcgacgccccggtcgagctctcgcttgatgacatcgtctatcaaggggaagaccgggagaaagtggtcgctttatttaaagagcttgggtttcaatcgtttttagagaaaatggaatcgccgtcatcagaagaggaaaaaccgcttgccaagatggcatttacgcttgctgaccgcgtgacggaggagatgcttgccgacaaggcggcgcttgtcgttgaagtggtcgaggaaaattatcatgatgcgccgatcgtcggcatcgctgtggtcaacgaacatggacggtttttcctgcgcccggagacggcgcttgccgatccgcagtttgtcgcctggcttggtgatgaaacgaagaaaaaaagcatgtttgactcaaagcgcgcggcagtcgccttgaaatggaaaggaattgagctatgcggcgtttcctttgatttattgctggccgcctatttgcttgatccggcgcaaggtgttgatgatgtggctgccgcagcaaaaatgaagcaatacgaagcggtgcgctcggatgaagcggtgtatggcaaaggggcgaagcgggccgtgccggatgagccagtgctcgccgagcatctcgtccgcaaggcggcggcgatttgggcgctcgaacgtccgtttttggatgagctgcgccgcaacgaacaagatcggttgctcgtcgagctcgagcagccgttgtcttcgattttggcggaaatggaatttgccggagtgaaagtggatacgaagcggctcgaacagatgggcgaagagctcgccgagcagctgcgcacggtcgagcagcgcatttatgagctcgccggccaagaattcaacatcaattcaccgaaacagctcggcgtcattttatttgaaaaactgcagctgcccgtcttgaaaaaaacgaaaaccggctactccacttcggcggatgtgcttgaaaaacttgcgccttatcacgagatcgtggaaaacattttgcattaccgccagcttggcaagttgcagtcgacgtatattgaaggattgctgaaagtcgtgcgacccgatacaaagaaggtgcatacgattttcaatcaggcgttgacgcaaaccggacggctcagctcgttagagccgaacttgcaaaacattccgattcggcttgaggaaggacggaaaatccgccaagcgttcgtgccgtcggagtctgattggctcattttcgctgccgactactcgcaaattgagttgcgcgtcctcgcccatattgcggaagatgacaatttaatggaagcgttccgccgcgatttggatatccatacgaaaacagcgatggacattttccaagtgagcgaggacgaagtgacgcccaacatgcgccgtcaggcgaaggcggtcaactttgggatcgtttacgggatcagtgattacggcttggcgcaaaacttaaatatttcacgcaaagaggccgctgaattcatcgagcgctacttcgaaagcttccctggcgtgaagcggtatatggaaaacattgtgcaagaagcaaaacagaaagggtatgtgacgacgctgctgcatcggcgccgctatttgccggatatcacgagccgcaacttcaacgtccgcagctttgctgaacggatggcgatgaacacgccgattcaagggagcgccgctgacattattaaaaaggcgatgatcgatctgaacgctagactgaaggaagagcggctgcaagcgcgccttttgctacaggtgcatgacgagctcattttggaggcgccgaaagaagagatggagcggctgtgccggctcgttccggaagtgatggagcaagcggtcacacttcgcgtgccgctcaaagtcgattaccattatggctcgacgtggtatgacgcgaaataaaaaggatcc

SEQ ID NO: 2678 - DNA, 2712 bp, Artificial Sequence
  Description of Artificial Sequence: Synthetic DNA sequence of Bacillus caldolyticus EA1 DNA polymerase T643K
atgaaatacctgctgccgaccgctgctgctggtctgctgctcctcgctgcccagccggcgatggccatgggattgaaaaaaaagcttgttttaatcgacggcagcagcgtggcgtaccgcgcctttttcgccttgccgcttttgcataacgacaaaggcatccatacgaacgccgtctacgggtttacgatgatgttgaataaaattttggcggaagaagagccaactcatatgcttgtcgcgtttgacgccgggaaaacgacgttccggcatgaagcgtttcaagagtataaaggtgggcgccagcagacgccaccggagctgtcggagcagtttccgctgttgcgcgagctgctgagggcgtatcgcatccccgcctatgaactcgagaactacgaagcggacgatattatcggaacgcttgccgcccgcgctgagcaggaagggtttgaggtgaaagtcatttccggcgaccgcgatctgacccagctcgcctccccccatgtgacggtggacattacgaaaaaagggattaccgatatcgaaccgtacacgccggaggcggtccgcgaaaaatacggcttaactccggaacaaatcgttgatttgaaaggattgatgggcgacaaatcggacaacattcccggagtgccgggcatcggggaaaagacggcggtcaagctgctcaagcaattcggcacggtcgaaaacgtgcttgcctccattgacgagatcaaaggcgaaaagttgaaagaaacgctgcgccaacaccgggagatggcgctgttaagcaaaaagctcgccgccattcgccgcgacgccccggtcgagctctcgcttgatgacatcgtctatcaaggggaagaccgggagaaagtggtcgctttatttaaagagcttgggtttcaatcgtttttagagaaaatggaatcgccgtcatcagaagaggaaaaaccgcttgccaagatggcatttacgcttgctgaccgcgtgacggaggagatgcttgccgacaaggcggcgcttgtcgttgaagtggtcgaggaaaattatcatgatgcgccgatcgtcggcatcgctgtggtcaacgaacatggacggtttttcctgcgcccggagacggcgcttgccgatccgcagtttgtcgcctggcttggtgatgaaacgaagaaaaaaagcatgtttgactcaaagcgcgcggcagtcgccttgaaatggaaaggaattgagctatgcggcgtttcctttgatttattgctggccgcctatttgcttgatccggcgcaaggtgttgatgatgtggctgccgcagcaaaaatgaagcaatacgaagcggtgcgctcggatgaagcggtgtatggcaaaggggcgaagcgggccgtgccggatgagccagtgctcgccgagcatctcgtccgcaaggcggcggcgatttgggcgctcgaacgtccgtttttggatgagctgcgccgcaacgaacaagatcggttgctcgtcgagctcgagcagccgttgtcttcgattttggcggaaatggaatttgccggagtgaaagtggatacgaagcggctcgaacagatgggcgaagagctcgccgagcagctgcgcacggtcgagcagcgcatttatgagctcgccggccaagaattcaacatcaattcaccgaaacagctcggcgtcattttatttgaaaaactgcagctgcccgtcttgaaaaaaacgaaaaccggctactccacttcggcggatgtgcttgaaaaacttgcgccttatcacgagatcgtggaaaacattttgcattaccgccagcttggcaagttgcagtcgacgtatattgaaggattgctgaaagtcgtgcgacccgatacaaagaaggtgcatacgattttcaatcaggcgttgacgcaaaccggacggctcagctcgaaagagccgaacttgcaaaacattccgattcggcttgaggaaggacggaaaatccgccaagcgttcgtgccgtcggagtctgattggctcattttcgctgccgactactcgcaaattgagttgcgcgtcctcgcccatattgcggaagatgacaatttaatggaagcgttccgccgcgatttggatatccatacgaaaacagcgatggacattttccaagtgagcgaggacgaagtgacgcccaacatgcgccgtcaggcgaaggcggtcaactttgggatcgtttacgggatcagtgattacggcttggcgcaaaacttaaatatttcacgcaaagaggccgctgaattcatcgagcgctacttcgaaagcttccctggcgtgaagcggtatatggaaaacattgtgcaagaagcaaaacagaaagggtatgtgacgacgctgctgcatcggcgccgctatttgccggatatcacgagccgcaacttcaacgtccgcagctttgctgaacggatggcgatgaacacgccgattcaagggagcgccgctgacattattaaaaaggcgatgatcgatctgaacgctagactgaaggaagagcggctgcaagcgcgccttttgctacaggtgcatgacgagctcattttggaggcgccgaaagaagagatggagcggctgtgccggctcgttccggaagtgatggagcaagcggtcacacttcgcgtgccgctcaaagtcgattaccattatggctcgacgtggtatgacgcgaaataaaaaggatcc

SEQ ID NO: 2679 - DNA, 2712 bp, Artificial Sequence
  Description of Artificial Sequence: Synthetic DNA sequence of Bacillus caldolyticus EA1 DNA polymerase T643E
atgaaatacctgctgccgaccgctgctgctggtctgctgctcctcgctgcccagccggcgatggccatgggattgaaaaaaaagcttgttttaatcgacggcagcagcgtggcgtaccgcgcctttttcgccttgccgcttttgcataacgacaaaggcatccatacgaacgccgtctacgggtttacgatgatgttgaataaaattttggcggaagaagagccaactcatatgcttgtcgcgtttgacgccgggaaaacgacgttccggcatgaagcgtttcaagagtataaaggtgggcgccagcagacgccaccggagctgtcggagcagtttccgctgttgcgcgagctgctgagggcgtatcgcatccccgcctatgaactcgagaactacgaagcggacgatattatcggaacgcttgccgcccgcgctgagcaggaagggtttgaggtgaaagtcatttccggcgaccgcgatctgacccagctcgcctccccccatgtgacggtggacattacgaaaaaagggattaccgatatcgaaccgtacacgccggaggcggtccgcgaaaaatacggcttaactccggaacaaatcgttgatttgaaaggattgatgggcgacaaatcggacaacattcccggagtgccgggcatcggggaaaagacggcggtcaagctgctcaagcaattcggcacggtcgaaaacgtgcttgcctccattgacgagatcaaaggcgaaaagttgaaagaaacgctgcgccaacaccgggagatggcgctgttaagcaaaaagctcgccgccattcgccgcgacgccccggtcgagctctcgcttgatgacatcgtctatcaaggggaagaccgggagaaagtggtcgctttatttaaagagcttgggtttcaatcgtttttagagaaaatggaatcgccgtcatcagaagaggaaaaaccgcttgccaagatggcatttacgcttgctgaccgcgtgacggaggagatgcttgccgacaaggcggcgcttgtcgttgaagtggtcgaggaaaattatcatgatgcgccgatcgtcggcatcgctgtggtcaacgaacatggacggtttttcctgcgcccggagacggcgcttgccgatccgcagtttgtcgcctggcttggtgatgaaacgaagaaaaaaagcatgtttgactcaaagcgcgcggcagtcgccttgaaatggaaaggaattgagctatgcggcgtttcctttgatttattgctggccgcctatttgcttgatccggcgcaaggtgttgatgatgtggctgccgcagcaaaaatgaagcaatacgaagcggtgcgctcggatgaagcggtgtatggcaaaggggcgaagcgggccgtgccggatgagccagtgctcgccgagcatctcgtccgcaaggcggcggcgatttgggcgctcgaacgtccgtttttggatgagctgcgccgcaacgaacaagatcggttgctcgtcgagctcgagcagccgttgtcttcgattttggcggaaatggaatttgccggagtgaaagtggatacgaagcggctcgaacagatgggcgaagagctcgccgagcagctgcgcacggtcgagcagcgcatttatgagctcgccggccaagaattcaacatcaattcaccgaaacagctcggcgtcattttatttgaaaaactgcagctgcccgtcttgaaaaaaacgaaaaccggctactccacttcggcggatgtgcttgaaaaacttgcgccttatcacgagatcgtggaaaacattttgcattaccgccagcttggcaagttgcagtcgacgtatattgaaggattgctgaaagtcgtgcgacccgatacaaagaaggtgcatacgattttcaatcaggcgttgacgcaaaccggacggctcagctcggaagagccgaacttgcaaaacattccgattcggcttgaggaaggacggaaaatccgccaagcgttcgtgccgtcggagtctgattggctcattttcgctgccgactactcgcaaattgagttgcgcgtcctcgcccatattgcggaagatgacaatttaatggaagcgttccgccgcgatttggatatccatacgaaaacagcgatggacattttccaagtgagcgaggacgaagtgacgcccaacatgcgccgtcaggcgaaggcggtcaactttgggatcgtttacgggatcagtgattacggcttggcgcaaaacttaaatatttcacgcaaagaggccgctgaattcatcgagcgctacttcgaaagcttccctggcgtgaagcggtatatggaaaacattgtgcaagaagcaaaacagaaagggtatgtgacgacgctgctgcatcggcgccgctatttgccggatatcacgagccgcaacttcaacgtccgcagctttgctgaacggatggcgatgaacacgccgattcaagggagcgccgctgacattattaaaaaggcgatgatcgatctgaacgctagactgaaggaagagcggctgcaagcgcgccttttgctacaggtgcatgacgagctcattttggaggcgccgaaagaagagatggagcggctgtgccggctcgttccggaagtgatggagcaagcggtcacacttcgcgtgccgctcaaagtcgattaccattatggctcgacgtggtatgacgcgaaataaaaaggatcc

SEQ ID NO: 2680 - DNA, 2712 bp, Artificial Sequence
  Description of Artificial Sequence: Synthetic DNA sequence of Bacillus caldolyticus EA1 DNA polymerase T643D
atgaaatacctgctgccgaccgctgctgctggtctgctgctcctcgctgcccagccggcgatggccatgggattgaaaaaaaagcttgttttaatcgacggcagcagcgtggcgtaccgcgcctttttcgccttgccgcttttgcataacgacaaaggcatccatacgaacgccgtctacgggtttacgatgatgttgaataaaattttggcggaagaagagccaactcatatgcttgtcgcgtttgacgccgggaaaacgacgttccggcatgaagcgtttcaagagtataaaggtgggcgccagcagacgccaccggagctgtcggagcagtttccgctgttgcgcgagctgctgagggcgtatcgcatccccgcctatgaactcgagaactacgaagcggacgatattatcggaacgcttgccgcccgcgctgagcaggaagggtttgaggtgaaagtcatttccggcgaccgcgatctgacccagctcgcctccccccatgtgacggtggacattacgaaaaaagggattaccgatatcgaaccgtacacgccggaggcggtccgcgaaaaatacggcttaactccggaacaaatcgttgatttgaaaggattgatgggcgacaaatcggacaacattcccggagtgccgggcatcggggaaaagacggcggtcaagctgctcaagcaattcggcacggtcgaaaacgtgcttgcctccattgacgagatcaaaggcgaaaagttgaaagaaacgctgcgccaacaccgggagatggcgctgttaagcaaaaagctcgccgccattcgccgcgacgccccggtcgagctctcgcttgatgacatcgtctatcaaggggaagaccgggagaaagtggtcgctttatttaaagagcttgggtttcaatcgtttttagagaaaatggaatcgccgtcatcagaagaggaaaaaccgcttgccaagatggcatttacgcttgctgaccgcgtgacggaggagatgcttgccgacaaggcggcgcttgtcgttgaagtggtcgaggaaaattatcatgatgcgccgatcgtcggcatcgctgtggtcaacgaacatggacggtttttcctgcgcccggagacggcgcttgccgatccgcagtttgtcgcctggcttggtgatgaaacgaagaaaaaaagcatgtttgactcaaagcgcgcggcagtcgccttgaaatggaaaggaattgagctatgcggcgtttcctttgatttattgctggccgcctatttgcttgatccggcgcaaggtgttgatgatgtggctgccgcagcaaaaatgaagcaatacgaagcggtgcgctcggatgaagcggtgtatggcaaaggggcgaagcgggccgtgccggatgagccagtgctcgccgagcatctcgtccgcaaggcggcggcgatttgggcgctcgaacgtccgtttttggatgagctgcgccgcaacgaacaagatcggttgctcgtcgagctcgagcagccgttgtcttcgattttggcggaaatggaatttgccggagtgaaagtggatacgaagcggctcgaacagatgggcgaagagctcgccgagcagctgcgcacggtcgagcagcgcatttatgagctcgccggccaagaattcaacatcaattcaccgaaacagctcggcgtcattttatttgaaaaactgcagctgcccgtcttgaaaaaaacgaaaaccggctactccacttcggcggatgtgcttgaaaaacttgcgccttatcacgagatcgtggaaaacattttgcattaccgccagcttggcaagttgcagtcgacgtatattgaaggattgctgaaagtcgtgcgacccgatacaaagaaggtgcatacgattttcaatcaggcgttgacgcaaaccggacggctcagctcggatgagccgaacttgcaaaacattccgattcggcttgaggaaggacggaaaatccgccaagcgttcgtgccgtcggagtctgattggctcattttcgctgccgactactcgcaaattgagttgcgcgtcctcgcccatattgcggaagatgacaatttaatggaagcgttccgccgcgatttggatatccatacgaaaacagcgatggacattttccaagtgagcgaggacgaagtgacgcccaacatgcgccgtcaggcgaaggcggtcaactttgggatcgtttacgggatcagtgattacggcttggcgcaaaacttaaatatttcacgcaaagaggccgctgaattcatcgagcgctacttcgaaagcttccctggcgtgaagcggtatatggaaaacattgtgcaagaagcaaaacagaaagggtatgtgacgacgctgctgcatcggcgccgctatttgccggatatcacgagccgcaacttcaacgtccgcagctttgctgaacggatggcgatgaacacgccgattcaagggagcgccgctgacattattaaaaaggcgatgatcgatctgaacgctagactgaaggaagagcggctgcaagcgcgccttttgctacaggtgcatgacgagctcattttggaggcgccgaaagaagagatggagcggctgtgccggctcgttccggaagtgatggagcaagcggtcacacttcgcgtgccgctcaaagtcgattaccattatggctcgacgtggtatgacgcgaaataaaaaggatcc

SEQ ID NO: 2681 - DNA, 2712 bp, Artificial Sequence
  Description of Artificial Sequence: Synthetic DNA sequence of Bacillus caldolyticus EA1 DNA polymerase T643F
atgaaatacctgctgccgaccgctgctgctggtctgctgctcctcgctgcccagccggcgatggccatgggattgaaaaaaaagcttgttttaatcgacggcagcagcgtggcgtaccgcgcctttttcgccttgccgcttttgcataacgacaaaggcatccatacgaacgccgtctacgggtttacgatgatgttgaataaaattttggcggaagaagagccaactcatatgcttgtcgcgtttgacgccgggaaaacgacgttccggcatgaagcgtttcaagagtataaaggtgggcgccagcagacgccaccggagctgtcggagcagtttccgctgttgcgcgagctgctgagggcgtatcgcatccccgcctatgaactcgagaactacgaagcggacgatattatcggaacgcttgccgcccgcgctgagcaggaagggtttgaggtgaaagtcatttccggcgaccgcgatctgacccagctcgcctccccccatgtgacggtggacattacgaaaaaagggattaccgatatcgaaccgtacacgccggaggcggtccgcgaaaaatacggcttaactccggaacaaatcgttgatttgaaaggattgatgggcgacaaatcggacaacattcccggagtgccgggcatcggggaaaagacggcggtcaagctgctcaagcaattcggcacggtcgaaaacgtgcttgcctccattgacgagatcaaaggcgaaaagttgaaagaaacgctgcgccaacaccgggagatggcgctgttaagcaaaaagctcgccgccattcgccgcgacgccccggtcgagctctcgcttgatgacatcgtctatcaaggggaagaccgggagaaagtggtcgctttatttaaagagcttgggtttcaatcgtttttagagaaaatggaatcgccgtcatcagaagaggaaaaaccgcttgccaagatggcatttacgcttgctgaccgcgtgacggaggagatgcttgccgacaaggcggcgcttgtcgttgaagtggtcgaggaaaattatcatgatgcgccgatcgtcggcatcgctgtggtcaacgaacatggacggtttttcctgcgcccggagacggcgcttgccgatccgcagtttgtcgcctggcttggtgatgaaacgaagaaaaaaagcatgtttgactcaaagcgcgcggcagtcgccttgaaatggaaaggaattgagctatgcggcgtttcctttgatttattgctggccgcctatttgcttgatccggcgcaaggtgttgatgatgtggctgccgcagcaaaaatgaagcaatacgaagcggtgcgctcggatgaagcggtgtatggcaaaggggcgaagcgggccgtgccggatgagccagtgctcgccgagcatctcgtccgcaaggcggcggcgatttgggcgctcgaacgtccgtttttggatgagctgcgccgcaacgaacaagatcggttgctcgtcgagctcgagcagccgttgtcttcgattttggcggaaatggaatttgccggagtgaaagtggatacgaagcggctcgaacagatgggcgaagagctcgccgagcagctgcgcacggtcgagcagcgcatttatgagctcgccggccaagaattcaacatcaattcaccgaaacagctcggcgtcattttatttgaaaaactgcagctgcccgtcttgaaaaaaacgaaaaccggctactccacttcggcggatgtgcttgaaaaacttgcgccttatcacgagatcgtggaaaacattttgcattaccgccagcttggcaagttgcagtcgacgtatattgaaggattgctgaaagtcgtgcgacccgatacaaagaaggtgcatacgattttcaatcaggcgttgacgcaaaccggacggctcagctcgtttgagccgaacttgcaaaacattccgattcggcttgaggaaggacggaaaatccgccaagcgttcgtgccgtcggagtctgattggctcattttcgctgccgactactcgcaaattgagttgcgcgtcctcgcccatattgcggaagatgacaatttaatggaagcgttccgccgcgatttggatatccatacgaaaacagcgatggacattttccaagtgagcgaggacgaagtgacgcccaacatgcgccgtcaggcgaaggcggtcaactttgggatcgtttacgggatcagtgattacggcttggcgcaaaacttaaatatttcacgcaaagaggccgctgaattcatcgagcgctacttcgaaagcttccctggcgtgaagcggtatatggaaaacattgtgcaagaagcaaaacagaaagggtatgtgacgacgctgctgcatcggcgccgctatttgccggatatcacgagccgcaacttcaacgtccgcagctttgctgaacggatggcgatgaacacgccgattcaagggagcgccgctgacattattaaaaaggcgatgatcgatctgaacgctagactgaaggaagagcggctgcaagcgcgccttttgctacaggtgcatgacgagctcattttggaggcgccgaaagaagagatggagcggctgtgccggctcgttccggaagtgatggagcaagcggtcacacttcgcgtgccgctcaaagtcgattaccattatggctcgacgtggtatgacgcgaaataaaaaggatcc

SEQ ID NO: 2682 - DNA, 2712 bp, Artificial Sequence
  Description of Artificial Sequence: Synthetic DNA sequence of Bacillus caldolyticus EA1 DNA polymerase T643S
atgaaatacctgctgccgaccgctgctgctggtctgctgctcctcgctgcccagccggcgatggccatgggattgaaaaaaaagcttgttttaatcgacggcagcagcgtggcgtaccgcgcctttttcgccttgccgcttttgcataacgacaaaggcatccatacgaacgccgtctacgggtttacgatgatgttgaataaaattttggcggaagaagagccaactcatatgcttgtcgcgtttgacgccgggaaaacgacgttccggcatgaagcgtttcaagagtataaaggtgggcgccagcagacgccaccggagctgtcggagcagtttccgctgttgcgcgagctgctgagggcgtatcgcatccccgcctatgaactcgagaactacgaagcggacgatattatcggaacgcttgccgcccgcgctgagcaggaagggtttgaggtgaaagtcatttccggcgaccgcgatctgacccagctcgcctccccccatgtgacggtggacattacgaaaaaagggattaccgatatcgaaccgtacacgccggaggcggtccgcgaaaaatacggcttaactccggaacaaatcgttgatttgaaaggattgatgggcgacaaatcggacaacattcccggagtgccgggcatcggggaaaagacggcggtcaagctgctcaagcaattcggcacggtcgaaaacgtgcttgcctccattgacgagatcaaaggcgaaaagttgaaagaaacgctgcgccaacaccgggagatggcgctgttaagcaaaaagctcgccgccattcgccgcgacgccccggtcgagctctcgcttgatgacatcgtctatcaaggggaagaccgggagaaagtggtcgctttatttaaagagcttgggtttcaatcgtttttagagaaaatggaatcgccgtcatcagaagaggaaaaaccgcttgccaagatggcatttacgcttgctgaccgcgtgacggaggagatgcttgccgacaaggcggcgcttgtcgttgaagtggtcgaggaaaattatcatgatgcgccgatcgtcggcatcgctgtggtcaacgaacatggacggtttttcctgcgcccggagacggcgcttgccgatccgcagtttgtcgcctggcttggtgatgaaacgaagaaaaaaagcatgtttgactcaaagcgcgcggcagtcgccttgaaatggaaaggaattgagctatgcggcgtttcctttgatttattgctggccgcctatttgcttgatccggcgcaaggtgttgatgatgtggctgccgcagcaaaaatgaagcaatacgaagcggtgcgctcggatgaagcggtgtatggcaaaggggcgaagcgggccgtgccggatgagccagtgctcgccgagcatctcgtccgcaaggcggcggcgatttgggcgctcgaacgtccgtttttggatgagctgcgccgcaacgaacaagatcggttgctcgtcgagctcgagcagccgttgtcttcgattttggcggaaatggaatttgccggagtgaaagtggatacgaagcggctcgaacagatgggcgaagagctcgccgagcagctgcgcacggtcgagcagcgcatttatgagctcgccggccaagaattcaacatcaattcaccgaaacagctcggcgtcattttatttgaaaaactgcagctgcccgtcttgaaaaaaacgaaaaccggctactccacttcggcggatgtgcttgaaaaacttgcgccttatcacgagatcgtggaaaacattttgcattaccgccagcttggcaagttgcagtcgacgtatattgaaggattgctgaaagtcgtgcgacccgatacaaagaaggtgcatacgattttcaatcaggcgttgacgcaaaccggacggctcagctcgtctgagccgaacttgcaaaacattccgattcggcttgaggaaggacggaaaatccgccaagcgttcgtgccgtcggagtctgattggctcattttcgctgccgactactcgcaaattgagttgcgcgtcctcgcccatattgcggaagatgacaatttaatggaagcgttccgccgcgatttggatatccatacgaaaacagcgatggacattttccaagtgagcgaggacgaagtgacgcccaacatgcgccgtcaggcgaaggcggtcaactttgggatcgtttacgggatcagtgattacggcttggcgcaaaacttaaatatttcacgcaaagaggccgctgaattcatcgagcgctacttcgaaagcttccctggcgtgaagcggtatatggaaaacattgtgcaagaagcaaaacagaaagggtatgtgacgacgctgctgcatcggcgccgctatttgccggatatcacgagccgcaacttcaacgtccgcagctttgctgaacggatggcgatgaacacgccgattcaagggagcgccgctgacattattaaaaaggcgatgatcgatctgaacgctagactgaaggaagagcggctgcaagcgcgccttttgctacaggtgcatgacgagctcattttggaggcgccgaaagaagagatggagcggctgtgccggctcgttccggaagtgatggagcaagcggtcacacttcgcgtgccgctcaaagtcgattaccattatggctcgacgtggtatgacgcgaaataaaaaggatcc

SEQ ID NO: 2683 - DNA, 2712 bp, Artificial Sequence
  Description of Artificial Sequence: Synthetic DNA sequence of Bacillus caldolyticus EA1 DNA polymerase T643Y
atgaaatacctgctgccgaccgctgctgctggtctgctgctcctcgctgcccagccggcgatggccatgggattgaaaaaaaagcttgttttaatcgacggcagcagcgtggcgtaccgcgcctttttcgccttgccgcttttgcataacgacaaaggcatccatacgaacgccgtctacgggtttacgatgatgttgaataaaattttggcggaagaagagccaactcatatgcttgtcgcgtttgacgccgggaaaacgacgttccggcatgaagcgtttcaagagtataaaggtgggcgccagcagacgccaccggagctgtcggagcagtttccgctgttgcgcgagctgctgagggcgtatcgcatccccgcctatgaactcgagaactacgaagcggacgatattatcggaacgcttgccgcccgcgctgagcaggaagggtttgaggtgaaagtcatttccggcgaccgcgatctgacccagctcgcctccccccatgtgacggtggacattacgaaaaaagggattaccgatatcgaaccgtacacgccggaggcggtccgcgaaaaatacggcttaactccggaacaaatcgttgatttgaaaggattgatgggcgacaaatcggacaacattcccggagtgccgggcatcggggaaaagacggcggtcaagctgctcaagcaattcggcacggtcgaaaacgtgcttgcctccattgacgagatcaaaggcgaaaagttgaaagaaacgctgcgccaacaccgggagatggcgctgttaagcaaaaagctcgccgccattcgccgcgacgccccggtcgagctctcgcttgatgacatcgtctatcaaggggaagaccgggagaaagtggtcgctttatttaaagagcttgggtttcaatcgtttttagagaaaatggaatcgccgtcatcagaagaggaaaaaccgcttgccaagatggcatttacgcttgctgaccgcgtgacggaggagatgcttgccgacaaggcggcgcttgtcgttgaagtggtcgaggaaaattatcatgatgcgccgatcgtcggcatcgctgtggtcaacgaacatggacggtttttcctgcgcccggagacggcgcttgccgatccgcagtttgtcgcctggcttggtgatgaaacgaagaaaaaaagcatgtttgactcaaagcgcgcggcagtcgccttgaaatggaaaggaattgagctatgcggcgtttcctttgatttattgctggccgcctatttgcttgatccggcgcaaggtgttgatgatgtggctgccgcagcaaaaatgaagcaatacgaagcggtgcgctcggatgaagcggtgtatggcaaaggggcgaagcgggccgtgccggatgagccagtgctcgccgagcatctcgtccgcaaggcggcggcgatttgggcgctcgaacgtccgtttttggatgagctgcgccgcaacgaacaagatcggttgctcgtcgagctcgagcagccgttgtcttcgattttggcggaaatggaatttgccggagtgaaagtggatacgaagcggctcgaacagatgggcgaagagctcgccgagcagctgcgcacggtcgagcagcgcatttatgagctcgccggccaagaattcaacatcaattcaccgaaacagctcggcgtcattttatttgaaaaactgcagctgcccgtcttgaaaaaaacgaaaaccggctactccacttcggcggatgtgcttgaaaaacttgcgccttatcacgagatcgtggaaaacattttgcattaccgccagcttggcaagttgcagtcgacgtatattgaaggattgctgaaagtcgtgcgacccgatacaaagaaggtgcatacgattttcaatcaggcgttgacgcaaaccggacggctcagctcgtatgagccgaacttgcaaaacattccgattcggcttgaggaaggacggaaaatccgccaagcgttcgtgccgtcggagtctgattggctcattttcgctgccgactactcgcaaattgagttgcgcgtcctcgcccatattgcggaagatgacaatttaatggaagcgttccgccgcgatttggatatccatacgaaaacagcgatggacattttccaagtgagcgaggacgaagtgacgcccaacatgcgccgtcaggcgaaggcggtcaactttgggatcgtttacgggatcagtgattacggcttggcgcaaaacttaaatatttcacgcaaagaggccgctgaattcatcgagcgctacttcgaaagcttccctggcgtgaagcggtatatggaaaacattgtgcaagaagcaaaacagaaagggtatgtgacgacgctgctgcatcggcgccgctatttgccggatatcacgagccgcaacttcaacgtccgcagctttgctgaacggatggcgatgaacacgccgattcaagggagcgccgctgacattattaaaaaggcgatgatcgatctgaacgctagactgaaggaagagcggctgcaagcgcgccttttgctacaggtgcatgacgagctcattttggaggcgccgaaagaagagatggagcggctgtgccggctcgttccggaagtgatggagcaagcggtcacacttcgcgtgccgctcaaagtcgattaccattatggctcgacgtggtatgacgcgaaataaaaaggatcc

SEQ ID NO: 2684 - DNA, 2712 bp, Artificial Sequence
  Description of Artificial Sequence: Synthetic DNA sequence of Bacillus caldolyticus EA1 DNA polymerase T643W
atgaaatacctgctgccgaccgctgctgctggtctgctgctcctcgctgcccagccggcgatggccatgggattgaaaaaaaagcttgttttaatcgacggcagcagcgtggcgtaccgcgcctttttcgccttgccgcttttgcataacgacaaaggcatccatacgaacgccgtctacgggtttacgatgatgttgaataaaattttggcggaagaagagccaactcatatgcttgtcgcgtttgacgccgggaaaacgacgttccggcatgaagcgtttcaagagtataaaggtgggcgccagcagacgccaccggagctgtcggagcagtttccgctgttgcgcgagctgctgagggcgtatcgcatccccgcctatgaactcgagaactacgaagcggacgatattatcggaacgcttgccgcccgcgctgagcaggaagggtttgaggtgaaagtcatttccggcgaccgcgatctgacccagctcgcctccccccatgtgacggtggacattacgaaaaaagggattaccgatatcgaaccgtacacgccggaggcggtccgcgaaaaatacggcttaactccggaacaaatcgttgatttgaaaggattgatgggcgacaaatcggacaacattcccggagtgccgggcatcggggaaaagacggcggtcaagctgctcaagcaattcggcacggtcgaaaacgtgcttgcctccattgacgagatcaaaggcgaaaagttgaaagaaacgctgcgccaacaccgggagatggcgctgttaagcaaaaagctcgccgccattcgccgcgacgccccggtcgagctctcgcttgatgacatcgtctatcaaggggaagaccgggagaaagtggtcgctttatttaaagagcttgggtttcaatcgtttttagagaaaatggaatcgccgtcatcagaagaggaaaaaccgcttgccaagatggcatttacgcttgctgaccgcgtgacggaggagatgcttgccgacaaggcggcgcttgtcgttgaagtggtcgaggaaaattatcatgatgcgccgatcgtcggcatcgctgtggtcaacgaacatggacggtttttcctgcgcccggagacggcgcttgccgatccgcagtttgtcgcctggcttggtgatgaaacgaagaaaaaaagcatgtttgactcaaagcgcgcggcagtcgccttgaaatggaaaggaattgagctatgcggcgtttcctttgatttattgctggccgcctatttgcttgatccggcgcaaggtgttgatgatgtggctgccgcagcaaaaatgaagcaatacgaagcggtgcgctcggatgaagcggtgtatggcaaaggggcgaagcgggccgtgccggatgagccagtgctcgccgagcatctcgtccgcaaggcggcggcgatttgggcgctcgaacgtccgtttttggatgagctgcgccgcaacgaacaagatcggttgctcgtcgagctcgagcagccgttgtcttcgattttggcggaaatggaatttgccggagtgaaagtggatacgaagcggctcgaacagatgggcgaagagctcgccgagcagctgcgcacggtcgagcagcgcatttatgagctcgccggccaagaattcaacatcaattcaccgaaacagctcggcgtcattttatttgaaaaactgcagctgcccgtcttgaaaaaaacgaaaaccggctactccacttcggcggatgtgcttgaaaaacttgcgccttatcacgagatcgtggaaaacattttgcattaccgccagcttggcaagttgcagtcgacgtatattgaaggattgctgaaagtcgtgcgacccgatacaaagaaggtgcatacgattttcaatcaggcgttgacgcaaaccggacggctcagctcgtgggagccgaacttgcaaaacattccgattcggcttgaggaaggacggaaaatccgccaagcgttcgtgccgtcggagtctgattggctcattttcgctgccgactactcgcaaattgagttgcgcgtcctcgcccatattgcggaagatgacaatttaatggaagcgttccgccgcgatttggatatccatacgaaaacagcgatggacattttccaagtgagcgaggacgaagtgacgcccaacatgcgccgtcaggcgaaggcggtcaactttgggatcgtttacgggatcagtgattacggcttggcgcaaaacttaaatatttcacgcaaagaggccgctgaattcatcgagcgctacttcgaaagcttccctggcgtgaagcggtatatggaaaacattgtgcaagaagcaaaacagaaagggtatgtgacgacgctgctgcatcggcgccgctatttgccggatatcacgagccgcaacttcaacgtccgcagctttgctgaacggatggcgatgaacacgccgattcaagggagcgccgctgacattattaaaaaggcgatgatcgatctgaacgctagactgaaggaagagcggctgcaagcgcgccttttgctacaggtgcatgacgagctcattttggaggcgccgaaagaagagatggagcggctgtgccggctcgttccggaagtgatggagcaagcggtcacacttcgcgtgccgctcaaagtcgattaccattatggctcgacgtggtatgacgcgaaataaaaaggatcc

SEQ ID NO: 2685 - DNA, 2712 bp, Artificial Sequence
  Description of Artificial Sequence: Synthetic DNA sequence of Bacillus caldolyticus EA1 DNA polymerase T643P
atgaaatacctgctgccgaccgctgctgctggtctgctgctcctcgctgcccagccggcgatggccatgggattgaaaaaaaagcttgttttaatcgacggcagcagcgtggcgtaccgcgcctttttcgccttgccgcttttgcataacgacaaaggcatccatacgaacgccgtctacgggtttacgatgatgttgaataaaattttggcggaagaagagccaactcatatgcttgtcgcgtttgacgccgggaaaacgacgttccggcatgaagcgtttcaagagtataaaggtgggcgccagcagacgccaccggagctgtcggagcagtttccgctgttgcgcgagctgctgagggcgtatcgcatccccgcctatgaactcgagaactacgaagcggacgatattatcggaacgcttgccgcccgcgctgagcaggaagggtttgaggtgaaagtcatttccggcgaccgcgatctgacccagctcgcctccccccatgtgacggtggacattacgaaaaaagggattaccgatatcgaaccgtacacgccggaggcggtccgcgaaaaatacggcttaactccggaacaaatcgttgatttgaaaggattgatgggcgacaaatcggacaacattcccggagtgccgggcatcggggaaaagacggcggtcaagctgctcaagcaattcggcacggtcgaaaacgtgcttgcctccattgacgagatcaaaggcgaaaagttgaaagaaacgctgcgccaacaccgggagatggcgctgttaagcaaaaagctcgccgccattcgccgcgacgccccggtcgagctctcgcttgatgacatcgtctatcaaggggaagaccgggagaaagtggtcgctttatttaaagagcttgggtttcaatcgtttttagagaaaatggaatcgccgtcatcagaagaggaaaaaccgcttgccaagatggcatttacgcttgctgaccgcgtgacggaggagatgcttgccgacaaggcggcgcttgtcgttgaagtggtcgaggaaaattatcatgatgcgccgatcgtcggcatcgctgtggtcaacgaacatggacggtttttcctgcgcccggagacggcgcttgccgatccgcagtttgtcgcctggcttggtgatgaaacgaagaaaaaaagcatgtttgactcaaagcgcgcggcagtcgccttgaaatggaaaggaattgagctatgcggcgtttcctttgatttattgctggccgcctatttgcttgatccggcgcaaggtgttgatgatgtggctgccgcagcaaaaatgaagcaatacgaagcggtgcgctcggatgaagcggtgtatggcaaaggggcgaagcgggccgtgccggatgagccagtgctcgccgagcatctcgtccgcaaggcggcggcgatttgggcgctcgaacgtccgtttttggatgagctgcgccgcaacgaacaagatcggttgctcgtcgagctcgagcagccgttgtcttcgattttggcggaaatggaatttgccggagtgaaagtggatacgaagcggctcgaacagatgggcgaagagctcgccgagcagctgcgcacggtcgagcagcgcatttatgagctcgccggccaagaattcaacatcaattcaccgaaacagctcggcgtcattttatttgaaaaactgcagctgcccgtcttgaaaaaaacgaaaaccggctactccacttcggcggatgtgcttgaaaaacttgcgccttatcacgagatcgtggaaaacattttgcattaccgccagcttggcaagttgcagtcgacgtatattgaaggattgctgaaagtcgtgcgacccgatacaaagaaggtgcatacgattttcaatcaggcgttgacgcaaaccggacggctcagctcgcctgagccgaacttgcaaaacattccgattcggcttgaggaaggacggaaaatccgccaagcgttcgtgccgtcggagtctgattggctcattttcgctgccgactactcgcaaattgagttgcgcgtcctcgcccatattgcggaagatgacaatttaatggaagcgttccgccgcgatttggatatccatacgaaaacagcgatggacattttccaagtgagcgaggacgaagtgacgcccaacatgcgccgtcaggcgaaggcggtcaactttgggatcgtttacgggatcagtgattacggcttggcgcaaaacttaaatatttcacgcaaagaggccgctgaattcatcgagcgctacttcgaaagcttccctggcgtgaagcggtatatggaaaacattgtgcaagaagcaaaacagaaagggtatgtgacgacgctgctgcatcggcgccgctatttgccggatatcacgagccgcaacttcaacgtccgcagctttgctgaacggatggcgatgaacacgccgattcaagggagcgccgctgacattattaaaaaggcgatgatcgatctgaacgctagactgaaggaagagcggctgcaagcgcgccttttgctacaggtgcatgacgagctcattttggaggcgccgaaagaagagatggagcggctgtgccggctcgttccggaagtgatggagcaagcggtcacacttcgcgtgccgctcaaagtcgattaccattatggctcgacgtggtatgacgcgaaataaaaaggatcc

SEQ ID NO: 2686 - DNA, 2712 bp, Artificial Sequence
  Description of Artificial Sequence: Synthetic DNA sequence of Bacillus caldolyticus EA1 DNA polymerase T643M
atgaaatacctgctgccgaccgctgctgctggtctgctgctcctcgctgcccagccggcgatggccatgggattgaaaaaaaagcttgttttaatcgacggcagcagcgtggcgtaccgcgcctttttcgccttgccgcttttgcataacgacaaaggcatccatacgaacgccgtctacgggtttacgatgatgttgaataaaattttggcggaagaagagccaactcatatgcttgtcgcgtttgacgccgggaaaacgacgttccggcatgaagcgtttcaagagtataaaggtgggcgccagcagacgccaccggagctgtcggagcagtttccgctgttgcgcgagctgctgagggcgtatcgcatccccgcctatgaactcgagaactacgaagcggacgatattatcggaacgcttgccgcccgcgctgagcaggaagggtttgaggtgaaagtcatttccggcgaccgcgatctgacccagctcgcctccccccatgtgacggtggacattacgaaaaaagggattaccgatatcgaaccgtacacgccggaggcggtccgcgaaaaatacggcttaactccggaacaaatcgttgatttgaaaggattgatgggcgacaaatcggacaacattcccggagtgccgggcatcggggaaaagacggcggtcaagctgctcaagcaattcggcacggtcgaaaacgtgcttgcctccattgacgagatcaaaggcgaaaagttgaaagaaacgctgcgccaacaccgggagatggcgctgttaagcaaaaagctcgccgccattcgccgcgacgccccggtcgagctctcgcttgatgacatcgtctatcaaggggaagaccgggagaaagtggtcgctttatttaaagagcttgggtttcaatcgtttttagagaaaatggaatcgccgtcatcagaagaggaaaaaccgcttgccaagatggcatttacgcttgctgaccgcgtgacggaggagatgcttgccgacaaggcggcgcttgtcgttgaagtggtcgaggaaaattatcatgatgcgccgatcgtcggcatcgctgtggtcaacgaacatggacggtttttcctgcgcccggagacggcgcttgccgatccgcagtttgtcgcctggcttggtgatgaaacgaagaaaaaaagcatgtttgactcaaagcgcgcggcagtcgccttgaaatggaaaggaattgagctatgcggcgtttcctttgatttattgctggccgcctatttgcttgatccggcgcaaggtgttgatgatgtggctgccgcagcaaaaatgaagcaatacgaagcggtgcgctcggatgaagcggtgtatggcaaaggggcgaagcgggccgtgccggatgagccagtgctcgccgagcatctcgtccgcaaggcggcggcgatttgggcgctcgaacgtccgtttttggatgagctgcgccgcaacgaacaagatcggttgctcgtcgagctcgagcagccgttgtcttcgattttggcggaaatggaatttgccggagtgaaagtggatacgaagcggctcgaacagatgggcgaagagctcgccgagcagctgcgcacggtcgagcagcgcatttatgagctcgccggccaagaattcaacatcaattcaccgaaacagctcggcgtcattttatttgaaaaactgcagctgcccgtcttgaaaaaaacgaaaaccggctactccacttcggcggatgtgcttgaaaaacttgcgccttatcacgagatcgtggaaaacattttgcattaccgccagcttggcaagttgcagtcgacgtatattgaaggattgctgaaagtcgtgcgacccgatacaaagaaggtgcatacgattttcaatcaggcgttgacgcaaaccggacggctcagctcgatggagccgaacttgcaaaacattccgattcggcttgaggaaggacggaaaatccgccaagcgttcgtgccgtcggagtctgattggctcattttcgctgccgactactcgcaaattgagttgcgcgtcctcgcccatattgcggaagatgacaatttaatggaagcgttccgccgcgatttggatatccatacgaaaacagcgatggacattttccaagtgagcgaggacgaagtgacgcccaacatgcgccgtcaggcgaaggcggtcaactttgggatcgtttacgggatcagtgattacggcttggcgcaaaacttaaatatttcacgcaaagaggccgctgaattcatcgagcgctacttcgaaagcttccctggcgtgaagcggtatatggaaaacattgtgcaagaagcaaaacagaaagggtatgtgacgacgctgctgcatcggcgccgctatttgccggatatcacgagccgcaacttcaacgtccgcagctttgctgaacggatggcgatgaacacgccgattcaagggagcgccgctgacattattaaaaaggcgatgatcgatctgaacgctagactgaaggaagagcggctgcaagcgcgccttttgctacaggtgcatgacgagctcattttggaggcgccgaaagaagagatggagcggctgtgccggctcgttccggaagtgatggagcaagcggtcacacttcgcgtgccgctcaaagtcgattaccattatggctcgacgtggtatgacgcgaaataaaaaggatcc

SEQ ID NO: 2687 - DNA, 2712 bp, Artificial Sequence
  Description of Artificial Sequence: Synthetic DNA sequence of Bacillus caldolyticus EA1 DNA polymerase T643N
atgaaatacctgctgccgaccgctgctgctggtctgctgctcctcgctgcccagccggcgatggccatgggattgaaaaaaaagcttgttttaatcgacggcagcagcgtggcgtaccgcgcctttttcgccttgccgcttttgcataacgacaaaggcatccatacgaacgccgtctacgggtttacgatgatgttgaataaaattttggcggaagaagagccaactcatatgcttgtcgcgtttgacgccgggaaaacgacgttccggcatgaagcgtttcaagagtataaaggtgggcgccagcagacgccaccggagctgtcggagcagtttccgctgttgcgcgagctgctgagggcgtatcgcatccccgcctatgaactcgagaactacgaagcggacgatattatcggaacgcttgccgcccgcgctgagcaggaagggtttgaggtgaaagtcatttccggcgaccgcgatctgacccagctcgcctccccccatgtgacggtggacattacgaaaaaagggattaccgatatcgaaccgtacacgccggaggcggtccgcgaaaaatacggcttaactccggaacaaatcgttgatttgaaaggattgatgggcgacaaatcggacaacattcccggagtgccgggcatcggggaaaagacggcggtcaagctgctcaagcaattcggcacggtcgaaaacgtgcttgcctccattgacgagatcaaaggcgaaaagttgaaagaaacgctgcgccaacaccgggagatggcgctgttaagcaaaaagctcgccgccattcgccgcgacgccccggtcgagctctcgcttgatgacatcgtctatcaaggggaagaccgggagaaagtggtcgctttatttaaagagcttgggtttcaatcgtttttagagaaaatggaatcgccgtcatcagaagaggaaaaaccgcttgccaagatggcatttacgcttgctgaccgcgtgacggaggagatgcttgccgacaaggcggcgcttgtcgttgaagtggtcgaggaaaattatcatgatgcgccgatcgtcggcatcgctgtggtcaacgaacatggacggtttttcctgcgcccggagacggcgcttgccgatccgcagtttgtcgcctggcttggtgatgaaacgaagaaaaaaagcatgtttgactcaaagcgcgcggcagtcgccttgaaatggaaaggaattgagctatgcggcgtttcctttgatttattgctggccgcctatttgcttgatccggcgcaaggtgttgatgatgtggctgccgcagcaaaaatgaagcaatacgaagcggtgcgctcggatgaagcggtgtatggcaaaggggcgaagcgggccgtgccggatgagccagtgctcgccgagcatctcgtccgcaaggcggcggcgatttgggcgctcgaacgtccgtttttggatgagctgcgccgcaacgaacaagatcggttgctcgtcgagctcgagcagccgttgtcttcgattttggcggaaatggaatttgccggagtgaaagtggatacgaagcggctcgaacagatgggcgaagagctcgccgagcagctgcgcacggtcgagcagcgcatttatgagctcgccggccaagaattcaacatcaattcaccgaaacagctcggcgtcattttatttgaaaaactgcagctgcccgtcttgaaaaaaacgaaaaccggctactccacttcggcggatgtgcttgaaaaacttgcgccttatcacgagatcgtggaaaacattttgcattaccgccagcttggcaagttgcagtcgacgtatattgaaggattgctgaaagtcgtgcgacccgatacaaagaaggtgcatacgattttcaatcaggcgttgacgcaaaccggacggctcagctcgaatgagccgaacttgcaaaacattccgattcggcttgaggaaggacggaaaatccgccaagcgttcgtgccgtcggagtctgattggctcattttcgctgccgactactcgcaaattgagttgcgcgtcctcgcccatattgcggaagatgacaatttaatggaagcgttccgccgcgatttggatatccatacgaaaacagcgatggacattttccaagtgagcgaggacgaagtgacgcccaacatgcgccgtcaggcgaaggcggtcaactttgggatcgtttacgggatcagtgattacggcttggcgcaaaacttaaatatttcacgcaaagaggccgctgaattcatcgagcgctacttcgaaagcttccctggcgtgaagcggtatatggaaaacattgtgcaagaagcaaaacagaaagggtatgtgacgacgctgctgcatcggcgccgctatttgccggatatcacgagccgcaacttcaacgtccgcagctttgctgaacggatggcgatgaacacgccgattcaagggagcgccgctgacattattaaaaaggcgatgatcgatctgaacgctagactgaaggaagagcggctgcaagcgcgccttttgctacaggtgcatgacgagctcattttggaggcgccgaaagaagagatggagcggctgtgccggctcgttccggaagtgatggagcaagcggtcacacttcgcgtgccgctcaaagtcgattaccattatggctcgacgtggtatgacgcgaaataaaaaggatcc

SEQ ID NO: 2688 - DNA, 2712 bp, Artificial Sequence
  Description of Artificial Sequence: Synthetic DNA sequence of Bacillus caldolyticus EA1 DNA polymerase T643V
atgaaatacctgctgccgaccgctgctgctggtctgctgctcctcgctgcccagccggcgatggccatgggattgaaaaaaaagcttgttttaatcgacggcagcagcgtggcgtaccgcgcctttttcgccttgccgcttttgcataacgacaaaggcatccatacgaacgccgtctacgggtttacgatgatgttgaataaaattttggcggaagaagagccaactcatatgcttgtcgcgtttgacgccgggaaaacgacgttccggcatgaagcgtttcaagagtataaaggtgggcgccagcagacgccaccggagctgtcggagcagtttccgctgttgcgcgagctgctgagggcgtatcgcatccccgcctatgaactcgagaactacgaagcggacgatattatcggaacgcttgccgcccgcgctgagcaggaagggtttgaggtgaaagtcatttccggcgaccgcgatctgacccagctcgcctccccccatgtgacggtggacattacgaaaaaagggattaccgatatcgaaccgtacacgccggaggcggtccgcgaaaaatacggcttaactccggaacaaatcgttgatttgaaaggattgatgggcgacaaatcggacaacattcccggagtgccgggcatcggggaaaagacggcggtcaagctgctcaagcaattcggcacggtcgaaaacgtgcttgcctccattgacgagatcaaaggcgaaaagttgaaagaaacgctgcgccaacaccgggagatggcgctgttaagcaaaaagctcgccgccattcgccgcgacgccccggtcgagctctcgcttgatgacatcgtctatcaaggggaagaccgggagaaagtggtcgctttatttaaagagcttgggtttcaatcgtttttagagaaaatggaatcgccgtcatcagaagaggaaaaaccgcttgccaagatggcatttacgcttgctgaccgcgtgacggaggagatgcttgccgacaaggcggcgcttgtcgttgaagtggtcgaggaaaattatcatgatgcgccgatcgtcggcatcgctgtggtcaacgaacatggacggtttttcctgcgcccggagacggcgcttgccgatccgcagtttgtcgcctggcttggtgatgaaacgaagaaaaaaagcatgtttgactcaaagcgcgcggcagtcgccttgaaatggaaaggaattgagctatgcggcgtttcctttgatttattgctggccgcctatttgcttgatccggcgcaaggtgttgatgatgtggctgccgcagcaaaaatgaagcaatacgaagcggtgcgctcggatgaagcggtgtatggcaaaggggcgaagcgggccgtgccggatgagccagtgctcgccgagcatctcgtccgcaaggcggcggcgatttgggcgctcgaacgtccgtttttggatgagctgcgccgcaacgaacaagatcggttgctcgtcgagctcgagcagccgttgtcttcgattttggcggaaatggaatttgccggagtgaaagtggatacgaagcggctcgaacagatgggcgaagagctcgccgagcagctgcgcacggtcgagcagcgcatttatgagctcgccggccaagaattcaacatcaattcaccgaaacagctcggcgtcattttatttgaaaaactgcagctgcccgtcttgaaaaaaacgaaaaccggctactccacttcggcggatgtgcttgaaaaacttgcgccttatcacgagatcgtggaaaacattttgcattaccgccagcttggcaagttgcagtcgacgtatattgaaggattgctgaaagtcgtgcgacccgatacaaagaaggtgcatacgattttcaatcaggcgttgacgcaaaccggacggctcagctcggtcgagccgaacttgcaaaacattccgattcggcttgaggaaggacggaaaatccgccaagcgttcgtgccgtcggagtctgattggctcattttcgctgccgactactcgcaaattgagttgcgcgtcctcgcccatattgcggaagatgacaatttaatggaagcgttccgccgcgatttggatatccatacgaaaacagcgatggacattttccaagtgagcgaggacgaagtgacgcccaacatgcgccgtcaggcgaaggcggtcaactttgggatcgtttacgggatcagtgattacggcttggcgcaaaacttaaatatttcacgcaaagaggccgctgaattcatcgagcgctacttcgaaagcttccctggcgtgaagcggtatatggaaaacattgtgcaagaagcaaaacagaaagggtatgtgacgacgctgctgcatcggcgccgctatttgccggatatcacgagccgcaacttcaacgtccgcagctttgctgaacggatggcgatgaacacgccgattcaagggagcgccgctgacattattaaaaaggcgatgatcgatctgaacgctagactgaaggaagagcggctgcaagcgcgccttttgctacaggtgcatgacgagctcattttggaggcgccgaaagaagagatggagcggctgtgccggctcgttccggaagtgatggagcaagcggtcacacttcgcgtgccgctcaaagtcgattaccattatggctcgacgtggtatgacgcgaaataaaaaggatcc

SEQ ID NO: 2689 - DNA, 2712 bp, Artificial Sequence
  Description of Artificial Sequence: Synthetic DNA sequence of Bacillus caldolyticus EA1 DNA polymerase E644A
atgaaatacctgctgccgaccgctgctgctggtctgctgctcctcgctgcccagccggcgatggccatgggattgaaaaaaaagcttgttttaatcgacggcagcagcgtggcgtaccgcgcctttttcgccttgccgcttttgcataacgacaaaggcatccatacgaacgccgtctacgggtttacgatgatgttgaataaaattttggcggaagaagagccaactcatatgcttgtcgcgtttgacgccgggaaaacgacgttccggcatgaagcgtttcaagagtataaaggtgggcgccagcagacgccaccggagctgtcggagcagtttccgctgttgcgcgagctgctgagggcgtatcgcatccccgcctatgaactcgagaactacgaagcggacgatattatcggaacgcttgccgcccgcgctgagcaggaagggtttgaggtgaaagtcatttccggcgaccgcgatctgacccagctcgcctccccccatgtgacggtggacattacgaaaaaagggattaccgatatcgaaccgtacacgccggaggcggtccgcgaaaaatacggcttaactccggaacaaatcgttgatttgaaaggattgatgggcgacaaatcggacaacattcccggagtgccgggcatcggggaaaagacggcggtcaagctgctcaagcaattcggcacggtcgaaaacgtgcttgcctccattgacgagatcaaaggcgaaaagttgaaagaaacgctgcgccaacaccgggagatggcgctgttaagcaaaaagctcgccgccattcgccgcgacgccccggtcgagctctcgcttgatgacatcgtctatcaaggggaagaccgggagaaagtggtcgctttatttaaagagcttgggtttcaatcgtttttagagaaaatggaatcgccgtcatcagaagaggaaaaaccgcttgccaagatggcatttacgcttgctgaccgcgtgacggaggagatgcttgccgacaaggcggcgcttgtcgttgaagtggtcgaggaaaattatcatgatgcgccgatcgtcggcatcgctgtggtcaacgaacatggacggtttttcctgcgcccggagacggcgcttgccgatccgcagtttgtcgcctggcttggtgatgaaacgaagaaaaaaagcatgtttgactcaaagcgcgcggcagtcgccttgaaatggaaaggaattgagctatgcggcgtttcctttgatttattgctggccgcctatttgcttgatccggcgcaaggtgttgatgatgtggctgccgcagcaaaaatgaagcaatacgaagcggtgcgctcggatgaagcggtgtatggcaaaggggcgaagcgggccgtgccggatgagccagtgctcgccgagcatctcgtccgcaaggcggcggcgatttgggcgctcgaacgtccgtttttggatgagctgcgccgcaacgaacaagatcggttgctcgtcgagctcgagcagccgttgtcttcgattttggcggaaatggaatttgccggagtgaaagtggatacgaagcggctcgaacagatgggcgaagagctcgccgagcagctgcgcacggtcgagcagcgcatttatgagctcgccggccaagaattcaacatcaattcaccgaaacagctcggcgtcattttatttgaaaaactgcagctgcccgtcttgaaaaaaacgaaaaccggctactccacttcggcggatgtgcttgaaaaacttgcgccttatcacgagatcgtggaaaacattttgcattaccgccagcttggcaagttgcagtcgacgtatattgaaggattgctgaaagtcgtgcgacccgatacaaagaaggtgcatacgattttcaatcaggcgttgacgcaaaccggacggctcagctcgacggctccgaacttgcaaaacattccgattcggcttgaggaaggacggaaaatccgccaagcgttcgtgccgtcggagtctgattggctcattttcgctgccgactactcgcaaattgagttgcgcgtcctcgcccatattgcggaagatgacaatttaatggaagcgttccgccgcgatttggatatccatacgaaaacagcgatggacattttccaagtgagcgaggacgaagtgacgcccaacatgcgccgtcaggcgaaggcggtcaactttgggatcgtttacgggatcagtgattacggcttggcgcaaaacttaaatatttcacgcaaagaggccgctgaattcatcgagcgctacttcgaaagcttccctggcgtgaagcggtatatggaaaacattgtgcaagaagcaaaacagaaagggtatgtgacgacgctgctgcatcggcgccgctatttgccggatatcacgagccgcaacttcaacgtccgcagctttgctgaacggatggcgatgaacacgccgattcaagggagcgccgctgacattattaaaaaggcgatgatcgatctgaacgctagactgaaggaagagcggctgcaagcgcgccttttgctacaggtgcatgacgagctcattttggaggcgccgaaagaagagatggagcggctgtgccggctcgttccggaagtgatggagcaagcggtcacacttcgcgtgccgctcaaagtcgattaccattatggctcgacgtggtatgacgcgaaataaaaaggatcc

SEQ ID NO: 2690 - DNA, 2712 bp, Artificial Sequence
  Description of Artificial Sequence: Synthetic DNA sequence of Bacillus caldolyticus EA1 DNA polymerase E644R
atgaaatacctgctgccgaccgctgctgctggtctgctgctcctcgctgcccagccggcgatggccatgggattgaaaaaaaagcttgttttaatcgacggcagcagcgtggcgtaccgcgcctttttcgccttgccgcttttgcataacgacaaaggcatccatacgaacgccgtctacgggtttacgatgatgttgaataaaattttggcggaagaagagccaactcatatgcttgtcgcgtttgacgccgggaaaacgacgttccggcatgaagcgtttcaagagtataaaggtgggcgccagcagacgccaccggagctgtcggagcagtttccgctgttgcgcgagctgctgagggcgtatcgcatccccgcctatgaactcgagaactacgaagcggacgatattatcggaacgcttgccgcccgcgctgagcaggaagggtttgaggtgaaagtcatttccggcgaccgcgatctgacccagctcgcctccccccatgtgacggtggacattacgaaaaaagggattaccgatatcgaaccgtacacgccggaggcggtccgcgaaaaatacggcttaactccggaacaaatcgttgatttgaaaggattgatgggcgacaaatcggacaacattcccggagtgccgggcatcggggaaaagacggcggtcaagctgctcaagcaattcggcacggtcgaaaacgtgcttgcctccattgacgagatcaaaggcgaaaagttgaaagaaacgctgcgccaacaccgggagatggcgctgttaagcaaaaagctcgccgccattcgccgcgacgccccggtcgagctctcgcttgatgacatcgtctatcaaggggaagaccgggagaaagtggtcgctttatttaaagagcttgggtttcaatcgtttttagagaaaatggaatcgccgtcatcagaagaggaaaaaccgcttgccaagatggcatttacgcttgctgaccgcgtgacggaggagatgcttgccgacaaggcggcgcttgtcgttgaagtggtcgaggaaaattatcatgatgcgccgatcgtcggcatcgctgtggtcaacgaacatggacggtttttcctgcgcccggagacggcgcttgccgatccgcagtttgtcgcctggcttggtgatgaaacgaagaaaaaaagcatgtttgactcaaagcgcgcggcagtcgccttgaaatggaaaggaattgagctatgcggcgtttcctttgatttattgctggccgcctatttgcttgatccggcgcaaggtgttgatgatgtggctgccgcagcaaaaatgaagcaatacgaagcggtgcgctcggatgaagcggtgtatggcaaaggggcgaagcgggccgtgccggatgagccagtgctcgccgagcatctcgtccgcaaggcggcggcgatttgggcgctcgaacgtccgtttttggatgagctgcgccgcaacgaacaagatcggttgctcgtcgagctcgagcagccgttgtcttcgattttggcggaaatggaatttgccggagtgaaagtggatacgaagcggctcgaacagatgggcgaagagctcgccgagcagctgcgcacggtcgagcagcgcatttatgagctcgccggccaagaattcaacatcaattcaccgaaacagctcggcgtcattttatttgaaaaactgcagctgcccgtcttgaaaaaaacgaaaaccggctactccacttcggcggatgtgcttgaaaaacttgcgccttatcacgagatcgtggaaaacattttgcattaccgccagcttggcaagttgcagtcgacgtatattgaaggattgctgaaagtcgtgcgacccgatacaaagaaggtgcatacgattttcaatcaggcgttgacgcaaaccggacggctcagctcgacgcgaccgaacttgcaaaacattccgattcggcttgaggaaggacggaaaatccgccaagcgttcgtgccgtcggagtctgattggctcattttcgctgccgactactcgcaaattgagttgcgcgtcctcgcccatattgcggaagatgacaatttaatggaagcgttccgccgcgatttggatatccatacgaaaacagcgatggacattttccaagtgagcgaggacgaagtgacgcccaacatgcgccgtcaggcgaaggcggtcaactttgggatcgtttacgggatcagtgattacggcttggcgcaaaacttaaatatttcacgcaaagaggccgctgaattcatcgagcgctacttcgaaagcttccctggcgtgaagcggtatatggaaaacattgtgcaagaagcaaaacagaaagggtatgtgacgacgctgctgcatcggcgccgctatttgccggatatcacgagccgcaacttcaacgtccgcagctttgctgaacggatggcgatgaacacgccgattcaagggagcgccgctgacattattaaaaaggcgatgatcgatctgaacgctagactgaaggaagagcggctgcaagcgcgccttttgctacaggtgcatgacgagctcattttggaggcgccgaaagaagagatggagcggctgtgccggctcgttccggaagtgatggagcaagcggtcacacttcgcgtgccgctcaaagtcgattaccattatggctcgacgtggtatgacgcgaaataaaaaggatcc

SEQ ID NO: 2691 - DNA, 2712 bp, Artificial Sequence
  Description of Artificial Sequence: Synthetic DNA sequence of Bacillus caldolyticus EA1 DNA polymerase E644C
atgaaatacctgctgccgaccgctgctgctggtctgctgctcctcgctgcccagccggcgatggccatgggattgaaaaaaaagcttgttttaatcgacggcagcagcgtggcgtaccgcgcctttttcgccttgccgcttttgcataacgacaaaggcatccatacgaacgccgtctacgggtttacgatgatgttgaataaaattttggcggaagaagagccaactcatatgcttgtcgcgtttgacgccgggaaaacgacgttccggcatgaagcgtttcaagagtataaaggtgggcgccagcagacgccaccggagctgtcggagcagtttccgctgttgcgcgagctgctgagggcgtatcgcatccccgcctatgaactcgagaactacgaagcggacgatattatcggaacgcttgccgcccgcgctgagcaggaagggtttgaggtgaaagtcatttccggcgaccgcgatctgacccagctcgcctccccccatgtgacggtggacattacgaaaaaagggattaccgatatcgaaccgtacacgccggaggcggtccgcgaaaaatacggcttaactccggaacaaatcgttgatttgaaaggattgatgggcgacaaatcggacaacattcccggagtgccgggcatcggggaaaagacggcggtcaagctgctcaagcaattcggcacggtcgaaaacgtgcttgcctccattgacgagatcaaaggcgaaaagttgaaagaaacgctgcgccaacaccgggagatggcgctgttaagcaaaaagctcgccgccattcgccgcgacgccccggtcgagctctcgcttgatgacatcgtctatcaaggggaagaccgggagaaagtggtcgctttatttaaagagcttgggtttcaatcgtttttagagaaaatggaatcgccgtcatcagaagaggaaaaaccgcttgccaagatggcatttacgcttgctgaccgcgtgacggaggagatgcttgccgacaaggcggcgcttgtcgttgaagtggtcgaggaaaattatcatgatgcgccgatcgtcggcatcgctgtggtcaacgaacatggacggtttttcctgcgcccggagacggcgcttgccgatccgcagtttgtcgcctggcttggtgatgaaacgaagaaaaaaagcatgtttgactcaaagcgcgcggcagtcgccttgaaatggaaaggaattgagctatgcggcgtttcctttgatttattgctggccgcctatttgcttgatccggcgcaaggtgttgatgatgtggctgccgcagcaaaaatgaagcaatacgaagcggtgcgctcggatgaagcggtgtatggcaaaggggcgaagcgggccgtgccggatgagccagtgctcgccgagcatctcgtccgcaaggcggcggcgatttgggcgctcgaacgtccgtttttggatgagctgcgccgcaacgaacaagatcggttgctcgtcgagctcgagcagccgttgtcttcgattttggcggaaatggaatttgccggagtgaaagtggatacgaagcggctcgaacagatgggcgaagagctcgccgagcagctgcgcacggtcgagcagcgcatttatgagctcgccggccaagaattcaacatcaattcaccgaaacagctcggcgtcattttatttgaaaaactgcagctgcccgtcttgaaaaaaacgaaaaccggctactccacttcggcggatgtgcttgaaaaacttgcgccttatcacgagatcgtggaaaacattttgcattaccgccagcttggcaagttgcagtcgacgtatattgaaggattgctgaaagtcgtgcgacccgatacaaagaaggtgcatacgattttcaatcaggcgttgacgcaaaccggacggctcagctcgacgtgtccgaacttgcaaaacattccgattcggcttgaggaaggacggaaaatccgccaagcgttcgtgccgtcggagtctgattggctcattttcgctgccgactactcgcaaattgagttgcgcgtcctcgcccatattgcggaagatgacaatttaatggaagcgttccgccgcgatttggatatccatacgaaaacagcgatggacattttccaagtgagcgaggacgaagtgacgcccaacatgcgccgtcaggcgaaggcggtcaactttgggatcgtttacgggatcagtgattacggcttggcgcaaaacttaaatatttcacgcaaagaggccgctgaattcatcgagcgctacttcgaaagcttccctggcgtgaagcggtatatggaaaacattgtgcaagaagcaaaacagaaagggtatgtgacgacgctgctgcatcggcgccgctatttgccggatatcacgagccgcaacttcaacgtccgcagctttgctgaacggatggcgatgaacacgccgattcaagggagcgccgctgacattattaaaaaggcgatgatcgatctgaacgctagactgaaggaagagcggctgcaagcgcgccttttgctacaggtgcatgacgagctcattttggaggcgccgaaagaagagatggagcggctgtgccggctcgttccggaagtgatggagcaagcggtcacacttcgcgtgccgctcaaagtcgattaccattatggctcgacgtggtatgacgcgaaataaaaaggatcc

SEQ ID NO: 2692 - DNA, 2712 bp, Artificial Sequence
  Description of Artificial Sequence: Synthetic DNA sequence of Bacillus caldolyticus EA1 DNA polymerase E644G
atgaaatacctgctgccgaccgctgctgctggtctgctgctcctcgctgcccagccggcgatggccatgggattgaaaaaaaagcttgttttaatcgacggcagcagcgtggcgtaccgcgcctttttcgccttgccgcttttgcataacgacaaaggcatccatacgaacgccgtctacgggtttacgatgatgttgaataaaattttggcggaagaagagccaactcatatgcttgtcgcgtttgacgccgggaaaacgacgttccggcatgaagcgtttcaagagtataaaggtgggcgccagcagacgccaccggagctgtcggagcagtttccgctgttgcgcgagctgctgagggcgtatcgcatccccgcctatgaactcgagaactacgaagcggacgatattatcggaacgcttgccgcccgcgctgagcaggaagggtttgaggtgaaagtcatttccggcgaccgcgatctgacccagctcgcctccccccatgtgacggtggacattacgaaaaaagggattaccgatatcgaaccgtacacgccggaggcggtccgcgaaaaatacggcttaactccggaacaaatcgttgatttgaaaggattgatgggcgacaaatcggacaacattcccggagtgccgggcatcggggaaaagacggcggtcaagctgctcaagcaattcggcacggtcgaaaacgtgcttgcctccattgacgagatcaaaggcgaaaagttgaaagaaacgctgcgccaacaccgggagatggcgctgttaagcaaaaagctcgccgccattcgccgcgacgccccggtcgagctctcgcttgatgacatcgtctatcaaggggaagaccgggagaaagtggtcgctttatttaaagagcttgggtttcaatcgtttttagagaaaatggaatcgccgtcatcagaagaggaaaaaccgcttgccaagatggcatttacgcttgctgaccgcgtgacggaggagatgcttgccgacaaggcggcgcttgtcgttgaagtggtcgaggaaaattatcatgatgcgccgatcgtcggcatcgctgtggtcaacgaacatggacggtttttcctgcgcccggagacggcgcttgccgatccgcagtttgtcgcctggcttggtgatgaaacgaagaaaaaaagcatgtttgactcaaagcgcgcggcagtcgccttgaaatggaaaggaattgagctatgcggcgtttcctttgatttattgctggccgcctatttgcttgatccggcgcaaggtgttgatgatgtggctgccgcagcaaaaatgaagcaatacgaagcggtgcgctcggatgaagcggtgtatggcaaaggggcgaagcgggccgtgccggatgagccagtgctcgccgagcatctcgtccgcaaggcggcggcgatttgggcgctcgaacgtccgtttttggatgagctgcgccgcaacgaacaagatcggttgctcgtcgagctcgagcagccgttgtcttcgattttggcggaaatggaatttgccggagtgaaagtggatacgaagcggctcgaacagatgggcgaagagctcgccgagcagctgcgcacggtcgagcagcgcatttatgagctcgccggccaagaattcaacatcaattcaccgaaacagctcggcgtcattttatttgaaaaactgcagctgcccgtcttgaaaaaaacgaaaaccggctactccacttcggcggatgtgcttgaaaaacttgcgccttatcacgagatcgtggaaaacattttgcattaccgccagcttggcaagttgcagtcgacgtatattgaaggattgctgaaagtcgtgcgacccgatacaaagaaggtgcatacgattttcaatcaggcgttgacgcaaaccggacggctcagctcgacgggtccgaacttgcaaaacattccgattcggcttgaggaaggacggaaaatccgccaagcgttcgtgccgtcggagtctgattggctcattttcgctgccgactactcgcaaattgagttgcgcgtcctcgcccatattgcggaagatgacaatttaatggaagcgttccgccgcgatttggatatccatacgaaaacagcgatggacattttccaagtgagcgaggacgaagtgacgcccaacatgcgccgtcaggcgaaggcggtcaactttgggatcgtttacgggatcagtgattacggcttggcgcaaaacttaaatatttcacgcaaagaggccgctgaattcatcgagcgctacttcgaaagcttccctggcgtgaagcggtatatggaaaacattgtgcaagaagcaaaacagaaagggtatgtgacgacgctgctgcatcggcgccgctatttgccggatatcacgagccgcaacttcaacgtccgcagctttgctgaacggatggcgatgaacacgccgattcaagggagcgccgctgacattattaaaaaggcgatgatcgatctgaacgctagactgaaggaagagcggctgcaagcgcgccttttgctacaggtgcatgacgagctcattttggaggcgccgaaagaagagatggagcggctgtgccggctcgttccggaagtgatggagcaagcggtcacacttcgcgtgccgctcaaagtcgattaccattatggctcgacgtggtatgacgcgaaataaaaaggatcc

SEQ ID NO: 2693 - DNA, 2712 bp, Artificial Sequence
  Description of Artificial Sequence: Synthetic DNA sequence of Bacillus caldolyticus EA1 DNA polymerase E644Q
atgaaatacctgctgccgaccgctgctgctggtctgctgctcctcgctgcccagccggcgatggccatgggattgaaaaaaaagcttgttttaatcgacggcagcagcgtggcgtaccgcgcctttttcgccttgccgcttttgcataacgacaaaggcatccatacgaacgccgtctacgggtttacgatgatgttgaataaaattttggcggaagaagagccaactcatatgcttgtcgcgtttgacgccgggaaaacgacgttccggcatgaagcgtttcaagagtataaaggtgggcgccagcagacgccaccggagctgtcggagcagtttccgctgttgcgcgagctgctgagggcgtatcgcatccccgcctatgaactcgagaactacgaagcggacgatattatcggaacgcttgccgcccgcgctgagcaggaagggtttgaggtgaaagtcatttccggcgaccgcgatctgacccagctcgcctccccccatgtgacggtggacattacgaaaaaagggattaccgatatcgaaccgtacacgccggaggcggtccgcgaaaaatacggcttaactccggaacaaatcgttgatttgaaaggattgatgggcgacaaatcggacaacattcccggagtgccgggcatcggggaaaagacggcggtcaagctgctcaagcaattcggcacggtcgaaaacgtgcttgcctccattgacgagatcaaaggcgaaaagttgaaagaaacgctgcgccaacaccgggagatggcgctgttaagcaaaaagctcgccgccattcgccgcgacgccccggtcgagctctcgcttgatgacatcgtctatcaaggggaagaccgggagaaagtggtcgctttatttaaagagcttgggtttcaatcgtttttagagaaaatggaatcgccgtcatcagaagaggaaaaaccgcttgccaagatggcatttacgcttgctgaccgcgtgacggaggagatgcttgccgacaaggcggcgcttgtcgttgaagtggtcgaggaaaattatcatgatgcgccgatcgtcggcatcgctgtggtcaacgaacatggacggtttttcctgcgcccggagacggcgcttgccgatccgcagtttgtcgcctggcttggtgatgaaacgaagaaaaaaagcatgtttgactcaaagcgcgcggcagtcgccttgaaatggaaaggaattgagctatgcggcgtttcctttgatttattgctggccgcctatttgcttgatccggcgcaaggtgttgatgatgtggctgccgcagcaaaaatgaagcaatacgaagcggtgcgctcggatgaagcggtgtatggcaaaggggcgaagcgggccgtgccggatgagccagtgctcgccgagcatctcgtccgcaaggcggcggcgatttgggcgctcgaacgtccgtttttggatgagctgcgccgcaacgaacaagatcggttgctcgtcgagctcgagcagccgttgtcttcgattttggcggaaatggaatttgccggagtgaaagtggatacgaagcggctcgaacagatgggcgaagagctcgccgagcagctgcgcacggtcgagcagcgcatttatgagctcgccggccaagaattcaacatcaattcaccgaaacagctcggcgtcattttatttgaaaaactgcagctgcccgtcttgaaaaaaacgaaaaccggctactccacttcggcggatgtgcttgaaaaacttgcgccttatcacgagatcgtggaaaacattttgcattaccgccagcttggcaagttgcagtcgacgtatattgaaggattgctgaaagtcgtgcgacccgatacaaagaaggtgcatacgattttcaatcaggcgttgacgcaaaccggacggctcagctcgacgcaaccgaacttgcaaaacattccgattcggcttgaggaaggacggaaaatccgccaagcgttcgtgccgtcggagtctgattggctcattttcgctgccgactactcgcaaattgagttgcgcgtcctcgcccatattgcggaagatgacaatttaatggaagcgttccgccgcgatttggatatccatacgaaaacagcgatggacattttccaagtgagcgaggacgaagtgacgcccaacatgcgccgtcaggcgaaggcggtcaactttgggatcgtttacgggatcagtgattacggcttggcgcaaaacttaaatatttcacgcaaagaggccgctgaattcatcgagcgctacttcgaaagcttccctggcgtgaagcggtatatggaaaacattgtgcaagaagcaaaacagaaagggtatgtgacgacgctgctgcatcggcgccgctatttgccggatatcacgagccgcaacttcaacgtccgcagctttgctgaacggatggcgatgaacacgccgattcaagggagcgccgctgacattattaaaaaggcgatgatcgatctgaacgctagactgaaggaagagcggctgcaagcgcgccttttgctacaggtgcatgacgagctcattttggaggcgccgaaagaagagatggagcggctgtgccggctcgttccggaagtgatggagcaagcggtcacacttcgcgtgccgctcaaagtcgattaccattatggctcgacgtggtatgacgcgaaataaaaaggatcc

SEQ ID NO: 2694 - DNA, 2712 bp, Artificial Sequence
  Description of Artificial Sequence: Synthetic DNA sequence of Bacillus caldolyticus EA1 DNA polymerase E644H
atgaaatacctgctgccgaccgctgctgctggtctgctgctcctcgctgcccagccggcgatggccatgggattgaaaaaaaagcttgttttaatcgacggcagcagcgtggcgtaccgcgcctttttcgccttgccgcttttgcataacgacaaaggcatccatacgaacgccgtctacgggtttacgatgatgttgaataaaattttggcggaagaagagccaactcatatgcttgtcgcgtttgacgccgggaaaacgacgttccggcatgaagcgtttcaagagtataaaggtgggcgccagcagacgccaccggagctgtcggagcagtttccgctgttgcgcgagctgctgagggcgtatcgcatccccgcctatgaactcgagaactacgaagcggacgatattatcggaacgcttgccgcccgcgctgagcaggaagggtttgaggtgaaagtcatttccggcgaccgcgatctgacccagctcgcctccccccatgtgacggtggacattacgaaaaaagggattaccgatatcgaaccgtacacgccggaggcggtccgcgaaaaatacggcttaactccggaacaaatcgttgatttgaaaggattgatgggcgacaaatcggacaacattcccggagtgccgggcatcggggaaaagacggcggtcaagctgctcaagcaattcggcacggtcgaaaacgtgcttgcctccattgacgagatcaaaggcgaaaagttgaaagaaacgctgcgccaacaccgggagatggcgctgttaagcaaaaagctcgccgccattcgccgcgacgccccggtcgagctctcgcttgatgacatcgtctatcaaggggaagaccgggagaaagtggtcgctttatttaaagagcttgggtttcaatcgtttttagagaaaatggaatcgccgtcatcagaagaggaaaaaccgcttgccaagatggcatttacgcttgctgaccgcgtgacggaggagatgcttgccgacaaggcggcgcttgtcgttgaagtggtcgaggaaaattatcatgatgcgccgatcgtcggcatcgctgtggtcaacgaacatggacggtttttcctgcgcccggagacggcgcttgccgatccgcagtttgtcgcctggcttggtgatgaaacgaagaaaaaaagcatgtttgactcaaagcgcgcggcagtcgccttgaaatggaaaggaattgagctatgcggcgtttcctttgatttattgctggccgcctatttgcttgatccggcgcaaggtgttgatgatgtggctgccgcagcaaaaatgaagcaatacgaagcggtgcgctcggatgaagcggtgtatggcaaaggggcgaagcgggccgtgccggatgagccagtgctcgccgagcatctcgtccgcaaggcggcggcgatttgggcgctcgaacgtccgtttttggatgagctgcgccgcaacgaacaagatcggttgctcgtcgagctcgagcagccgttgtcttcgattttggcggaaatggaatttgccggagtgaaagtggatacgaagcggctcgaacagatgggcgaagagctcgccgagcagctgcgcacggtcgagcagcgcatttatgagctcgccggccaagaattcaacatcaattcaccgaaacagctcggcgtcattttatttgaaaaactgcagctgcccgtcttgaaaaaaacgaaaaccggctactccacttcggcggatgtgcttgaaaaacttgcgccttatcacgagatcgtggaaaacattttgcattaccgccagcttggcaagttgcagtcgacgtatattgaaggattgctgaaagtcgtgcgacccgatacaaagaaggtgcatacgattttcaatcaggcgttgacgcaaaccggacggctcagctcgacgcatccgaacttgcaaaacattccgattcggcttgaggaaggacggaaaatccgccaagcgttcgtgccgtcggagtctgattggctcattttcgctgccgactactcgcaaattgagttgcgcgtcctcgcccatattgcggaagatgacaatttaatggaagcgttccgccgcgatttggatatccatacgaaaacagcgatggacattttccaagtgagcgaggacgaagtgacgcccaacatgcgccgtcaggcgaaggcggtcaactttgggatcgtttacgggatcagtgattacggcttggcgcaaaacttaaatatttcacgcaaagaggccgctgaattcatcgagcgctacttcgaaagcttccctggcgtgaagcggtatatggaaaacattgtgcaagaagcaaaacagaaagggtatgtgacgacgctgctgcatcggcgccgctatttgccggatatcacgagccgcaacttcaacgtccgcagctttgctgaacggatggcgatgaacacgccgattcaagggagcgccgctgacattattaaaaaggcgatgatcgatctgaacgctagactgaaggaagagcggctgcaagcgcgccttttgctacaggtgcatgacgagctcattttggaggcgccgaaagaagagatggagcggctgtgccggctcgttccggaagtgatggagcaagcggtcacacttcgcgtgccgctcaaagtcgattaccattatggctcgacgtggtatgacgcgaaataaaaaggatcc

SEQ ID NO: 2695 - DNA, 2712 bp, Artificial Sequence
  Description of Artificial Sequence: Synthetic DNA sequence of Bacillus caldolyticus EA1 DNA polymerase E644I
atgaaatacctgctgccgaccgctgctgctggtctgctgctcctcgctgcccagccggcgatggccatgggattgaaaaaaaagcttgttttaatcgacggcagcagcgtggcgtaccgcgcctttttcgccttgccgcttttgcataacgacaaaggcatccatacgaacgccgtctacgggtttacgatgatgttgaataaaattttggcggaagaagagccaactcatatgcttgtcgcgtttgacgccgggaaaacgacgttccggcatgaagcgtttcaagagtataaaggtgggcgccagcagacgccaccggagctgtcggagcagtttccgctgttgcgcgagctgctgagggcgtatcgcatccccgcctatgaactcgagaactacgaagcggacgatattatcggaacgcttgccgcccgcgctgagcaggaagggtttgaggtgaaagtcatttccggcgaccgcgatctgacccagctcgcctccccccatgtgacggtggacattacgaaaaaagggattaccgatatcgaaccgtacacgccggaggcggtccgcgaaaaatacggcttaactccggaacaaatcgttgatttgaaaggattgatgggcgacaaatcggacaacattcccggagtgccgggcatcggggaaaagacggcggtcaagctgctcaagcaattcggcacggtcgaaaacgtgcttgcctccattgacgagatcaaaggcgaaaagttgaaagaaacgctgcgccaacaccgggagatggcgctgttaagcaaaaagctcgccgccattcgccgcgacgccccggtcgagctctcgcttgatgacatcgtctatcaaggggaagaccgggagaaagtggtcgctttatttaaagagcttgggtttcaatcgtttttagagaaaatggaatcgccgtcatcagaagaggaaaaaccgcttgccaagatggcatttacgcttgctgaccgcgtgacggaggagatgcttgccgacaaggcggcgcttgtcgttgaagtggtcgaggaaaattatcatgatgcgccgatcgtcggcatcgctgtggtcaacgaacatggacggtttttcctgcgcccggagacggcgcttgccgatccgcagtttgtcgcctggcttggtgatgaaacgaagaaaaaaagcatgtttgactcaaagcgcgcggcagtcgccttgaaatggaaaggaattgagctatgcggcgtttcctttgatttattgctggccgcctatttgcttgatccggcgcaaggtgttgatgatgtggctgccgcagcaaaaatgaagcaatacgaagcggtgcgctcggatgaagcggtgtatggcaaaggggcgaagcgggccgtgccggatgagccagtgctcgccgagcatctcgtccgcaaggcggcggcgatttgggcgctcgaacgtccgtttttggatgagctgcgccgcaacgaacaagatcggttgctcgtcgagctcgagcagccgttgtcttcgattttggcggaaatggaatttgccggagtgaaagtggatacgaagcggctcgaacagatgggcgaagagctcgccgagcagctgcgcacggtcgagcagcgcatttatgagctcgccggccaagaattcaacatcaattcaccgaaacagctcggcgtcattttatttgaaaaactgcagctgcccgtcttgaaaaaaacgaaaaccggctactccacttcggcggatgtgcttgaaaaacttgcgccttatcacgagatcgtggaaaacattttgcattaccgccagcttggcaagttgcagtcgacgtatattgaaggattgctgaaagtcgtgcgacccgatacaaagaaggtgcatacgattttcaatcaggcgttgacgcaaaccggacggctcagctcgacgattccgaacttgcaaaacattccgattcggcttgaggaaggacggaaaatccgccaagcgttcgtgccgtcggagtctgattggctcattttcgctgccgactactcgcaaattgagttgcgcgtcctcgcccatattgcggaagatgacaatttaatggaagcgttccgccgcgatttggatatccatacgaaaacagcgatggacattttccaagtgagcgaggacgaagtgacgcccaacatgcgccgtcaggcgaaggcggtcaactttgggatcgtttacgggatcagtgattacggcttggcgcaaaacttaaatatttcacgcaaagaggccgctgaattcatcgagcgctacttcgaaagcttccctggcgtgaagcggtatatggaaaacattgtgcaagaagcaaaacagaaagggtatgtgacgacgctgctgcatcggcgccgctatttgccggatatcacgagccgcaacttcaacgtccgcagctttgctgaacggatggcgatgaacacgccgattcaagggagcgccgctgacattattaaaaaggcgatgatcgatctgaacgctagactgaaggaagagcggctgcaagcgcgccttttgctacaggtgcatgacgagctcattttggaggcgccgaaagaagagatggagcggctgtgccggctcgttccggaagtgatggagcaagcggtcacacttcgcgtgccgctcaaagtcgattaccattatggctcgacgtggtatgacgcgaaataaaaaggatcc

SEQ ID NO: 2696 - DNA, 2712 bp, Artificial Sequence
  Description of Artificial Sequence: Synthetic DNA sequence of Bacillus caldolyticus EA1 DNA polymerase E644L
atgaaatacctgctgccgaccgctgctgctggtctgctgctcctcgctgcccagccggcgatggccatgggattgaaaaaaaagcttgttttaatcgacggcagcagcgtggcgtaccgcgcctttttcgccttgccgcttttgcataacgacaaaggcatccatacgaacgccgtctacgggtttacgatgatgttgaataaaattttggcggaagaagagccaactcatatgcttgtcgcgtttgacgccgggaaaacgacgttccggcatgaagcgtttcaagagtataaaggtgggcgccagcagacgccaccggagctgtcggagcagtttccgctgttgcgcgagctgctgagggcgtatcgcatccccgcctatgaactcgagaactacgaagcggacgatattatcggaacgcttgccgcccgcgctgagcaggaagggtttgaggtgaaagtcatttccggcgaccgcgatctgacccagctcgcctccccccatgtgacggtggacattacgaaaaaagggattaccgatatcgaaccgtacacgccggaggcggtccgcgaaaaatacggcttaactccggaacaaatcgttgatttgaaaggattgatgggcgacaaatcggacaacattcccggagtgccgggcatcggggaaaagacggcggtcaagctgctcaagcaattcggcacggtcgaaaacgtgcttgcctccattgacgagatcaaaggcgaaaagttgaaagaaacgctgcgccaacaccgggagatggcgctgttaagcaaaaagctcgccgccattcgccgcgacgccccggtcgagctctcgcttgatgacatcgtctatcaaggggaagaccgggagaaagtggtcgctttatttaaagagcttgggtttcaatcgtttttagagaaaatggaatcgccgtcatcagaagaggaaaaaccgcttgccaagatggcatttacgcttgctgaccgcgtgacggaggagatgcttgccgacaaggcggcgcttgtcgttgaagtggtcgaggaaaattatcatgatgcgccgatcgtcggcatcgctgtggtcaacgaacatggacggtttttcctgcgcccggagacggcgcttgccgatccgcagtttgtcgcctggcttggtgatgaaacgaagaaaaaaagcatgtttgactcaaagcgcgcggcagtcgccttgaaatggaaaggaattgagctatgcggcgtttcctttgatttattgctggccgcctatttgcttgatccggcgcaaggtgttgatgatgtggctgccgcagcaaaaatgaagcaatacgaagcggtgcgctcggatgaagcggtgtatggcaaaggggcgaagcgggccgtgccggatgagccagtgctcgccgagcatctcgtccgcaaggcggcggcgatttgggcgctcgaacgtccgtttttggatgagctgcgccgcaacgaacaagatcggttgctcgtcgagctcgagcagccgttgtcttcgattttggcggaaatggaatttgccggagtgaaagtggatacgaagcggctcgaacagatgggcgaagagctcgccgagcagctgcgcacggtcgagcagcgcatttatgagctcgccggccaagaattcaacatcaattcaccgaaacagctcggcgtcattttatttgaaaaactgcagctgcccgtcttgaaaaaaacgaaaaccggctactccacttcggcggatgtgcttgaaaaacttgcgccttatcacgagatcgtggaaaacattttgcattaccgccagcttggcaagttgcagtcgacgtatattgaaggattgctgaaagtcgtgcgacccgatacaaagaaggtgcatacgattttcaatcaggcgttgacgcaaaccggacggctcagctcgacgttaccgaacttgcaaaacattccgattcggcttgaggaaggacggaaaatccgccaagcgttcgtgccgtcggagtctgattggctcattttcgctgccgactactcgcaaattgagttgcgcgtcctcgcccatattgcggaagatgacaatttaatggaagcgttccgccgcgatttggatatccatacgaaaacagcgatggacattttccaagtgagcgaggacgaagtgacgcccaacatgcgccgtcaggcgaaggcggtcaactttgggatcgtttacgggatcagtgattacggcttggcgcaaaacttaaatatttcacgcaaagaggccgctgaattcatcgagcgctacttcgaaagcttccctggcgtgaagcggtatatggaaaacattgtgcaagaagcaaaacagaaagggtatgtgacgacgctgctgcatcggcgccgctatttgccggatatcacgagccgcaacttcaacgtccgcagctttgctgaacggatggcgatgaacacgccgattcaagggagcgccgctgacattattaaaaaggcgatgatcgatctgaacgctagactgaaggaagagcggctgcaagcgcgccttttgctacaggtgcatgacgagctcattttggaggcgccgaaagaagagatggagcggctgtgccggctcgttccggaagtgatggagcaagcggtcacacttcgcgtgccgctcaaagtcgattaccattatggctcgacgtggtatgacgcgaaataaaaaggatcc

SEQ ID NO: 2697 - DNA, 2712 bp, Artificial Sequence
  Description of Artificial Sequence: Synthetic DNA sequence of Bacillus caldolyticus EA1 DNA polymerase E644K
atgaaatacctgctgccgaccgctgctgctggtctgctgctcctcgctgcccagccggcgatggccatgggattgaaaaaaaagcttgttttaatcgacggcagcagcgtggcgtaccgcgcctttttcgccttgccgcttttgcataacgacaaaggcatccatacgaacgccgtctacgggtttacgatgatgttgaataaaattttggcggaagaagagccaactcatatgcttgtcgcgtttgacgccgggaaaacgacgttccggcatgaagcgtttcaagagtataaaggtgggcgccagcagacgccaccggagctgtcggagcagtttccgctgttgcgcgagctgctgagggcgtatcgcatccccgcctatgaactcgagaactacgaagcggacgatattatcggaacgcttgccgcccgcgctgagcaggaagggtttgaggtgaaagtcatttccggcgaccgcgatctgacccagctcgcctccccccatgtgacggtggacattacgaaaaaagggattaccgatatcgaaccgtacacgccggaggcggtccgcgaaaaatacggcttaactccggaacaaatcgttgatttgaaaggattgatgggcgacaaatcggacaacattcccggagtgccgggcatcggggaaaagacggcggtcaagctgctcaagcaattcggcacggtcgaaaacgtgcttgcctccattgacgagatcaaaggcgaaaagttgaaagaaacgctgcgccaacaccgggagatggcgctgttaagcaaaaagctcgccgccattcgccgcgacgccccggtcgagctctcgcttgatgacatcgtctatcaaggggaagaccgggagaaagtggtcgctttatttaaagagcttgggtttcaatcgtttttagagaaaatggaatcgccgtcatcagaagaggaaaaaccgcttgccaagatggcatttacgcttgctgaccgcgtgacggaggagatgcttgccgacaaggcggcgcttgtcgttgaagtggtcgaggaaaattatcatgatgcgccgatcgtcggcatcgctgtggtcaacgaacatggacggtttttcctgcgcccggagacggcgcttgccgatccgcagtttgtcgcctggcttggtgatgaaacgaagaaaaaaagcatgtttgactcaaagcgcgcggcagtcgccttgaaatggaaaggaattgagctatgcggcgtttcctttgatttattgctggccgcctatttgcttgatccggcgcaaggtgttgatgatgtggctgccgcagcaaaaatgaagcaatacgaagcggtgcgctcggatgaagcggtgtatggcaaaggggcgaagcgggccgtgccggatgagccagtgctcgccgagcatctcgtccgcaaggcggcggcgatttgggcgctcgaacgtccgtttttggatgagctgcgccgcaacgaacaagatcggttgctcgtcgagctcgagcagccgttgtcttcgattttggcggaaatggaatttgccggagtgaaagtggatacgaagcggctcgaacagatgggcgaagagctcgccgagcagctgcgcacggtcgagcagcgcatttatgagctcgccggccaagaattcaacatcaattcaccgaaacagctcggcgtcattttatttgaaaaactgcagctgcccgtcttgaaaaaaacgaaaaccggctactccacttcggcggatgtgcttgaaaaacttgcgccttatcacgagatcgtggaaaacattttgcattaccgccagcttggcaagttgcagtcgacgtatattgaaggattgctgaaagtcgtgcgacccgatacaaagaaggtgcatacgattttcaatcaggcgttgacgcaaaccggacggctcagctcgacgaaaccgaacttgcaaaacattccgattcggcttgaggaaggacggaaaatccgccaagcgttcgtgccgtcggagtctgattggctcattttcgctgccgactactcgcaaattgagttgcgcgtcctcgcccatattgcggaagatgacaatttaatggaagcgttccgccgcgatttggatatccatacgaaaacagcgatggacattttccaagtgagcgaggacgaagtgacgcccaacatgcgccgtcaggcgaaggcggtcaactttgggatcgtttacgggatcagtgattacggcttggcgcaaaacttaaatatttcacgcaaagaggccgctgaattcatcgagcgctacttcgaaagcttccctggcgtgaagcggtatatggaaaacattgtgcaagaagcaaaacagaaagggtatgtgacgacgctgctgcatcggcgccgctatttgccggatatcacgagccgcaacttcaacgtccgcagctttgctgaacggatggcgatgaacacgccgattcaagggagcgccgctgacattattaaaaaggcgatgatcgatctgaacgctagactgaaggaagagcggctgcaagcgcgccttttgctacaggtgcatgacgagctcattttggaggcgccgaaagaagagatggagcggctgtgccggctcgttccggaagtgatggagcaagcggtcacacttcgcgtgccgctcaaagtcgattaccattatggctcgacgtggtatgacgcgaaataaaaaggatcc

SEQ ID NO: 2698 - DNA, 2712 bp, Artificial Sequence
  Description of Artificial Sequence: Synthetic DNA sequence of Bacillus caldolyticus EA1 DNA polymerase E644D
atgaaatacctgctgccgaccgctgctgctggtctgctgctcctcgctgcccagccggcgatggccatgggattgaaaaaaaagcttgttttaatcgacggcagcagcgtggcgtaccgcgcctttttcgccttgccgcttttgcataacgacaaaggcatccatacgaacgccgtctacgggtttacgatgatgttgaataaaattttggcggaagaagagccaactcatatgcttgtcgcgtttgacgccgggaaaacgacgttccggcatgaagcgtttcaagagtataaaggtgggcgccagcagacgccaccggagctgtcggagcagtttccgctgttgcgcgagctgctgagggcgtatcgcatccccgcctatgaactcgagaactacgaagcggacgatattatcggaacgcttgccgcccgcgctgagcaggaagggtttgaggtgaaagtcatttccggcgaccgcgatctgacccagctcgcctccccccatgtgacggtggacattacgaaaaaagggattaccgatatcgaaccgtacacgccggaggcggtccgcgaaaaatacggcttaactccggaacaaatcgttgatttgaaaggattgatgggcgacaaatcggacaacattcccggagtgccgggcatcggggaaaagacggcggtcaagctgctcaagcaattcggcacggtcgaaaacgtgcttgcctccattgacgagatcaaaggcgaaaagttgaaagaaacgctgcgccaacaccgggagatggcgctgttaagcaaaaagctcgccgccattcgccgcgacgccccggtcgagctctcgcttgatgacatcgtctatcaaggggaagaccgggagaaagtggtcgctttatttaaagagcttgggtttcaatcgtttttagagaaaatggaatcgccgtcatcagaagaggaaaaaccgcttgccaagatggcatttacgcttgctgaccgcgtgacggaggagatgcttgccgacaaggcggcgcttgtcgttgaagtggtcgaggaaaattatcatgatgcgccgatcgtcggcatcgctgtggtcaacgaacatggacggtttttcctgcgcccggagacggcgcttgccgatccgcagtttgtcgcctggcttggtgatgaaacgaagaaaaaaagcatgtttgactcaaagcgcgcggcagtcgccttgaaatggaaaggaattgagctatgcggcgtttcctttgatttattgctggccgcctatttgcttgatccggcgcaaggtgttgatgatgtggctgccgcagcaaaaatgaagcaatacgaagcggtgcgctcggatgaagcggtgtatggcaaaggggcgaagcgggccgtgccggatgagccagtgctcgccgagcatctcgtccgcaaggcggcggcgatttgggcgctcgaacgtccgtttttggatgagctgcgccgcaacgaacaagatcggttgctcgtcgagctcgagcagccgttgtcttcgattttggcggaaatggaatttgccggagtgaaagtggatacgaagcggctcgaacagatgggcgaagagctcgccgagcagctgcgcacggtcgagcagcgcatttatgagctcgccggccaagaattcaacatcaattcaccgaaacagctcggcgtcattttatttgaaaaactgcagctgcccgtcttgaaaaaaacgaaaaccggctactccacttcggcggatgtgcttgaaaaacttgcgccttatcacgagatcgtggaaaacattttgcattaccgccagcttggcaagttgcagtcgacgtatattgaaggattgctgaaagtcgtgcgacccgatacaaagaaggtgcatacgattttcaatcaggcgttgacgcaaaccggacggctcagctcgacggatccgaacttgcaaaacattccgattcggcttgaggaaggacggaaaatccgccaagcgttcgtgccgtcggagtctgattggctcattttcgctgccgactactcgcaaattgagttgcgcgtcctcgcccatattgcggaagatgacaatttaatggaagcgttccgccgcgatttggatatccatacgaaaacagcgatggacattttccaagtgagcgaggacgaagtgacgcccaacatgcgccgtcaggcgaaggcggtcaactttgggatcgtttacgggatcagtgattacggcttggcgcaaaacttaaatatttcacgcaaagaggccgctgaattcatcgagcgctacttcgaaagcttccctggcgtgaagcggtatatggaaaacattgtgcaagaagcaaaacagaaagggtatgtgacgacgctgctgcatcggcgccgctatttgccggatatcacgagccgcaacttcaacgtccgcagctttgctgaacggatggcgatgaacacgccgattcaagggagcgccgctgacattattaaaaaggcgatgatcgatctgaacgctagactgaaggaagagcggctgcaagcgcgccttttgctacaggtgcatgacgagctcattttggaggcgccgaaagaagagatggagcggctgtgccggctcgttccggaagtgatggagcaagcggtcacacttcgcgtgccgctcaaagtcgattaccattatggctcgacgtggtatgacgcgaaataaaaaggatcc

SEQ ID NO: 2699 - DNA, 2712 bp, Artificial Sequence
  Description of Artificial Sequence: Synthetic DNA sequence of Bacillus caldolyticus EA1 DNA polymerase E644F
atgaaatacctgctgccgaccgctgctgctggtctgctgctcctcgctgcccagccggcgatggccatgggattgaaaaaaaagcttgttttaatcgacggcagcagcgtggcgtaccgcgcctttttcgccttgccgcttttgcataacgacaaaggcatccatacgaacgccgtctacgggtttacgatgatgttgaataaaattttggcggaagaagagccaactcatatgcttgtcgcgtttgacgccgggaaaacgacgttccggcatgaagcgtttcaagagtataaaggtgggcgccagcagacgccaccggagctgtcggagcagtttccgctgttgcgcgagctgctgagggcgtatcgcatccccgcctatgaactcgagaactacgaagcggacgatattatcggaacgcttgccgcccgcgctgagcaggaagggtttgaggtgaaagtcatttccggcgaccgcgatctgacccagctcgcctccccccatgtgacggtggacattacgaaaaaagggattaccgatatcgaaccgtacacgccggaggcggtccgcgaaaaatacggcttaactccggaacaaatcgttgatttgaaaggattgatgggcgacaaatcggacaacattcccggagtgccgggcatcggggaaaagacggcggtcaagctgctcaagcaattcggcacggtcgaaaacgtgcttgcctccattgacgagatcaaaggcgaaaagttgaaagaaacgctgcgccaacaccgggagatggcgctgttaagcaaaaagctcgccgccattcgccgcgacgccccggtcgagctctcgcttgatgacatcgtctatcaaggggaagaccgggagaaagtggtcgctttatttaaagagcttgggtttcaatcgtttttagagaaaatggaatcgccgtcatcagaagaggaaaaaccgcttgccaagatggcatttacgcttgctgaccgcgtgacggaggagatgcttgccgacaaggcggcgcttgtcgttgaagtggtcgaggaaaattatcatgatgcgccgatcgtcggcatcgctgtggtcaacgaacatggacggtttttcctgcgcccggagacggcgcttgccgatccgcagtttgtcgcctggcttggtgatgaaacgaagaaaaaaagcatgtttgactcaaagcgcgcggcagtcgccttgaaatggaaaggaattgagctatgcggcgtttcctttgatttattgctggccgcctatttgcttgatccggcgcaaggtgttgatgatgtggctgccgcagcaaaaatgaagcaatacgaagcggtgcgctcggatgaagcggtgtatggcaaaggggcgaagcgggccgtgccggatgagccagtgctcgccgagcatctcgtccgcaaggcggcggcgatttgggcgctcgaacgtccgtttttggatgagctgcgccgcaacgaacaagatcggttgctcgtcgagctcgagcagccgttgtcttcgattttggcggaaatggaatttgccggagtgaaagtggatacgaagcggctcgaacagatgggcgaagagctcgccgagcagctgcgcacggtcgagcagcgcatttatgagctcgccggccaagaattcaacatcaattcaccgaaacagctcggcgtcattttatttgaaaaactgcagctgcccgtcttgaaaaaaacgaaaaccggctactccacttcggcggatgtgcttgaaaaacttgcgccttatcacgagatcgtggaaaacattttgcattaccgccagcttggcaagttgcagtcgacgtatattgaaggattgctgaaagtcgtgcgacccgatacaaagaaggtgcatacgattttcaatcaggcgttgacgcaaaccggacggctcagctcgacgtttccgaacttgcaaaacattccgattcggcttgaggaaggacggaaaatccgccaagcgttcgtgccgtcggagtctgattggctcattttcgctgccgactactcgcaaattgagttgcgcgtcctcgcccatattgcggaagatgacaatttaatggaagcgttccgccgcgatttggatatccatacgaaaacagcgatggacattttccaagtgagcgaggacgaagtgacgcccaacatgcgccgtcaggcgaaggcggtcaactttgggatcgtttacgggatcagtgattacggcttggcgcaaaacttaaatatttcacgcaaagaggccgctgaattcatcgagcgctacttcgaaagcttccctggcgtgaagcggtatatggaaaacattgtgcaagaagcaaaacagaaagggtatgtgacgacgctgctgcatcggcgccgctatttgccggatatcacgagccgcaacttcaacgtccgcagctttgctgaacggatggcgatgaacacgccgattcaagggagcgccgctgacattattaaaaaggcgatgatcgatctgaacgctagactgaaggaagagcggctgcaagcgcgccttttgctacaggtgcatgacgagctcattttggaggcgccgaaagaagagatggagcggctgtgccggctcgttccggaagtgatggagcaagcggtcacacttcgcgtgccgctcaaagtcgattaccattatggctcgacgtggtatgacgcgaaataaaaaggatcc

SEQ ID NO: 2700 - DNA, 2712 bp, Artificial Sequence
  Description of Artificial Sequence: Synthetic DNA sequence of Bacillus caldolyticus EA1 DNA polymerase E644S
atgaaatacctgctgccgaccgctgctgctggtctgctgctcctcgctgcccagccggcgatggccatgggattgaaaaaaaagcttgttttaatcgacggcagcagcgtggcgtaccgcgcctttttcgccttgccgcttttgcataacgacaaaggcatccatacgaacgccgtctacgggtttacgatgatgttgaataaaattttggcggaagaagagccaactcatatgcttgtcgcgtttgacgccgggaaaacgacgttccggcatgaagcgtttcaagagtataaaggtgggcgccagcagacgccaccggagctgtcggagcagtttccgctgttgcgcgagctgctgagggcgtatcgcatccccgcctatgaactcgagaactacgaagcggacgatattatcggaacgcttgccgcccgcgctgagcaggaagggtttgaggtgaaagtcatttccggcgaccgcgatctgacccagctcgcctccccccatgtgacggtggacattacgaaaaaagggattaccgatatcgaaccgtacacgccggaggcggtccgcgaaaaatacggcttaactccggaacaaatcgttgatttgaaaggattgatgggcgacaaatcggacaacattcccggagtgccgggcatcggggaaaagacggcggtcaagctgctcaagcaattcggcacggtcgaaaacgtgcttgcctccattgacgagatcaaaggcgaaaagttgaaagaaacgctgcgccaacaccgggagatggcgctgttaagcaaaaagctcgccgccattcgccgcgacgccccggtcgagctctcgcttgatgacatcgtctatcaaggggaagaccgggagaaagtggtcgctttatttaaagagcttgggtttcaatcgtttttagagaaaatggaatcgccgtcatcagaagaggaaaaaccgcttgccaagatggcatttacgcttgctgaccgcgtgacggaggagatgcttgccgacaaggcggcgcttgtcgttgaagtggtcgaggaaaattatcatgatgcgccgatcgtcggcatcgctgtggtcaacgaacatggacggtttttcctgcgcccggagacggcgcttgccgatccgcagtttgtcgcctggcttggtgatgaaacgaagaaaaaaagcatgtttgactcaaagcgcgcggcagtcgccttgaaatggaaaggaattgagctatgcggcgtttcctttgatttattgctggccgcctatttgcttgatccggcgcaaggtgttgatgatgtggctgccgcagcaaaaatgaagcaatacgaagcggtgcgctcggatgaagcggtgtatggcaaaggggcgaagcgggccgtgccggatgagccagtgctcgccgagcatctcgtccgcaaggcggcggcgatttgggcgctcgaacgtccgtttttggatgagctgcgccgcaacgaacaagatcggttgctcgtcgagctcgagcagccgttgtcttcgattttggcggaaatggaatttgccggagtgaaagtggatacgaagcggctcgaacagatgggcgaagagctcgccgagcagctgcgcacggtcgagcagcgcatttatgagctcgccggccaagaattcaacatcaattcaccgaaacagctcggcgtcattttatttgaaaaactgcagctgcccgtcttgaaaaaaacgaaaaccggctactccacttcggcggatgtgcttgaaaaacttgcgccttatcacgagatcgtggaaaacattttgcattaccgccagcttggcaagttgcagtcgacgtatattgaaggattgctgaaagtcgtgcgacccgatacaaagaaggtgcatacgattttcaatcaggcgttgacgcaaaccggacggctcagctcgacgtctccgaacttgcaaaacattccgattcggcttgaggaaggacggaaaatccgccaagcgttcgtgccgtcggagtctgattggctcattttcgctgccgactactcgcaaattgagttgcgcgtcctcgcccatattgcggaagatgacaatttaatggaagcgttccgccgcgatttggatatccatacgaaaacagcgatggacattttccaagtgagcgaggacgaagtgacgcccaacatgcgccgtcaggcgaaggcggtcaactttgggatcgtttacgggatcagtgattacggcttggcgcaaaacttaaatatttcacgcaaagaggccgctgaattcatcgagcgctacttcgaaagcttccctggcgtgaagcggtatatggaaaacattgtgcaagaagcaaaacagaaagggtatgtgacgacgctgctgcatcggcgccgctatttgccggatatcacgagccgcaacttcaacgtccgcagctttgctgaacggatggcgatgaacacgccgattcaagggagcgccgctgacattattaaaaaggcgatgatcgatctgaacgctagactgaaggaagagcggctgcaagcgcgccttttgctacaggtgcatgacgagctcattttggaggcgccgaaagaagagatggagcggctgtgccggctcgttccggaagtgatggagcaagcggtcacacttcgcgtgccgctcaaagtcgattaccattatggctcgacgtggtatgacgcgaaataaaaaggatcc

SEQ ID NO: 2701 - DNA, 2712 bp, Artificial Sequence
  Description of Artificial Sequence: Synthetic DNA sequence of Bacillus caldolyticus EA1 DNA polymerase E644Y
atgaaatacctgctgccgaccgctgctgctggtctgctgctcctcgctgcccagccggcgatggccatgggattgaaaaaaaagcttgttttaatcgacggcagcagcgtggcgtaccgcgcctttttcgccttgccgcttttgcataacgacaaaggcatccatacgaacgccgtctacgggtttacgatgatgttgaataaaattttggcggaagaagagccaactcatatgcttgtcgcgtttgacgccgggaaaacgacgttccggcatgaagcgtttcaagagtataaaggtgggcgccagcagacgccaccggagctgtcggagcagtttccgctgttgcgcgagctgctgagggcgtatcgcatccccgcctatgaactcgagaactacgaagcggacgatattatcggaacgcttgccgcccgcgctgagcaggaagggtttgaggtgaaagtcatttccggcgaccgcgatctgacccagctcgcctccccccatgtgacggtggacattacgaaaaaagggattaccgatatcgaaccgtacacgccggaggcggtccgcgaaaaatacggcttaactccggaacaaatcgttgatttgaaaggattgatgggcgacaaatcggacaacattcccggagtgccgggcatcggggaaaagacggcggtcaagctgctcaagcaattcggcacggtcgaaaacgtgcttgcctccattgacgagatcaaaggcgaaaagttgaaagaaacgctgcgccaacaccgggagatggcgctgttaagcaaaaagctcgccgccattcgccgcgacgccccggtcgagctctcgcttgatgacatcgtctatcaaggggaagaccgggagaaagtggtcgctttatttaaagagcttgggtttcaatcgtttttagagaaaatggaatcgccgtcatcagaagaggaaaaaccgcttgccaagatggcatttacgcttgctgaccgcgtgacggaggagatgcttgccgacaaggcggcgcttgtcgttgaagtggtcgaggaaaattatcatgatgcgccgatcgtcggcatcgctgtggtcaacgaacatggacggtttttcctgcgcccggagacggcgcttgccgatccgcagtttgtcgcctggcttggtgatgaaacgaagaaaaaaagcatgtttgactcaaagcgcgcggcagtcgccttgaaatggaaaggaattgagctatgcggcgtttcctttgatttattgctggccgcctatttgcttgatccggcgcaaggtgttgatgatgtggctgccgcagcaaaaatgaagcaatacgaagcggtgcgctcggatgaagcggtgtatggcaaaggggcgaagcgggccgtgccggatgagccagtgctcgccgagcatctcgtccgcaaggcggcggcgatttgggcgctcgaacgtccgtttttggatgagctgcgccgcaacgaacaagatcggttgctcgtcgagctcgagcagccgttgtcttcgattttggcggaaatggaatttgccggagtgaaagtggatacgaagcggctcgaacagatgggcgaagagctcgccgagcagctgcgcacggtcgagcagcgcatttatgagctcgccggccaagaattcaacatcaattcaccgaaacagctcggcgtcattttatttgaaaaactgcagctgcccgtcttgaaaaaaacgaaaaccggctactccacttcggcggatgtgcttgaaaaacttgcgccttatcacgagatcgtggaaaacattttgcattaccgccagcttggcaagttgcagtcgacgtatattgaaggattgctgaaagtcgtgcgacccgatacaaagaaggtgcatacgattttcaatcaggcgttgacgcaaaccggacggctcagctcgacgtatccgaacttgcaaaacattccgattcggcttgaggaaggacggaaaatccgccaagcgttcgtgccgtcggagtctgattggctcattttcgctgccgactactcgcaaattgagttgcgcgtcctcgcccatattgcggaagatgacaatttaatggaagcgttccgccgcgatttggatatccatacgaaaacagcgatggacattttccaagtgagcgaggacgaagtgacgcccaacatgcgccgtcaggcgaaggcggtcaactttgggatcgtttacgggatcagtgattacggcttggcgcaaaacttaaatatttcacgcaaagaggccgctgaattcatcgagcgctacttcgaaagcttccctggcgtgaagcggtatatggaaaacattgtgcaagaagcaaaacagaaagggtatgtgacgacgctgctgcatcggcgccgctatttgccggatatcacgagccgcaacttcaacgtccgcagctttgctgaacggatggcgatgaacacgccgattcaagggagcgccgctgacattattaaaaaggcgatgatcgatctgaacgctagactgaaggaagagcggctgcaagcgcgccttttgctacaggtgcatgacgagctcattttggaggcgccgaaagaagagatggagcggctgtgccggctcgttccggaagtgatggagcaagcggtcacacttcgcgtgccgctcaaagtcgattaccattatggctcgacgtggtatgacgcgaaataaaaaggatcc

SEQ ID NO: 2702 - DNA, 2712 bp, Artificial Sequence
  Description of Artificial Sequence: Synthetic DNA sequence of Bacillus caldolyticus EA1 DNA polymerase E644W
atgaaatacctgctgccgaccgctgctgctggtctgctgctcctcgctgcccagccggcgatggccatgggattgaaaaaaaagcttgttttaatcgacggcagcagcgtggcgtaccgcgcctttttcgccttgccgcttttgcataacgacaaaggcatccatacgaacgccgtctacgggtttacgatgatgttgaataaaattttggcggaagaagagccaactcatatgcttgtcgcgtttgacgccgggaaaacgacgttccggcatgaagcgtttcaagagtataaaggtgggcgccagcagacgccaccggagctgtcggagcagtttccgctgttgcgcgagctgctgagggcgtatcgcatccccgcctatgaactcgagaactacgaagcggacgatattatcggaacgcttgccgcccgcgctgagcaggaagggtttgaggtgaaagtcatttccggcgaccgcgatctgacccagctcgcctccccccatgtgacggtggacattacgaaaaaagggattaccgatatcgaaccgtacacgccggaggcggtccgcgaaaaatacggcttaactccggaacaaatcgttgatttgaaaggattgatgggcgacaaatcggacaacattcccggagtgccgggcatcggggaaaagacggcggtcaagctgctcaagcaattcggcacggtcgaaaacgtgcttgcctccattgacgagatcaaaggcgaaaagttgaaagaaacgctgcgccaacaccgggagatggcgctgttaagcaaaaagctcgccgccattcgccgcgacgccccggtcgagctctcgcttgatgacatcgtctatcaaggggaagaccgggagaaagtggtcgctttatttaaagagcttgggtttcaatcgtttttagagaaaatggaatcgccgtcatcagaagaggaaaaaccgcttgccaagatggcatttacgcttgctgaccgcgtgacggaggagatgcttgccgacaaggcggcgcttgtcgttgaagtggtcgaggaaaattatcatgatgcgccgatcgtcggcatcgctgtggtcaacgaacatggacggtttttcctgcgcccggagacggcgcttgccgatccgcagtttgtcgcctggcttggtgatgaaacgaagaaaaaaagcatgtttgactcaaagcgcgcggcagtcgccttgaaatggaaaggaattgagctatgcggcgtttcctttgatttattgctggccgcctatttgcttgatccggcgcaaggtgttgatgatgtggctgccgcagcaaaaatgaagcaatacgaagcggtgcgctcggatgaagcggtgtatggcaaaggggcgaagcgggccgtgccggatgagccagtgctcgccgagcatctcgtccgcaaggcggcggcgatttgggcgctcgaacgtccgtttttggatgagctgcgccgcaacgaacaagatcggttgctcgtcgagctcgagcagccgttgtcttcgattttggcggaaatggaatttgccggagtgaaagtggatacgaagcggctcgaacagatgggcgaagagctcgccgagcagctgcgcacggtcgagcagcgcatttatgagctcgccggccaagaattcaacatcaattcaccgaaacagctcggcgtcattttatttgaaaaactgcagctgcccgtcttgaaaaaaacgaaaaccggctactccacttcggcggatgtgcttgaaaaacttgcgccttatcacgagatcgtggaaaacattttgcattaccgccagcttggcaagttgcagtcgacgtatattgaaggattgctgaaagtcgtgcgacccgatacaaagaaggtgcatacgattttcaatcaggcgttgacgcaaaccggacggctcagctcgacgtggccgaacttgcaaaacattccgattcggcttgaggaaggacggaaaatccgccaagcgttcgtgccgtcggagtctgattggctcattttcgctgccgactactcgcaaattgagttgcgcgtcctcgcccatattgcggaagatgacaatttaatggaagcgttccgccgcgatttggatatccatacgaaaacagcgatggacattttccaagtgagcgaggacgaagtgacgcccaacatgcgccgtcaggcgaaggcggtcaactttgggatcgtttacgggatcagtgattacggcttggcgcaaaacttaaatatttcacgcaaagaggccgctgaattcatcgagcgctacttcgaaagcttccctggcgtgaagcggtatatggaaaacattgtgcaagaagcaaaacagaaagggtatgtgacgacgctgctgcatcggcgccgctatttgccggatatcacgagccgcaacttcaacgtccgcagctttgctgaacggatggcgatgaacacgccgattcaagggagcgccgctgacattattaaaaaggcgatgatcgatctgaacgctagactgaaggaagagcggctgcaagcgcgccttttgctacaggtgcatgacgagctcattttggaggcgccgaaagaagagatggagcggctgtgccggctcgttccggaagtgatggagcaagcggtcacacttcgcgtgccgctcaaagtcgattaccattatggctcgacgtggtatgacgcgaaataaaaaggatcc

SEQ ID NO: 2703 - DNA, 2712 bp, Artificial Sequence
  Description of Artificial Sequence: Synthetic DNA sequence of Bacillus caldolyticus EA1 DNA polymerase E644P
atgaaatacctgctgccgaccgctgctgctggtctgctgctcctcgctgcccagccggcgatggccatgggattgaaaaaaaagcttgttttaatcgacggcagcagcgtggcgtaccgcgcctttttcgccttgccgcttttgcataacgacaaaggcatccatacgaacgccgtctacgggtttacgatgatgttgaataaaattttggcggaagaagagccaactcatatgcttgtcgcgtttgacgccgggaaaacgacgttccggcatgaagcgtttcaagagtataaaggtgggcgccagcagacgccaccggagctgtcggagcagtttccgctgttgcgcgagctgctgagggcgtatcgcatccccgcctatgaactcgagaactacgaagcggacgatattatcggaacgcttgccgcccgcgctgagcaggaagggtttgaggtgaaagtcatttccggcgaccgcgatctgacccagctcgcctccccccatgtgacggtggacattacgaaaaaagggattaccgatatcgaaccgtacacgccggaggcggtccgcgaaaaatacggcttaactccggaacaaatcgttgatttgaaaggattgatgggcgacaaatcggacaacattcccggagtgccgggcatcggggaaaagacggcggtcaagctgctcaagcaattcggcacggtcgaaaacgtgcttgcctccattgacgagatcaaaggcgaaaagttgaaagaaacgctgcgccaacaccgggagatggcgctgttaagcaaaaagctcgccgccattcgccgcgacgccccggtcgagctctcgcttgatgacatcgtctatcaaggggaagaccgggagaaagtggtcgctttatttaaagagcttgggtttcaatcgtttttagagaaaatggaatcgccgtcatcagaagaggaaaaaccgcttgccaagatggcatttacgcttgctgaccgcgtgacggaggagatgcttgccgacaaggcggcgcttgtcgttgaagtggtcgaggaaaattatcatgatgcgccgatcgtcggcatcgctgtggtcaacgaacatggacggtttttcctgcgcccggagacggcgcttgccgatccgcagtttgtcgcctggcttggtgatgaaacgaagaaaaaaagcatgtttgactcaaagcgcgcggcagtcgccttgaaatggaaaggaattgagctatgcggcgtttcctttgatttattgctggccgcctatttgcttgatccggcgcaaggtgttgatgatgtggctgccgcagcaaaaatgaagcaatacgaagcggtgcgctcggatgaagcggtgtatggcaaaggggcgaagcgggccgtgccggatgagccagtgctcgccgagcatctcgtccgcaaggcggcggcgatttgggcgctcgaacgtccgtttttggatgagctgcgccgcaacgaacaagatcggttgctcgtcgagctcgagcagccgttgtcttcgattttggcggaaatggaatttgccggagtgaaagtggatacgaagcggctcgaacagatgggcgaagagctcgccgagcagctgcgcacggtcgagcagcgcatttatgagctcgccggccaagaattcaacatcaattcaccgaaacagctcggcgtcattttatttgaaaaactgcagctgcccgtcttgaaaaaaacgaaaaccggctactccacttcggcggatgtgcttgaaaaacttgcgccttatcacgagatcgtggaaaacattttgcattaccgccagcttggcaagttgcagtcgacgtatattgaaggattgctgaaagtcgtgcgacccgatacaaagaaggtgcatacgattttcaatcaggcgttgacgcaaaccggacggctcagctcgacgcctccgaacttgcaaaacattccgattcggcttgaggaaggacggaaaatccgccaagcgttcgtgccgtcggagtctgattggctcattttcgctgccgactactcgcaaattgagttgcgcgtcctcgcccatattgcggaagatgacaatttaatggaagcgttccgccgcgatttggatatccatacgaaaacagcgatggacattttccaagtgagcgaggacgaagtgacgcccaacatgcgccgtcaggcgaaggcggtcaactttgggatcgtttacgggatcagtgattacggcttggcgcaaaacttaaatatttcacgcaaagaggccgctgaattcatcgagcgctacttcgaaagcttccctggcgtgaagcggtatatggaaaacattgtgcaagaagcaaaacagaaagggtatgtgacgacgctgctgcatcggcgccgctatttgccggatatcacgagccgcaacttcaacgtccgcagctttgctgaacggatggcgatgaacacgccgattcaagggagcgccgctgacattattaaaaaggcgatgatcgatctgaacgctagactgaaggaagagcggctgcaagcgcgccttttgctacaggtgcatgacgagctcattttggaggcgccgaaagaagagatggagcggctgtgccggctcgttccggaagtgatggagcaagcggtcacacttcgcgtgccgctcaaagtcgattaccattatggctcgacgtggtatgacgcgaaataaaaaggatcc

SEQ ID NO: 2704 - DNA, 2712 bp, Artificial Sequence
  Description of Artificial Sequence: Synthetic DNA sequence of Bacillus caldolyticus EA1 DNA polymerase E644M
atgaaatacctgctgccgaccgctgctgctggtctgctgctcctcgctgcccagccggcgatggccatgggattgaaaaaaaagcttgttttaatcgacggcagcagcgtggcgtaccgcgcctttttcgccttgccgcttttgcataacgacaaaggcatccatacgaacgccgtctacgggtttacgatgatgttgaataaaattttggcggaagaagagccaactcatatgcttgtcgcgtttgacgccgggaaaacgacgttccggcatgaagcgtttcaagagtataaaggtgggcgccagcagacgccaccggagctgtcggagcagtttccgctgttgcgcgagctgctgagggcgtatcgcatccccgcctatgaactcgagaactacgaagcggacgatattatcggaacgcttgccgcccgcgctgagcaggaagggtttgaggtgaaagtcatttccggcgaccgcgatctgacccagctcgcctccccccatgtgacggtggacattacgaaaaaagggattaccgatatcgaaccgtacacgccggaggcggtccgcgaaaaatacggcttaactccggaacaaatcgttgatttgaaaggattgatgggcgacaaatcggacaacattcccggagtgccgggcatcggggaaaagacggcggtcaagctgctcaagcaattcggcacggtcgaaaacgtgcttgcctccattgacgagatcaaaggcgaaaagttgaaagaaacgctgcgccaacaccgggagatggcgctgttaagcaaaaagctcgccgccattcgccgcgacgccccggtcgagctctcgcttgatgacatcgtctatcaaggggaagaccgggagaaagtggtcgctttatttaaagagcttgggtttcaatcgtttttagagaaaatggaatcgccgtcatcagaagaggaaaaaccgcttgccaagatggcatttacgcttgctgaccgcgtgacggaggagatgcttgccgacaaggcggcgcttgtcgttgaagtggtcgaggaaaattatcatgatgcgccgatcgtcggcatcgctgtggtcaacgaacatggacggtttttcctgcgcccggagacggcgcttgccgatccgcagtttgtcgcctggcttggtgatgaaacgaagaaaaaaagcatgtttgactcaaagcgcgcggcagtcgccttgaaatggaaaggaattgagctatgcggcgtttcctttgatttattgctggccgcctatttgcttgatccggcgcaaggtgttgatgatgtggctgccgcagcaaaaatgaagcaatacgaagcggtgcgctcggatgaagcggtgtatggcaaaggggcgaagcgggccgtgccggatgagccagtgctcgccgagcatctcgtccgcaaggcggcggcgatttgggcgctcgaacgtccgtttttggatgagctgcgccgcaacgaacaagatcggttgctcgtcgagctcgagcagccgttgtcttcgattttggcggaaatggaatttgccggagtgaaagtggatacgaagcggctcgaacagatgggcgaagagctcgccgagcagctgcgcacggtcgagcagcgcatttatgagctcgccggccaagaattcaacatcaattcaccgaaacagctcggcgtcattttatttgaaaaactgcagctgcccgtcttgaaaaaaacgaaaaccggctactccacttcggcggatgtgcttgaaaaacttgcgccttatcacgagatcgtggaaaacattttgcattaccgccagcttggcaagttgcagtcgacgtatattgaaggattgctgaaagtcgtgcgacccgatacaaagaaggtgcatacgattttcaatcaggcgttgacgcaaaccggacggctcagctcgacgatgccgaacttgcaaaacattccgattcggcttgaggaaggacggaaaatccgccaagcgttcgtgccgtcggagtctgattggctcattttcgctgccgactactcgcaaattgagttgcgcgtcctcgcccatattgcggaagatgacaatttaatggaagcgttccgccgcgatttggatatccatacgaaaacagcgatggacattttccaagtgagcgaggacgaagtgacgcccaacatgcgccgtcaggcgaaggcggtcaactttgggatcgtttacgggatcagtgattacggcttggcgcaaaacttaaatatttcacgcaaagaggccgctgaattcatcgagcgctacttcgaaagcttccctggcgtgaagcggtatatggaaaacattgtgcaagaagcaaaacagaaagggtatgtgacgacgctgctgcatcggcgccgctatttgccggatatcacgagccgcaacttcaacgtccgcagctttgctgaacggatggcgatgaacacgccgattcaagggagcgccgctgacattattaaaaaggcgatgatcgatctgaacgctagactgaaggaagagcggctgcaagcgcgccttttgctacaggtgcatgacgagctcattttggaggcgccgaaagaagagatggagcggctgtgccggctcgttccggaagtgatggagcaagcggtcacacttcgcgtgccgctcaaagtcgattaccattatggctcgacgtggtatgacgcgaaataaaaaggatcc

SEQ ID NO: 2705 - DNA, 2712 bp, Artificial Sequence
  Description of Artificial Sequence: Synthetic DNA sequence of Bacillus caldolyticus EA1 DNA polymerase E644T
atgaaatacctgctgccgaccgctgctgctggtctgctgctcctcgctgcccagccggcgatggccatgggattgaaaaaaaagcttgttttaatcgacggcagcagcgtggcgtaccgcgcctttttcgccttgccgcttttgcataacgacaaaggcatccatacgaacgccgtctacgggtttacgatgatgttgaataaaattttggcggaagaagagccaactcatatgcttgtcgcgtttgacgccgggaaaacgacgttccggcatgaagcgtttcaagagtataaaggtgggcgccagcagacgccaccggagctgtcggagcagtttccgctgttgcgcgagctgctgagggcgtatcgcatccccgcctatgaactcgagaactacgaagcggacgatattatcggaacgcttgccgcccgcgctgagcaggaagggtttgaggtgaaagtcatttccggcgaccgcgatctgacccagctcgcctccccccatgtgacggtggacattacgaaaaaagggattaccgatatcgaaccgtacacgccggaggcggtccgcgaaaaatacggcttaactccggaacaaatcgttgatttgaaaggattgatgggcgacaaatcggacaacattcccggagtgccgggcatcggggaaaagacggcggtcaagctgctcaagcaattcggcacggtcgaaaacgtgcttgcctccattgacgagatcaaaggcgaaaagttgaaagaaacgctgcgccaacaccgggagatggcgctgttaagcaaaaagctcgccgccattcgccgcgacgccccggtcgagctctcgcttgatgacatcgtctatcaaggggaagaccgggagaaagtggtcgctttatttaaagagcttgggtttcaatcgtttttagagaaaatggaatcgccgtcatcagaagaggaaaaaccgcttgccaagatggcatttacgcttgctgaccgcgtgacggaggagatgcttgccgacaaggcggcgcttgtcgttgaagtggtcgaggaaaattatcatgatgcgccgatcgtcggcatcgctgtggtcaacgaacatggacggtttttcctgcgcccggagacggcgcttgccgatccgcagtttgtcgcctggcttggtgatgaaacgaagaaaaaaagcatgtttgactcaaagcgcgcggcagtcgccttgaaatggaaaggaattgagctatgcggcgtttcctttgatttattgctggccgcctatttgcttgatccggcgcaaggtgttgatgatgtggctgccgcagcaaaaatgaagcaatacgaagcggtgcgctcggatgaagcggtgtatggcaaaggggcgaagcgggccgtgccggatgagccagtgctcgccgagcatctcgtccgcaaggcggcggcgatttgggcgctcgaacgtccgtttttggatgagctgcgccgcaacgaacaagatcggttgctcgtcgagctcgagcagccgttgtcttcgattttggcggaaatggaatttgccggagtgaaagtggatacgaagcggctcgaacagatgggcgaagagctcgccgagcagctgcgcacggtcgagcagcgcatttatgagctcgccggccaagaattcaacatcaattcaccgaaacagctcggcgtcattttatttgaaaaactgcagctgcccgtcttgaaaaaaacgaaaaccggctactccacttcggcggatgtgcttgaaaaacttgcgccttatcacgagatcgtggaaaacattttgcattaccgccagcttggcaagttgcagtcgacgtatattgaaggattgctgaaagtcgtgcgacccgatacaaagaaggtgcatacgattttcaatcaggcgttgacgcaaaccggacggctcagctcgacgactccgaacttgcaaaacattccgattcggcttgaggaaggacggaaaatccgccaagcgttcgtgccgtcggagtctgattggctcattttcgctgccgactactcgcaaattgagttgcgcgtcctcgcccatattgcggaagatgacaatttaatggaagcgttccgccgcgatttggatatccatacgaaaacagcgatggacattttccaagtgagcgaggacgaagtgacgcccaacatgcgccgtcaggcgaaggcggtcaactttgggatcgtttacgggatcagtgattacggcttggcgcaaaacttaaatatttcacgcaaagaggccgctgaattcatcgagcgctacttcgaaagcttccctggcgtgaagcggtatatggaaaacattgtgcaagaagcaaaacagaaagggtatgtgacgacgctgctgcatcggcgccgctatttgccggatatcacgagccgcaacttcaacgtccgcagctttgctgaacggatggcgatgaacacgccgattcaagggagcgccgctgacattattaaaaaggcgatgatcgatctgaacgctagactgaaggaagagcggctgcaagcgcgccttttgctacaggtgcatgacgagctcattttggaggcgccgaaagaagagatggagcggctgtgccggctcgttccggaagtgatggagcaagcggtcacacttcgcgtgccgctcaaagtcgattaccattatggctcgacgtggtatgacgcgaaataaaaaggatcc

SEQ ID NO: 2706 - DNA, 2712 bp, Artificial Sequence
  Description of Artificial Sequence: Synthetic DNA sequence of Bacillus caldolyticus EA1 DNA polymerase E644N
atgaaatacctgctgccgaccgctgctgctggtctgctgctcctcgctgcccagccggcgatggccatgggattgaaaaaaaagcttgttttaatcgacggcagcagcgtggcgtaccgcgcctttttcgccttgccgcttttgcataacgacaaaggcatccatacgaacgccgtctacgggtttacgatgatgttgaataaaattttggcggaagaagagccaactcatatgcttgtcgcgtttgacgccgggaaaacgacgttccggcatgaagcgtttcaagagtataaaggtgggcgccagcagacgccaccggagctgtcggagcagtttccgctgttgcgcgagctgctgagggcgtatcgcatccccgcctatgaactcgagaactacgaagcggacgatattatcggaacgcttgccgcccgcgctgagcaggaagggtttgaggtgaaagtcatttccggcgaccgcgatctgacccagctcgcctccccccatgtgacggtggacattacgaaaaaagggattaccgatatcgaaccgtacacgccggaggcggtccgcgaaaaatacggcttaactccggaacaaatcgttgatttgaaaggattgatgggcgacaaatcggacaacattcccggagtgccgggcatcggggaaaagacggcggtcaagctgctcaagcaattcggcacggtcgaaaacgtgcttgcctccattgacgagatcaaaggcgaaaagttgaaagaaacgctgcgccaacaccgggagatggcgctgttaagcaaaaagctcgccgccattcgccgcgacgccccggtcgagctctcgcttgatgacatcgtctatcaaggggaagaccgggagaaagtggtcgctttatttaaagagcttgggtttcaatcgtttttagagaaaatggaatcgccgtcatcagaagaggaaaaaccgcttgccaagatggcatttacgcttgctgaccgcgtgacggaggagatgcttgccgacaaggcggcgcttgtcgttgaagtggtcgaggaaaattatcatgatgcgccgatcgtcggcatcgctgtggtcaacgaacatggacggtttttcctgcgcccggagacggcgcttgccgatccgcagtttgtcgcctggcttggtgatgaaacgaagaaaaaaagcatgtttgactcaaagcgcgcggcagtcgccttgaaatggaaaggaattgagctatgcggcgtttcctttgatttattgctggccgcctatttgcttgatccggcgcaaggtgttgatgatgtggctgccgcagcaaaaatgaagcaatacgaagcggtgcgctcggatgaagcggtgtatggcaaaggggcgaagcgggccgtgccggatgagccagtgctcgccgagcatctcgtccgcaaggcggcggcgatttgggcgctcgaacgtccgtttttggatgagctgcgccgcaacgaacaagatcggttgctcgtcgagctcgagcagccgttgtcttcgattttggcggaaatggaatttgccggagtgaaagtggatacgaagcggctcgaacagatgggcgaagagctcgccgagcagctgcgcacggtcgagcagcgcatttatgagctcgccggccaagaattcaacatcaattcaccgaaacagctcggcgtcattttatttgaaaaactgcagctgcccgtcttgaaaaaaacgaaaaccggctactccacttcggcggatgtgcttgaaaaacttgcgccttatcacgagatcgtggaaaacattttgcattaccgccagcttggcaagttgcagtcgacgtatattgaaggattgctgaaagtcgtgcgacccgatacaaagaaggtgcatacgattttcaatcaggcgttgacgcaaaccggacggctcagctcgacgaatccgaacttgcaaaacattccgattcggcttgaggaaggacggaaaatccgccaagcgttcgtgccgtcggagtctgattggctcattttcgctgccgactactcgcaaattgagttgcgcgtcctcgcccatattgcggaagatgacaatttaatggaagcgttccgccgcgatttggatatccatacgaaaacagcgatggacattttccaagtgagcgaggacgaagtgacgcccaacatgcgccgtcaggcgaaggcggtcaactttgggatcgtttacgggatcagtgattacggcttggcgcaaaacttaaatatttcacgcaaagaggccgctgaattcatcgagcgctacttcgaaagcttccctggcgtgaagcggtatatggaaaacattgtgcaagaagcaaaacagaaagggtatgtgacgacgctgctgcatcggcgccgctatttgccggatatcacgagccgcaacttcaacgtccgcagctttgctgaacggatggcgatgaacacgccgattcaagggagcgccgctgacattattaaaaaggcgatgatcgatctgaacgctagactgaaggaagagcggctgcaagcgcgccttttgctacaggtgcatgacgagctcattttggaggcgccgaaagaagagatggagcggctgtgccggctcgttccggaagtgatggagcaagcggtcacacttcgcgtgccgctcaaagtcgattaccattatggctcgacgtggtatgacgcgaaataaaaaggatcc

SEQ ID NO: 2707 - DNA, 2712 bp, Artificial Sequence
  Description of Artificial Sequence: Synthetic DNA sequence of Bacillus caldolyticus EA1 DNA polymerase E644V
atgaaatacctgctgccgaccgctgctgctggtctgctgctcctcgctgcccagccggcgatggccatgggattgaaaaaaaagcttgttttaatcgacggcagcagcgtggcgtaccgcgcctttttcgccttgccgcttttgcataacgacaaaggcatccatacgaacgccgtctacgggtttacgatgatgttgaataaaattttggcggaagaagagccaactcatatgcttgtcgcgtttgacgccgggaaaacgacgttccggcatgaagcgtttcaagagtataaaggtgggcgccagcagacgccaccggagctgtcggagcagtttccgctgttgcgcgagctgctgagggcgtatcgcatccccgcctatgaactcgagaactacgaagcggacgatattatcggaacgcttgccgcccgcgctgagcaggaagggtttgaggtgaaagtcatttccggcgaccgcgatctgacccagctcgcctccccccatgtgacggtggacattacgaaaaaagggattaccgatatcgaaccgtacacgccggaggcggtccgcgaaaaatacggcttaactccggaacaaatcgttgatttgaaaggattgatgggcgacaaatcggacaacattcccggagtgccgggcatcggggaaaagacggcggtcaagctgctcaagcaattcggcacggtcgaaaacgtgcttgcctccattgacgagatcaaaggcgaaaagttgaaagaaacgctgcgccaacaccgggagatggcgctgttaagcaaaaagctcgccgccattcgccgcgacgccccggtcgagctctcgcttgatgacatcgtctatcaaggggaagaccgggagaaagtggtcgctttatttaaagagcttgggtttcaatcgtttttagagaaaatggaatcgccgtcatcagaagaggaaaaaccgcttgccaagatggcatttacgcttgctgaccgcgtgacggaggagatgcttgccgacaaggcggcgcttgtcgttgaagtggtcgaggaaaattatcatgatgcgccgatcgtcggcatcgctgtggtcaacgaacatggacggtttttcctgcgcccggagacggcgcttgccgatccgcagtttgtcgcctggcttggtgatgaaacgaagaaaaaaagcatgtttgactcaaagcgcgcggcagtcgccttgaaatggaaaggaattgagctatgcggcgtttcctttgatttattgctggccgcctatttgcttgatccggcgcaaggtgttgatgatgtggctgccgcagcaaaaatgaagcaatacgaagcggtgcgctcggatgaagcggtgtatggcaaaggggcgaagcgggccgtgccggatgagccagtgctcgccgagcatctcgtccgcaaggcggcggcgatttgggcgctcgaacgtccgtttttggatgagctgcgccgcaacgaacaagatcggttgctcgtcgagctcgagcagccgttgtcttcgattttggcggaaatggaatttgccggagtgaaagtggatacgaagcggctcgaacagatgggcgaagagctcgccgagcagctgcgcacggtcgagcagcgcatttatgagctcgccggccaagaattcaacatcaattcaccgaaacagctcggcgtcattttatttgaaaaactgcagctgcccgtcttgaaaaaaacgaaaaccggctactccacttcggcggatgtgcttgaaaaacttgcgccttatcacgagatcgtggaaaacattttgcattaccgccagcttggcaagttgcagtcgacgtatattgaaggattgctgaaagtcgtgcgacccgatacaaagaaggtgcatacgattttcaatcaggcgttgacgcaaaccggacggctcagctcgacggtcccgaacttgcaaaacattccgattcggcttgaggaaggacggaaaatccgccaagcgttcgtgccgtcggagtctgattggctcattttcgctgccgactactcgcaaattgagttgcgcgtcctcgcccatattgcggaagatgacaatttaatggaagcgttccgccgcgatttggatatccatacgaaaacagcgatggacattttccaagtgagcgaggacgaagtgacgcccaacatgcgccgtcaggcgaaggcggtcaactttgggatcgtttacgggatcagtgattacggcttggcgcaaaacttaaatatttcacgcaaagaggccgctgaattcatcgagcgctacttcgaaagcttccctggcgtgaagcggtatatggaaaacattgtgcaagaagcaaaacagaaagggtatgtgacgacgctgctgcatcggcgccgctatttgccggatatcacgagccgcaacttcaacgtccgcagctttgctgaacggatggcgatgaacacgccgattcaagggagcgccgctgacattattaaaaaggcgatgatcgatctgaacgctagactgaaggaagagcggctgcaagcgcgccttttgctacaggtgcatgacgagctcattttggaggcgccgaaagaagagatggagcggctgtgccggctcgttccggaagtgatggagcaagcggtcacacttcgcgtgccgctcaaagtcgattaccattatggctcgacgtggtatgacgcgaaataaaaaggatcc

SEQ ID NO: 2708 - DNA, 2712 bp, Artificial Sequence
  Description of Artificial Sequence: Synthetic DNA sequence of Bacillus caldolyticus EA1 DNA polymerase Q728A
atgaaatacctgctgccgaccgctgctgctggtctgctgctcctcgctgcccagccggcgatggccatgggattgaaaaaaaagcttgttttaatcgacggcagcagcgtggcgtaccgcgcctttttcgccttgccgcttttgcataacgacaaaggcatccatacgaacgccgtctacgggtttacgatgatgttgaataaaattttggcggaagaagagccaactcatatgcttgtcgcgtttgacgccgggaaaacgacgttccggcatgaagcgtttcaagagtataaaggtgggcgccagcagacgccaccggagctgtcggagcagtttccgctgttgcgcgagctgctgagggcgtatcgcatccccgcctatgaactcgagaactacgaagcggacgatattatcggaacgcttgccgcccgcgctgagcaggaagggtttgaggtgaaagtcatttccggcgaccgcgatctgacccagctcgcctccccccatgtgacggtggacattacgaaaaaagggattaccgatatcgaaccgtacacgccggaggcggtccgcgaaaaatacggcttaactccggaacaaatcgttgatttgaaaggattgatgggcgacaaatcggacaacattcccggagtgccgggcatcggggaaaagacggcggtcaagctgctcaagcaattcggcacggtcgaaaacgtgcttgcctccattgacgagatcaaaggcgaaaagttgaaagaaacgctgcgccaacaccgggagatggcgctgttaagcaaaaagctcgccgccattcgccgcgacgccccggtcgagctctcgcttgatgacatcgtctatcaaggggaagaccgggagaaagtggtcgctttatttaaagagcttgggtttcaatcgtttttagagaaaatggaatcgccgtcatcagaagaggaaaaaccgcttgccaagatggcatttacgcttgctgaccgcgtgacggaggagatgcttgccgacaaggcggcgcttgtcgttgaagtggtcgaggaaaattatcatgatgcgccgatcgtcggcatcgctgtggtcaacgaacatggacggtttttcctgcgcccggagacggcgcttgccgatccgcagtttgtcgcctggcttggtgatgaaacgaagaaaaaaagcatgtttgactcaaagcgcgcggcagtcgccttgaaatggaaaggaattgagctatgcggcgtttcctttgatttattgctggccgcctatttgcttgatccggcgcaaggtgttgatgatgtggctgccgcagcaaaaatgaagcaatacgaagcggtgcgctcggatgaagcggtgtatggcaaaggggcgaagcgggccgtgccggatgagccagtgctcgccgagcatctcgtccgcaaggcggcggcgatttgggcgctcgaacgtccgtttttggatgagctgcgccgcaacgaacaagatcggttgctcgtcgagctcgagcagccgttgtcttcgattttggcggaaatggaatttgccggagtgaaagtggatacgaagcggctcgaacagatgggcgaagagctcgccgagcagctgcgcacggtcgagcagcgcatttatgagctcgccggccaagaattcaacatcaattcaccgaaacagctcggcgtcattttatttgaaaaactgcagctgcccgtcttgaaaaaaacgaaaaccggctactccacttcggcggatgtgcttgaaaaacttgcgccttatcacgagatcgtggaaaacattttgcattaccgccagcttggcaagttgcagtcgacgtatattgaaggattgctgaaagtcgtgcgacccgatacaaagaaggtgcatacgattttcaatcaggcgttgacgcaaaccggacggctcagctcgacggagccgaacttgcaaaacattccgattcggcttgaggaaggacggaaaatccgccaagcgttcgtgccgtcggagtctgattggctcattttcgctgccgactactcgcaaattgagttgcgcgtcctcgcccatattgcggaagatgacaatttaatggaagcgttccgccgcgatttggatatccatacgaaaacagcgatggacattttccaagtgagcgaggacgaagtgacgcccaacatgcgccgtgctgcgaaggcggtcaactttgggatcgtttacgggatcagtgattacggcttggcgcaaaacttaaatatttcacgcaaagaggccgctgaattcatcgagcgctacttcgaaagcttccctggcgtgaagcggtatatggaaaacattgtgcaagaagcaaaacagaaagggtatgtgacgacgctgctgcatcggcgccgctatttgccggatatcacgagccgcaacttcaacgtccgcagctttgctgaacggatggcgatgaacacgccgattcaagggagcgccgctgacattattaaaaaggcgatgatcgatctgaacgctagactgaaggaagagcggctgcaagcgcgccttttgctacaggtgcatgacgagctcattttggaggcgccgaaagaagagatggagcggctgtgccggctcgttccggaagtgatggagcaagcggtcacacttcgcgtgccgctcaaagtcgattaccattatggctcgacgtggtatgacgcgaaataaaaaggatcc

SEQ ID NO: 2709 - DNA, 2712 bp, Artificial Sequence
  Description of Artificial Sequence: Synthetic DNA sequence of Bacillus caldolyticus EA1 DNA polymerase Q728R
atgaaatacctgctgccgaccgctgctgctggtctgctgctcctcgctgcccagccggcgatggccatgggattgaaaaaaaagcttgttttaatcgacggcagcagcgtggcgtaccgcgcctttttcgccttgccgcttttgcataacgacaaaggcatccatacgaacgccgtctacgggtttacgatgatgttgaataaaattttggcggaagaagagccaactcatatgcttgtcgcgtttgacgccgggaaaacgacgttccggcatgaagcgtttcaagagtataaaggtgggcgccagcagacgccaccggagctgtcggagcagtttccgctgttgcgcgagctgctgagggcgtatcgcatccccgcctatgaactcgagaactacgaagcggacgatattatcggaacgcttgccgcccgcgctgagcaggaagggtttgaggtgaaagtcatttccggcgaccgcgatctgacccagctcgcctccccccatgtgacggtggacattacgaaaaaagggattaccgatatcgaaccgtacacgccggaggcggtccgcgaaaaatacggcttaactccggaacaaatcgttgatttgaaaggattgatgggcgacaaatcggacaacattcccggagtgccgggcatcggggaaaagacggcggtcaagctgctcaagcaattcggcacggtcgaaaacgtgcttgcctccattgacgagatcaaaggcgaaaagttgaaagaaacgctgcgccaacaccgggagatggcgctgttaagcaaaaagctcgccgccattcgccgcgacgccccggtcgagctctcgcttgatgacatcgtctatcaaggggaagaccgggagaaagtggtcgctttatttaaagagcttgggtttcaatcgtttttagagaaaatggaatcgccgtcatcagaagaggaaaaaccgcttgccaagatggcatttacgcttgctgaccgcgtgacggaggagatgcttgccgacaaggcggcgcttgtcgttgaagtggtcgaggaaaattatcatgatgcgccgatcgtcggcatcgctgtggtcaacgaacatggacggtttttcctgcgcccggagacggcgcttgccgatccgcagtttgtcgcctggcttggtgatgaaacgaagaaaaaaagcatgtttgactcaaagcgcgcggcagtcgccttgaaatggaaaggaattgagctatgcggcgtttcctttgatttattgctggccgcctatttgcttgatccggcgcaaggtgttgatgatgtggctgccgcagcaaaaatgaagcaatacgaagcggtgcgctcggatgaagcggtgtatggcaaaggggcgaagcgggccgtgccggatgagccagtgctcgccgagcatctcgtccgcaaggcggcggcgatttgggcgctcgaacgtccgtttttggatgagctgcgccgcaacgaacaagatcggttgctcgtcgagctcgagcagccgttgtcttcgattttggcggaaatggaatttgccggagtgaaagtggatacgaagcggctcgaacagatgggcgaagagctcgccgagcagctgcgcacggtcgagcagcgcatttatgagctcgccggccaagaattcaacatcaattcaccgaaacagctcggcgtcattttatttgaaaaactgcagctgcccgtcttgaaaaaaacgaaaaccggctactccacttcggcggatgtgcttgaaaaacttgcgccttatcacgagatcgtggaaaacattttgcattaccgccagcttggcaagttgcagtcgacgtatattgaaggattgctgaaagtcgtgcgacccgatacaaagaaggtgcatacgattttcaatcaggcgttgacgcaaaccggacggctcagctcgacggagccgaacttgcaaaacattccgattcggcttgaggaaggacggaaaatccgccaagcgttcgtgccgtcggagtctgattggctcattttcgctgccgactactcgcaaattgagttgcgcgtcctcgcccatattgcggaagatgacaatttaatggaagcgttccgccgcgatttggatatccatacgaaaacagcgatggacattttccaagtgagcgaggacgaagtgacgcccaacatgcgccgtcgagcgaaggcggtcaactttgggatcgtttacgggatcagtgattacggcttggcgcaaaacttaaatatttcacgcaaagaggccgctgaattcatcgagcgctacttcgaaagcttccctggcgtgaagcggtatatggaaaacattgtgcaagaagcaaaacagaaagggtatgtgacgacgctgctgcatcggcgccgctatttgccggatatcacgagccgcaacttcaacgtccgcagctttgctgaacggatggcgatgaacacgccgattcaagggagcgccgctgacattattaaaaaggcgatgatcgatctgaacgctagactgaaggaagagcggctgcaagcgcgccttttgctacaggtgcatgacgagctcattttggaggcgccgaaagaagagatggagcggctgtgccggctcgttccggaagtgatggagcaagcggtcacacttcgcgtgccgctcaaagtcgattaccattatggctcgacgtggtatgacgcgaaataaaaaggatcc

SEQ ID NO: 2710 - DNA, 2712 bp, Artificial Sequence
  Description of Artificial Sequence: Synthetic DNA sequence of Bacillus caldolyticus EA1 DNA polymerase Q728C
atgaaatacctgctgccgaccgctgctgctggtctgctgctcctcgctgcccagccggcgatggccatgggattgaaaaaaaagcttgttttaatcgacggcagcagcgtggcgtaccgcgcctttttcgccttgccgcttttgcataacgacaaaggcatccatacgaacgccgtctacgggtttacgatgatgttgaataaaattttggcggaagaagagccaactcatatgcttgtcgcgtttgacgccgggaaaacgacgttccggcatgaagcgtttcaagagtataaaggtgggcgccagcagacgccaccggagctgtcggagcagtttccgctgttgcgcgagctgctgagggcgtatcgcatccccgcctatgaactcgagaactacgaagcggacgatattatcggaacgcttgccgcccgcgctgagcaggaagggtttgaggtgaaagtcatttccggcgaccgcgatctgacccagctcgcctccccccatgtgacggtggacattacgaaaaaagggattaccgatatcgaaccgtacacgccggaggcggtccgcgaaaaatacggcttaactccggaacaaatcgttgatttgaaaggattgatgggcgacaaatcggacaacattcccggagtgccgggcatcggggaaaagacggcggtcaagctgctcaagcaattcggcacggtcgaaaacgtgcttgcctccattgacgagatcaaaggcgaaaagttgaaagaaacgctgcgccaacaccgggagatggcgctgttaagcaaaaagctcgccgccattcgccgcgacgccccggtcgagctctcgcttgatgacatcgtctatcaaggggaagaccgggagaaagtggtcgctttatttaaagagcttgggtttcaatcgtttttagagaaaatggaatcgccgtcatcagaagaggaaaaaccgcttgccaagatggcatttacgcttgctgaccgcgtgacggaggagatgcttgccgacaaggcggcgcttgtcgttgaagtggtcgaggaaaattatcatgatgcgccgatcgtcggcatcgctgtggtcaacgaacatggacggtttttcctgcgcccggagacggcgcttgccgatccgcagtttgtcgcctggcttggtgatgaaacgaagaaaaaaagcatgtttgactcaaagcgcgcggcagtcgccttgaaatggaaaggaattgagctatgcggcgtttcctttgatttattgctggccgcctatttgcttgatccggcgcaaggtgttgatgatgtggctgccgcagcaaaaatgaagcaatacgaagcggtgcgctcggatgaagcggtgtatggcaaaggggcgaagcgggccgtgccggatgagccagtgctcgccgagcatctcgtccgcaaggcggcggcgatttgggcgctcgaacgtccgtttttggatgagctgcgccgcaacgaacaagatcggttgctcgtcgagctcgagcagccgttgtcttcgattttggcggaaatggaatttgccggagtgaaagtggatacgaagcggctcgaacagatgggcgaagagctcgccgagcagctgcgcacggtcgagcagcgcatttatgagctcgccggccaagaattcaacatcaattcaccgaaacagctcggcgtcattttatttgaaaaactgcagctgcccgtcttgaaaaaaacgaaaaccggctactccacttcggcggatgtgcttgaaaaacttgcgccttatcacgagatcgtggaaaacattttgcattaccgccagcttggcaagttgcagtcgacgtatattgaaggattgctgaaagtcgtgcgacccgatacaaagaaggtgcatacgattttcaatcaggcgttgacgcaaaccggacggctcagctcgacggagccgaacttgcaaaacattccgattcggcttgaggaaggacggaaaatccgccaagcgttcgtgccgtcggagtctgattggctcattttcgctgccgactactcgcaaattgagttgcgcgtcctcgcccatattgcggaagatgacaatttaatggaagcgttccgccgcgatttggatatccatacgaaaacagcgatggacattttccaagtgagcgaggacgaagtgacgcccaacatgcgccgttgtgcgaaggcggtcaactttgggatcgtttacgggatcagtgattacggcttggcgcaaaacttaaatatttcacgcaaagaggccgctgaattcatcgagcgctacttcgaaagcttccctggcgtgaagcggtatatggaaaacattgtgcaagaagcaaaacagaaagggtatgtgacgacgctgctgcatcggcgccgctatttgccggatatcacgagccgcaacttcaacgtccgcagctttgctgaacggatggcgatgaacacgccgattcaagggagcgccgctgacattattaaaaaggcgatgatcgatctgaacgctagactgaaggaagagcggctgcaagcgcgccttttgctacaggtgcatgacgagctcattttggaggcgccgaaagaagagatggagcggctgtgccggctcgttccggaagtgatggagcaagcggtcacacttcgcgtgccgctcaaagtcgattaccattatggctcgacgtggtatgacgcgaaataaaaaggatcc

SEQ ID NO: 2711 - DNA, 2712 bp, Artificial Sequence
  Description of Artificial Sequence: Synthetic DNA sequence of Bacillus caldolyticus EA1 DNA polymerase Q728G
atgaaatacctgctgccgaccgctgctgctggtctgctgctcctcgctgcccagccggcgatggccatgggattgaaaaaaaagcttgttttaatcgacggcagcagcgtggcgtaccgcgcctttttcgccttgccgcttttgcataacgacaaaggcatccatacgaacgccgtctacgggtttacgatgatgttgaataaaattttggcggaagaagagccaactcatatgcttgtcgcgtttgacgccgggaaaacgacgttccggcatgaagcgtttcaagagtataaaggtgggcgccagcagacgccaccggagctgtcggagcagtttccgctgttgcgcgagctgctgagggcgtatcgcatccccgcctatgaactcgagaactacgaagcggacgatattatcggaacgcttgccgcccgcgctgagcaggaagggtttgaggtgaaagtcatttccggcgaccgcgatctgacccagctcgcctccccccatgtgacggtggacattacgaaaaaagggattaccgatatcgaaccgtacacgccggaggcggtccgcgaaaaatacggcttaactccggaacaaatcgttgatttgaaaggattgatgggcgacaaatcggacaacattcccggagtgccgggcatcggggaaaagacggcggtcaagctgctcaagcaattcggcacggtcgaaaacgtgcttgcctccattgacgagatcaaaggcgaaaagttgaaagaaacgctgcgccaacaccgggagatggcgctgttaagcaaaaagctcgccgccattcgccgcgacgccccggtcgagctctcgcttgatgacatcgtctatcaaggggaagaccgggagaaagtggtcgctttatttaaagagcttgggtttcaatcgtttttagagaaaatggaatcgccgtcatcagaagaggaaaaaccgcttgccaagatggcatttacgcttgctgaccgcgtgacggaggagatgcttgccgacaaggcggcgcttgtcgttgaagtggtcgaggaaaattatcatgatgcgccgatcgtcggcatcgctgtggtcaacgaacatggacggtttttcctgcgcccggagacggcgcttgccgatccgcagtttgtcgcctggcttggtgatgaaacgaagaaaaaaagcatgtttgactcaaagcgcgcggcagtcgccttgaaatggaaaggaattgagctatgcggcgtttcctttgatttattgctggccgcctatttgcttgatccggcgcaaggtgttgatgatgtggctgccgcagcaaaaatgaagcaatacgaagcggtgcgctcggatgaagcggtgtatggcaaaggggcgaagcgggccgtgccggatgagccagtgctcgccgagcatctcgtccgcaaggcggcggcgatttgggcgctcgaacgtccgtttttggatgagctgcgccgcaacgaacaagatcggttgctcgtcgagctcgagcagccgttgtcttcgattttggcggaaatggaatttgccggagtgaaagtggatacgaagcggctcgaacagatgggcgaagagctcgccgagcagctgcgcacggtcgagcagcgcatttatgagctcgccggccaagaattcaacatcaattcaccgaaacagctcggcgtcattttatttgaaaaactgcagctgcccgtcttgaaaaaaacgaaaaccggctactccacttcggcggatgtgcttgaaaaacttgcgccttatcacgagatcgtggaaaacattttgcattaccgccagcttggcaagttgcagtcgacgtatattgaaggattgctgaaagtcgtgcgacccgatacaaagaaggtgcatacgattttcaatcaggcgttgacgcaaaccggacggctcagctcgacggagccgaacttgcaaaacattccgattcggcttgaggaaggacggaaaatccgccaagcgttcgtgccgtcggagtctgattggctcattttcgctgccgactactcgcaaattgagttgcgcgtcctcgcccatattgcggaagatgacaatttaatggaagcgttccgccgcgatttggatatccatacgaaaacagcgatggacattttccaagtgagcgaggacgaagtgacgcccaacatgcgccgtggtgcgaaggcggtcaactttgggatcgtttacgggatcagtgattacggcttggcgcaaaacttaaatatttcacgcaaagaggccgctgaattcatcgagcgctacttcgaaagcttccctggcgtgaagcggtatatggaaaacattgtgcaagaagcaaaacagaaagggtatgtgacgacgctgctgcatcggcgccgctatttgccggatatcacgagccgcaacttcaacgtccgcagctttgctgaacggatggcgatgaacacgccgattcaagggagcgccgctgacattattaaaaaggcgatgatcgatctgaacgctagactgaaggaagagcggctgcaagcgcgccttttgctacaggtgcatgacgagctcattttggaggcgccgaaagaagagatggagcggctgtgccggctcgttccggaagtgatggagcaagcggtcacacttcgcgtgccgctcaaagtcgattaccattatggctcgacgtggtatgacgcgaaataaaaaggatcc

SEQ ID NO: 2712 - DNA, 2712 bp, Artificial Sequence
  Description of Artificial Sequence: Synthetic DNA sequence of Bacillus caldolyticus EA1 DNA polymerase Q728V
atgaaatacctgctgccgaccgctgctgctggtctgctgctcctcgctgcccagccggcgatggccatgggattgaaaaaaaagcttgttttaatcgacggcagcagcgtggcgtaccgcgcctttttcgccttgccgcttttgcataacgacaaaggcatccatacgaacgccgtctacgggtttacgatgatgttgaataaaattttggcggaagaagagccaactcatatgcttgtcgcgtttgacgccgggaaaacgacgttccggcatgaagcgtttcaagagtataaaggtgggcgccagcagacgccaccggagctgtcggagcagtttccgctgttgcgcgagctgctgagggcgtatcgcatccccgcctatgaactcgagaactacgaagcggacgatattatcggaacgcttgccgcccgcgctgagcaggaagggtttgaggtgaaagtcatttccggcgaccgcgatctgacccagctcgcctccccccatgtgacggtggacattacgaaaaaagggattaccgatatcgaaccgtacacgccggaggcggtccgcgaaaaatacggcttaactccggaacaaatcgttgatttgaaaggattgatgggcgacaaatcggacaacattcccggagtgccgggcatcggggaaaagacggcggtcaagctgctcaagcaattcggcacggtcgaaaacgtgcttgcctccattgacgagatcaaaggcgaaaagttgaaagaaacgctgcgccaacaccgggagatggcgctgttaagcaaaaagctcgccgccattcgccgcgacgccccggtcgagctctcgcttgatgacatcgtctatcaaggggaagaccgggagaaagtggtcgctttatttaaagagcttgggtttcaatcgtttttagagaaaatggaatcgccgtcatcagaagaggaaaaaccgcttgccaagatggcatttacgcttgctgaccgcgtgacggaggagatgcttgccgacaaggcggcgcttgtcgttgaagtggtcgaggaaaattatcatgatgcgccgatcgtcggcatcgctgtggtcaacgaacatggacggtttttcctgcgcccggagacggcgcttgccgatccgcagtttgtcgcctggcttggtgatgaaacgaagaaaaaaagcatgtttgactcaaagcgcgcggcagtcgccttgaaatggaaaggaattgagctatgcggcgtttcctttgatttattgctggccgcctatttgcttgatccggcgcaaggtgttgatgatgtggctgccgcagcaaaaatgaagcaatacgaagcggtgcgctcggatgaagcggtgtatggcaaaggggcgaagcgggccgtgccggatgagccagtgctcgccgagcatctcgtccgcaaggcggcggcgatttgggcgctcgaacgtccgtttttggatgagctgcgccgcaacgaacaagatcggttgctcgtcgagctcgagcagccgttgtcttcgattttggcggaaatggaatttgccggagtgaaagtggatacgaagcggctcgaacagatgggcgaagagctcgccgagcagctgcgcacggtcgagcagcgcatttatgagctcgccggccaagaattcaacatcaattcaccgaaacagctcggcgtcattttatttgaaaaactgcagctgcccgtcttgaaaaaaacgaaaaccggctactccacttcggcggatgtgcttgaaaaacttgcgccttatcacgagatcgtggaaaacattttgcattaccgccagcttggcaagttgcagtcgacgtatattgaaggattgctgaaagtcgtgcgacccgatacaaagaaggtgcatacgattttcaatcaggcgttgacgcaaaccggacggctcagctcgacggagccgaacttgcaaaacattccgattcggcttgaggaaggacggaaaatccgccaagcgttcgtgccgtcggagtctgattggctcattttcgctgccgactactcgcaaattgagttgcgcgtcctcgcccatattgcggaagatgacaatttaatggaagcgttccgccgcgatttggatatccatacgaaaacagcgatggacattttccaagtgagcgaggacgaagtgacgcccaacatgcgccgtgtcgcgaaggcggtcaactttgggatcgtttacgggatcagtgattacggcttggcgcaaaacttaaatatttcacgcaaagaggccgctgaattcatcgagcgctacttcgaaagcttccctggcgtgaagcggtatatggaaaacattgtgcaagaagcaaaacagaaagggtatgtgacgacgctgctgcatcggcgccgctatttgccggatatcacgagccgcaacttcaacgtccgcagctttgctgaacggatggcgatgaacacgccgattcaagggagcgccgctgacattattaaaaaggcgatgatcgatctgaacgctagactgaaggaagagcggctgcaagcgcgccttttgctacaggtgcatgacgagctcattttggaggcgccgaaagaagagatggagcggctgtgccggctcgttccggaagtgatggagcaagcggtcacacttcgcgtgccgctcaaagtcgattaccattatggctcgacgtggtatgacgcgaaataaaaaggatcc

SEQ ID NO: 2713 - DNA, 2712 bp, Artificial Sequence
  Description of Artificial Sequence: Synthetic DNA sequence of Bacillus caldolyticus EA1 DNA polymerase Q728H
atgaaatacctgctgccgaccgctgctgctggtctgctgctcctcgctgcccagccggcgatggccatgggattgaaaaaaaagcttgttttaatcgacggcagcagcgtggcgtaccgcgcctttttcgccttgccgcttttgcataacgacaaaggcatccatacgaacgccgtctacgggtttacgatgatgttgaataaaattttggcggaagaagagccaactcatatgcttgtcgcgtttgacgccgggaaaacgacgttccggcatgaagcgtttcaagagtataaaggtgggcgccagcagacgccaccggagctgtcggagcagtttccgctgttgcgcgagctgctgagggcgtatcgcatccccgcctatgaactcgagaactacgaagcggacgatattatcggaacgcttgccgcccgcgctgagcaggaagggtttgaggtgaaagtcatttccggcgaccgcgatctgacccagctcgcctccccccatgtgacggtggacattacgaaaaaagggattaccgatatcgaaccgtacacgccggaggcggtccgcgaaaaatacggcttaactccggaacaaatcgttgatttgaaaggattgatgggcgacaaatcggacaacattcccggagtgccgggcatcggggaaaagacggcggtcaagctgctcaagcaattcggcacggtcgaaaacgtgcttgcctccattgacgagatcaaaggcgaaaagttgaaagaaacgctgcgccaacaccgggagatggcgctgttaagcaaaaagctcgccgccattcgccgcgacgccccggtcgagctctcgcttgatgacatcgtctatcaaggggaagaccgggagaaagtggtcgctttatttaaagagcttgggtttcaatcgtttttagagaaaatggaatcgccgtcatcagaagaggaaaaaccgcttgccaagatggcatttacgcttgctgaccgcgtgacggaggagatgcttgccgacaaggcggcgcttgtcgttgaagtggtcgaggaaaattatcatgatgcgccgatcgtcggcatcgctgtggtcaacgaacatggacggtttttcctgcgcccggagacggcgcttgccgatccgcagtttgtcgcctggcttggtgatgaaacgaagaaaaaaagcatgtttgactcaaagcgcgcggcagtcgccttgaaatggaaaggaattgagctatgcggcgtttcctttgatttattgctggccgcctatttgcttgatccggcgcaaggtgttgatgatgtggctgccgcagcaaaaatgaagcaatacgaagcggtgcgctcggatgaagcggtgtatggcaaaggggcgaagcgggccgtgccggatgagccagtgctcgccgagcatctcgtccgcaaggcggcggcgatttgggcgctcgaacgtccgtttttggatgagctgcgccgcaacgaacaagatcggttgctcgtcgagctcgagcagccgttgtcttcgattttggcggaaatggaatttgccggagtgaaagtggatacgaagcggctcgaacagatgggcgaagagctcgccgagcagctgcgcacggtcgagcagcgcatttatgagctcgccggccaagaattcaacatcaattcaccgaaacagctcggcgtcattttatttgaaaaactgcagctgcccgtcttgaaaaaaacgaaaaccggctactccacttcggcggatgtgcttgaaaaacttgcgccttatcacgagatcgtggaaaacattttgcattaccgccagcttggcaagttgcagtcgacgtatattgaaggattgctgaaagtcgtgcgacccgatacaaagaaggtgcatacgattttcaatcaggcgttgacgcaaaccggacggctcagctcgacggagccgaacttgcaaaacattccgattcggcttgaggaaggacggaaaatccgccaagcgttcgtgccgtcggagtctgattggctcattttcgctgccgactactcgcaaattgagttgcgcgtcctcgcccatattgcggaagatgacaatttaatggaagcgttccgccgcgatttggatatccatacgaaaacagcgatggacattttccaagtgagcgaggacgaagtgacgcccaacatgcgccgtcatgcgaaggcggtcaactttgggatcgtttacgggatcagtgattacggcttggcgcaaaacttaaatatttcacgcaaagaggccgctgaattcatcgagcgctacttcgaaagcttccctggcgtgaagcggtatatggaaaacattgtgcaagaagcaaaacagaaagggtatgtgacgacgctgctgcatcggcgccgctatttgccggatatcacgagccgcaacttcaacgtccgcagctttgctgaacggatggcgatgaacacgccgattcaagggagcgccgctgacattattaaaaaggcgatgatcgatctgaacgctagactgaaggaagagcggctgcaagcgcgccttttgctacaggtgcatgacgagctcattttggaggcgccgaaagaagagatggagcggctgtgccggctcgttccggaagtgatggagcaagcggtcacacttcgcgtgccgctcaaagtcgattaccattatggctcgacgtggtatgacgcgaaataaaaaggatcc

SEQ ID NO: 2714 - DNA, 2712 bp, Artificial Sequence
  Description of Artificial Sequence: Synthetic DNA sequence of Bacillus caldolyticus EA1 DNA polymerase Q728I
atgaaatacctgctgccgaccgctgctgctggtctgctgctcctcgctgcccagccggcgatggccatgggattgaaaaaaaagcttgttttaatcgacggcagcagcgtggcgtaccgcgcctttttcgccttgccgcttttgcataacgacaaaggcatccatacgaacgccgtctacgggtttacgatgatgttgaataaaattttggcggaagaagagccaactcatatgcttgtcgcgtttgacgccgggaaaacgacgttccggcatgaagcgtttcaagagtataaaggtgggcgccagcagacgccaccggagctgtcggagcagtttccgctgttgcgcgagctgctgagggcgtatcgcatccccgcctatgaactcgagaactacgaagcggacgatattatcggaacgcttgccgcccgcgctgagcaggaagggtttgaggtgaaagtcatttccggcgaccgcgatctgacccagctcgcctccccccatgtgacggtggacattacgaaaaaagggattaccgatatcgaaccgtacacgccggaggcggtccgcgaaaaatacggcttaactccggaacaaatcgttgatttgaaaggattgatgggcgacaaatcggacaacattcccggagtgccgggcatcggggaaaagacggcggtcaagctgctcaagcaattcggcacggtcgaaaacgtgcttgcctccattgacgagatcaaaggcgaaaagttgaaagaaacgctgcgccaacaccgggagatggcgctgttaagcaaaaagctcgccgccattcgccgcgacgccccggtcgagctctcgcttgatgacatcgtctatcaaggggaagaccgggagaaagtggtcgctttatttaaagagcttgggtttcaatcgtttttagagaaaatggaatcgccgtcatcagaagaggaaaaaccgcttgccaagatggcatttacgcttgctgaccgcgtgacggaggagatgcttgccgacaaggcggcgcttgtcgttgaagtggtcgaggaaaattatcatgatgcgccgatcgtcggcatcgctgtggtcaacgaacatggacggtttttcctgcgcccggagacggcgcttgccgatccgcagtttgtcgcctggcttggtgatgaaacgaagaaaaaaagcatgtttgactcaaagcgcgcggcagtcgccttgaaatggaaaggaattgagctatgcggcgtttcctttgatttattgctggccgcctatttgcttgatccggcgcaaggtgttgatgatgtggctgccgcagcaaaaatgaagcaatacgaagcggtgcgctcggatgaagcggtgtatggcaaaggggcgaagcgggccgtgccggatgagccagtgctcgccgagcatctcgtccgcaaggcggcggcgatttgggcgctcgaacgtccgtttttggatgagctgcgccgcaacgaacaagatcggttgctcgtcgagctcgagcagccgttgtcttcgattttggcggaaatggaatttgccggagtgaaagtggatacgaagcggctcgaacagatgggcgaagagctcgccgagcagctgcgcacggtcgagcagcgcatttatgagctcgccggccaagaattcaacatcaattcaccgaaacagctcggcgtcattttatttgaaaaactgcagctgcccgtcttgaaaaaaacgaaaaccggctactccacttcggcggatgtgcttgaaaaacttgcgccttatcacgagatcgtggaaaacattttgcattaccgccagcttggcaagttgcagtcgacgtatattgaaggattgctgaaagtcgtgcgacccgatacaaagaaggtgcatacgattttcaatcaggcgttgacgcaaaccggacggctcagctcgacggagccgaacttgcaaaacattccgattcggcttgaggaaggacggaaaatccgccaagcgttcgtgccgtcggagtctgattggctcattttcgctgccgactactcgcaaattgagttgcgcgtcctcgcccatattgcggaagatgacaatttaatggaagcgttccgccgcgatttggatatccatacgaaaacagcgatggacattttccaagtgagcgaggacgaagtgacgcccaacatgcgccgtattgcgaaggcggtcaactttgggatcgtttacgggatcagtgattacggcttggcgcaaaacttaaatatttcacgcaaagaggccgctgaattcatcgagcgctacttcgaaagcttccctggcgtgaagcggtatatggaaaacattgtgcaagaagcaaaacagaaagggtatgtgacgacgctgctgcatcggcgccgctatttgccggatatcacgagccgcaacttcaacgtccgcagctttgctgaacggatggcgatgaacacgccgattcaagggagcgccgctgacattattaaaaaggcgatgatcgatctgaacgctagactgaaggaagagcggctgcaagcgcgccttttgctacaggtgcatgacgagctcattttggaggcgccgaaagaagagatggagcggctgtgccggctcgttccggaagtgatggagcaagcggtcacacttcgcgtgccgctcaaagtcgattaccattatggctcgacgtggtatgacgcgaaataaaaaggatcc

SEQ ID NO: 2715 - DNA, 2712 bp, Artificial Sequence
  Description of Artificial Sequence: Synthetic DNA sequence of Bacillus caldolyticus EA1 DNA polymerase Q728L
atgaaatacctgctgccgaccgctgctgctggtctgctgctcctcgctgcccagccggcgatggccatgggattgaaaaaaaagcttgttttaatcgacggcagcagcgtggcgtaccgcgcctttttcgccttgccgcttttgcataacgacaaaggcatccatacgaacgccgtctacgggtttacgatgatgttgaataaaattttggcggaagaagagccaactcatatgcttgtcgcgtttgacgccgggaaaacgacgttccggcatgaagcgtttcaagagtataaaggtgggcgccagcagacgccaccggagctgtcggagcagtttccgctgttgcgcgagctgctgagggcgtatcgcatccccgcctatgaactcgagaactacgaagcggacgatattatcggaacgcttgccgcccgcgctgagcaggaagggtttgaggtgaaagtcatttccggcgaccgcgatctgacccagctcgcctccccccatgtgacggtggacattacgaaaaaagggattaccgatatcgaaccgtacacgccggaggcggtccgcgaaaaatacggcttaactccggaacaaatcgttgatttgaaaggattgatgggcgacaaatcggacaacattcccggagtgccgggcatcggggaaaagacggcggtcaagctgctcaagcaattcggcacggtcgaaaacgtgcttgcctccattgacgagatcaaaggcgaaaagttgaaagaaacgctgcgccaacaccgggagatggcgctgttaagcaaaaagctcgccgccattcgccgcgacgccccggtcgagctctcgcttgatgacatcgtctatcaaggggaagaccgggagaaagtggtcgctttatttaaagagcttgggtttcaatcgtttttagagaaaatggaatcgccgtcatcagaagaggaaaaaccgcttgccaagatggcatttacgcttgctgaccgcgtgacggaggagatgcttgccgacaaggcggcgcttgtcgttgaagtggtcgaggaaaattatcatgatgcgccgatcgtcggcatcgctgtggtcaacgaacatggacggtttttcctgcgcccggagacggcgcttgccgatccgcagtttgtcgcctggcttggtgatgaaacgaagaaaaaaagcatgtttgactcaaagcgcgcggcagtcgccttgaaatggaaaggaattgagctatgcggcgtttcctttgatttattgctggccgcctatttgcttgatccggcgcaaggtgttgatgatgtggctgccgcagcaaaaatgaagcaatacgaagcggtgcgctcggatgaagcggtgtatggcaaaggggcgaagcgggccgtgccggatgagccagtgctcgccgagcatctcgtccgcaaggcggcggcgatttgggcgctcgaacgtccgtttttggatgagctgcgccgcaacgaacaagatcggttgctcgtcgagctcgagcagccgttgtcttcgattttggcggaaatggaatttgccggagtgaaagtggatacgaagcggctcgaacagatgggcgaagagctcgccgagcagctgcgcacggtcgagcagcgcatttatgagctcgccggccaagaattcaacatcaattcaccgaaacagctcggcgtcattttatttgaaaaactgcagctgcccgtcttgaaaaaaacgaaaaccggctactccacttcggcggatgtgcttgaaaaacttgcgccttatcacgagatcgtggaaaacattttgcattaccgccagcttggcaagttgcagtcgacgtatattgaaggattgctgaaagtcgtgcgacccgatacaaagaaggtgcatacgattttcaatcaggcgttgacgcaaaccggacggctcagctcgacggagccgaacttgcaaaacattccgattcggcttgaggaaggacggaaaatccgccaagcgttcgtgccgtcggagtctgattggctcattttcgctgccgactactcgcaaattgagttgcgcgtcctcgcccatattgcggaagatgacaatttaatggaagcgttccgccgcgatttggatatccatacgaaaacagcgatggacattttccaagtgagcgaggacgaagtgacgcccaacatgcgccgtttagcgaaggcggtcaactttgggatcgtttacgggatcagtgattacggcttggcgcaaaacttaaatatttcacgcaaagaggccgctgaattcatcgagcgctacttcgaaagcttccctggcgtgaagcggtatatggaaaacattgtgcaagaagcaaaacagaaagggtatgtgacgacgctgctgcatcggcgccgctatttgccggatatcacgagccgcaacttcaacgtccgcagctttgctgaacggatggcgatgaacacgccgattcaagggagcgccgctgacattattaaaaaggcgatgatcgatctgaacgctagactgaaggaagagcggctgcaagcgcgccttttgctacaggtgcatgacgagctcattttggaggcgccgaaagaagagatggagcggctgtgccggctcgttccggaagtgatggagcaagcggtcacacttcgcgtgccgctcaaagtcgattaccattatggctcgacgtggtatgacgcgaaataaaaaggatcc

SEQ ID NO: 2716 - DNA, 2712 bp, Artificial Sequence
  Description of Artificial Sequence: Synthetic DNA sequence of Bacillus caldolyticus EA1 DNA polymerase Q728K
atgaaatacctgctgccgaccgctgctgctggtctgctgctcctcgctgcccagccggcgatggccatgggattgaaaaaaaagcttgttttaatcgacggcagcagcgtggcgtaccgcgcctttttcgccttgccgcttttgcataacgacaaaggcatccatacgaacgccgtctacgggtttacgatgatgttgaataaaattttggcggaagaagagccaactcatatgcttgtcgcgtttgacgccgggaaaacgacgttccggcatgaagcgtttcaagagtataaaggtgggcgccagcagacgccaccggagctgtcggagcagtttccgctgttgcgcgagctgctgagggcgtatcgcatccccgcctatgaactcgagaactacgaagcggacgatattatcggaacgcttgccgcccgcgctgagcaggaagggtttgaggtgaaagtcatttccggcgaccgcgatctgacccagctcgcctccccccatgtgacggtggacattacgaaaaaagggattaccgatatcgaaccgtacacgccggaggcggtccgcgaaaaatacggcttaactccggaacaaatcgttgatttgaaaggattgatgggcgacaaatcggacaacattcccggagtgccgggcatcggggaaaagacggcggtcaagctgctcaagcaattcggcacggtcgaaaacgtgcttgcctccattgacgagatcaaaggcgaaaagttgaaagaaacgctgcgccaacaccgggagatggcgctgttaagcaaaaagctcgccgccattcgccgcgacgccccggtcgagctctcgcttgatgacatcgtctatcaaggggaagaccgggagaaagtggtcgctttatttaaagagcttgggtttcaatcgtttttagagaaaatggaatcgccgtcatcagaagaggaaaaaccgcttgccaagatggcatttacgcttgctgaccgcgtgacggaggagatgcttgccgacaaggcggcgcttgtcgttgaagtggtcgaggaaaattatcatgatgcgccgatcgtcggcatcgctgtggtcaacgaacatggacggtttttcctgcgcccggagacggcgcttgccgatccgcagtttgtcgcctggcttggtgatgaaacgaagaaaaaaagcatgtttgactcaaagcgcgcggcagtcgccttgaaatggaaaggaattgagctatgcggcgtttcctttgatttattgctggccgcctatttgcttgatccggcgcaaggtgttgatgatgtggctgccgcagcaaaaatgaagcaatacgaagcggtgcgctcggatgaagcggtgtatggcaaaggggcgaagcgggccgtgccggatgagccagtgctcgccgagcatctcgtccgcaaggcggcggcgatttgggcgctcgaacgtccgtttttggatgagctgcgccgcaacgaacaagatcggttgctcgtcgagctcgagcagccgttgtcttcgattttggcggaaatggaatttgccggagtgaaagtggatacgaagcggctcgaacagatgggcgaagagctcgccgagcagctgcgcacggtcgagcagcgcatttatgagctcgccggccaagaattcaacatcaattcaccgaaacagctcggcgtcattttatttgaaaaactgcagctgcccgtcttgaaaaaaacgaaaaccggctactccacttcggcggatgtgcttgaaaaacttgcgccttatcacgagatcgtggaaaacattttgcattaccgccagcttggcaagttgcagtcgacgtatattgaaggattgctgaaagtcgtgcgacccgatacaaagaaggtgcatacgattttcaatcaggcgttgacgcaaaccggacggctcagctcgacggagccgaacttgcaaaacattccgattcggcttgaggaaggacggaaaatccgccaagcgttcgtgccgtcggagtctgattggctcattttcgctgccgactactcgcaaattgagttgcgcgtcctcgcccatattgcggaagatgacaatttaatggaagcgttccgccgcgatttggatatccatacgaaaacagcgatggacattttccaagtgagcgaggacgaagtgacgcccaacatgcgccgtaaagcgaaggcggtcaactttgggatcgtttacgggatcagtgattacggcttggcgcaaaacttaaatatttcacgcaaagaggccgctgaattcatcgagcgctacttcgaaagcttccctggcgtgaagcggtatatggaaaacattgtgcaagaagcaaaacagaaagggtatgtgacgacgctgctgcatcggcgccgctatttgccggatatcacgagccgcaacttcaacgtccgcagctttgctgaacggatggcgatgaacacgccgattcaagggagcgccgctgacattattaaaaaggcgatgatcgatctgaacgctagactgaaggaagagcggctgcaagcgcgccttttgctacaggtgcatgacgagctcattttggaggcgccgaaagaagagatggagcggctgtgccggctcgttccggaagtgatggagcaagcggtcacacttcgcgtgccgctcaaagtcgattaccattatggctcgacgtggtatgacgcgaaataaaaaggatcc

SEQ ID NO: 2717 - DNA, 2712 bp, Artificial Sequence
  Description of Artificial Sequence: Synthetic DNA sequence of Bacillus caldolyticus EA1 DNA polymerase Q728E
atgaaatacctgctgccgaccgctgctgctggtctgctgctcctcgctgcccagccggcgatggccatgggattgaaaaaaaagcttgttttaatcgacggcagcagcgtggcgtaccgcgcctttttcgccttgccgcttttgcataacgacaaaggcatccatacgaacgccgtctacgggtttacgatgatgttgaataaaattttggcggaagaagagccaactcatatgcttgtcgcgtttgacgccgggaaaacgacgttccggcatgaagcgtttcaagagtataaaggtgggcgccagcagacgccaccggagctgtcggagcagtttccgctgttgcgcgagctgctgagggcgtatcgcatccccgcctatgaactcgagaactacgaagcggacgatattatcggaacgcttgccgcccgcgctgagcaggaagggtttgaggtgaaagtcatttccggcgaccgcgatctgacccagctcgcctccccccatgtgacggtggacattacgaaaaaagggattaccgatatcgaaccgtacacgccggaggcggtccgcgaaaaatacggcttaactccggaacaaatcgttgatttgaaaggattgatgggcgacaaatcggacaacattcccggagtgccgggcatcggggaaaagacggcggtcaagctgctcaagcaattcggcacggtcgaaaacgtgcttgcctccattgacgagatcaaaggcgaaaagttgaaagaaacgctgcgccaacaccgggagatggcgctgttaagcaaaaagctcgccgccattcgccgcgacgccccggtcgagctctcgcttgatgacatcgtctatcaaggggaagaccgggagaaagtggtcgctttatttaaagagcttgggtttcaatcgtttttagagaaaatggaatcgccgtcatcagaagaggaaaaaccgcttgccaagatggcatttacgcttgctgaccgcgtgacggaggagatgcttgccgacaaggcggcgcttgtcgttgaagtggtcgaggaaaattatcatgatgcgccgatcgtcggcatcgctgtggtcaacgaacatggacggtttttcctgcgcccggagacggcgcttgccgatccgcagtttgtcgcctggcttggtgatgaaacgaagaaaaaaagcatgtttgactcaaagcgcgcggcagtcgccttgaaatggaaaggaattgagctatgcggcgtttcctttgatttattgctggccgcctatttgcttgatccggcgcaaggtgttgatgatgtggctgccgcagcaaaaatgaagcaatacgaagcggtgcgctcggatgaagcggtgtatggcaaaggggcgaagcgggccgtgccggatgagccagtgctcgccgagcatctcgtccgcaaggcggcggcgatttgggcgctcgaacgtccgtttttggatgagctgcgccgcaacgaacaagatcggttgctcgtcgagctcgagcagccgttgtcttcgattttggcggaaatggaatttgccggagtgaaagtggatacgaagcggctcgaacagatgggcgaagagctcgccgagcagctgcgcacggtcgagcagcgcatttatgagctcgccggccaagaattcaacatcaattcaccgaaacagctcggcgtcattttatttgaaaaactgcagctgcccgtcttgaaaaaaacgaaaaccggctactccacttcggcggatgtgcttgaaaaacttgcgccttatcacgagatcgtggaaaacattttgcattaccgccagcttggcaagttgcagtcgacgtatattgaaggattgctgaaagtcgtgcgacccgatacaaagaaggtgcatacgattttcaatcaggcgttgacgcaaaccggacggctcagctcgacggagccgaacttgcaaaacattccgattcggcttgaggaaggacggaaaatccgccaagcgttcgtgccgtcggagtctgattggctcattttcgctgccgactactcgcaaattgagttgcgcgtcctcgcccatattgcggaagatgacaatttaatggaagcgttccgccgcgatttggatatccatacgaaaacagcgatggacattttccaagtgagcgaggacgaagtgacgcccaacatgcgccgtgaagcgaaggcggtcaactttgggatcgtttacgggatcagtgattacggcttggcgcaaaacttaaatatttcacgcaaagaggccgctgaattcatcgagcgctacttcgaaagcttccctggcgtgaagcggtatatggaaaacattgtgcaagaagcaaaacagaaagggtatgtgacgacgctgctgcatcggcgccgctatttgccggatatcacgagccgcaacttcaacgtccgcagctttgctgaacggatggcgatgaacacgccgattcaagggagcgccgctgacattattaaaaaggcgatgatcgatctgaacgctagactgaaggaagagcggctgcaagcgcgccttttgctacaggtgcatgacgagctcattttggaggcgccgaaagaagagatggagcggctgtgccggctcgttccggaagtgatggagcaagcggtcacacttcgcgtgccgctcaaagtcgattaccattatggctcgacgtggtatgacgcgaaataaaaaggatcc

SEQ ID NO: 2718 - DNA, 2712 bp, Artificial Sequence
  Description of Artificial Sequence: Synthetic DNA sequence of Bacillus caldolyticus EA1 DNA polymerase Q728D
atgaaatacctgctgccgaccgctgctgctggtctgctgctcctcgctgcccagccggcgatggccatgggattgaaaaaaaagcttgttttaatcgacggcagcagcgtggcgtaccgcgcctttttcgccttgccgcttttgcataacgacaaaggcatccatacgaacgccgtctacgggtttacgatgatgttgaataaaattttggcggaagaagagccaactcatatgcttgtcgcgtttgacgccgggaaaacgacgttccggcatgaagcgtttcaagagtataaaggtgggcgccagcagacgccaccggagctgtcggagcagtttccgctgttgcgcgagctgctgagggcgtatcgcatccccgcctatgaactcgagaactacgaagcggacgatattatcggaacgcttgccgcccgcgctgagcaggaagggtttgaggtgaaagtcatttccggcgaccgcgatctgacccagctcgcctccccccatgtgacggtggacattacgaaaaaagggattaccgatatcgaaccgtacacgccggaggcggtccgcgaaaaatacggcttaactccggaacaaatcgttgatttgaaaggattgatgggcgacaaatcggacaacattcccggagtgccgggcatcggggaaaagacggcggtcaagctgctcaagcaattcggcacggtcgaaaacgtgcttgcctccattgacgagatcaaaggcgaaaagttgaaagaaacgctgcgccaacaccgggagatggcgctgttaagcaaaaagctcgccgccattcgccgcgacgccccggtcgagctctcgcttgatgacatcgtctatcaaggggaagaccgggagaaagtggtcgctttatttaaagagcttgggtttcaatcgtttttagagaaaatggaatcgccgtcatcagaagaggaaaaaccgcttgccaagatggcatttacgcttgctgaccgcgtgacggaggagatgcttgccgacaaggcggcgcttgtcgttgaagtggtcgaggaaaattatcatgatgcgccgatcgtcggcatcgctgtggtcaacgaacatggacggtttttcctgcgcccggagacggcgcttgccgatccgcagtttgtcgcctggcttggtgatgaaacgaagaaaaaaagcatgtttgactcaaagcgcgcggcagtcgccttgaaatggaaaggaattgagctatgcggcgtttcctttgatttattgctggccgcctatttgcttgatccggcgcaaggtgttgatgatgtggctgccgcagcaaaaatgaagcaatacgaagcggtgcgctcggatgaagcggtgtatggcaaaggggcgaagcgggccgtgccggatgagccagtgctcgccgagcatctcgtccgcaaggcggcggcgatttgggcgctcgaacgtccgtttttggatgagctgcgccgcaacgaacaagatcggttgctcgtcgagctcgagcagccgttgtcttcgattttggcggaaatggaatttgccggagtgaaagtggatacgaagcggctcgaacagatgggcgaagagctcgccgagcagctgcgcacggtcgagcagcgcatttatgagctcgccggccaagaattcaacatcaattcaccgaaacagctcggcgtcattttatttgaaaaactgcagctgcccgtcttgaaaaaaacgaaaaccggctactccacttcggcggatgtgcttgaaaaacttgcgccttatcacgagatcgtggaaaacattttgcattaccgccagcttggcaagttgcagtcgacgtatattgaaggattgctgaaagtcgtgcgacccgatacaaagaaggtgcatacgattttcaatcaggcgttgacgcaaaccggacggctcagctcgacggagccgaacttgcaaaacattccgattcggcttgaggaaggacggaaaatccgccaagcgttcgtgccgtcggagtctgattggctcattttcgctgccgactactcgcaaattgagttgcgcgtcctcgcccatattgcggaagatgacaatttaatggaagcgttccgccgcgatttggatatccatacgaaaacagcgatggacattttccaagtgagcgaggacgaagtgacgcccaacatgcgccgtgatgcgaaggcggtcaactttgggatcgtttacgggatcagtgattacggcttggcgcaaaacttaaatatttcacgcaaagaggccgctgaattcatcgagcgctacttcgaaagcttccctggcgtgaagcggtatatggaaaacattgtgcaagaagcaaaacagaaagggtatgtgacgacgctgctgcatcggcgccgctatttgccggatatcacgagccgcaacttcaacgtccgcagctttgctgaacggatggcgatgaacacgccgattcaagggagcgccgctgacattattaaaaaggcgatgatcgatctgaacgctagactgaaggaagagcggctgcaagcgcgccttttgctacaggtgcatgacgagctcattttggaggcgccgaaagaagagatggagcggctgtgccggctcgttccggaagtgatggagcaagcggtcacacttcgcgtgccgctcaaagtcgattaccattatggctcgacgtggtatgacgcgaaataaaaaggatcc

SEQ ID NO: 2719 - DNA, 2712 bp, Artificial Sequence
  Description of Artificial Sequence: Synthetic DNA sequence of Bacillus caldolyticus EA1 DNA polymerase Q728F
atgaaatacctgctgccgaccgctgctgctggtctgctgctcctcgctgcccagccggcgatggccatgggattgaaaaaaaagcttgttttaatcgacggcagcagcgtggcgtaccgcgcctttttcgccttgccgcttttgcataacgacaaaggcatccatacgaacgccgtctacgggtttacgatgatgttgaataaaattttggcggaagaagagccaactcatatgcttgtcgcgtttgacgccgggaaaacgacgttccggcatgaagcgtttcaagagtataaaggtgggcgccagcagacgccaccggagctgtcggagcagtttccgctgttgcgcgagctgctgagggcgtatcgcatccccgcctatgaactcgagaactacgaagcggacgatattatcggaacgcttgccgcccgcgctgagcaggaagggtttgaggtgaaagtcatttccggcgaccgcgatctgacccagctcgcctccccccatgtgacggtggacattacgaaaaaagggattaccgatatcgaaccgtacacgccggaggcggtccgcgaaaaatacggcttaactccggaacaaatcgttgatttgaaaggattgatgggcgacaaatcggacaacattcccggagtgccgggcatcggggaaaagacggcggtcaagctgctcaagcaattcggcacggtcgaaaacgtgcttgcctccattgacgagatcaaaggcgaaaagttgaaagaaacgctgcgccaacaccgggagatggcgctgttaagcaaaaagctcgccgccattcgccgcgacgccccggtcgagctctcgcttgatgacatcgtctatcaaggggaagaccgggagaaagtggtcgctttatttaaagagcttgggtttcaatcgtttttagagaaaatggaatcgccgtcatcagaagaggaaaaaccgcttgccaagatggcatttacgcttgctgaccgcgtgacggaggagatgcttgccgacaaggcggcgcttgtcgttgaagtggtcgaggaaaattatcatgatgcgccgatcgtcggcatcgctgtggtcaacgaacatggacggtttttcctgcgcccggagacggcgcttgccgatccgcagtttgtcgcctggcttggtgatgaaacgaagaaaaaaagcatgtttgactcaaagcgcgcggcagtcgccttgaaatggaaaggaattgagctatgcggcgtttcctttgatttattgctggccgcctatttgcttgatccggcgcaaggtgttgatgatgtggctgccgcagcaaaaatgaagcaatacgaagcggtgcgctcggatgaagcggtgtatggcaaaggggcgaagcgggccgtgccggatgagccagtgctcgccgagcatctcgtccgcaaggcggcggcgatttgggcgctcgaacgtccgtttttggatgagctgcgccgcaacgaacaagatcggttgctcgtcgagctcgagcagccgttgtcttcgattttggcggaaatggaatttgccggagtgaaagtggatacgaagcggctcgaacagatgggcgaagagctcgccgagcagctgcgcacggtcgagcagcgcatttatgagctcgccggccaagaattcaacatcaattcaccgaaacagctcggcgtcattttatttgaaaaactgcagctgcccgtcttgaaaaaaacgaaaaccggctactccacttcggcggatgtgcttgaaaaacttgcgccttatcacgagatcgtggaaaacattttgcattaccgccagcttggcaagttgcagtcgacgtatattgaaggattgctgaaagtcgtgcgacccgatacaaagaaggtgcatacgattttcaatcaggcgttgacgcaaaccggacggctcagctcgacggagccgaacttgcaaaacattccgattcggcttgaggaaggacggaaaatccgccaagcgttcgtgccgtcggagtctgattggctcattttcgctgccgactactcgcaaattgagttgcgcgtcctcgcccatattgcggaagatgacaatttaatggaagcgttccgccgcgatttggatatccatacgaaaacagcgatggacattttccaagtgagcgaggacgaagtgacgcccaacatgcgccgttttgcgaaggcggtcaactttgggatcgtttacgggatcagtgattacggcttggcgcaaaacttaaatatttcacgcaaagaggccgctgaattcatcgagcgctacttcgaaagcttccctggcgtgaagcggtatatggaaaacattgtgcaagaagcaaaacagaaagggtatgtgacgacgctgctgcatcggcgccgctatttgccggatatcacgagccgcaacttcaacgtccgcagctttgctgaacggatggcgatgaacacgccgattcaagggagcgccgctgacattattaaaaaggcgatgatcgatctgaacgctagactgaaggaagagcggctgcaagcgcgccttttgctacaggtgcatgacgagctcattttggaggcgccgaaagaagagatggagcggctgtgccggctcgttccggaagtgatggagcaagcggtcacacttcgcgtgccgctcaaagtcgattaccattatggctcgacgtggtatgacgcgaaataaaaaggatcc

SEQ ID NO: 2720 - DNA, 2712 bp, Artificial Sequence
  Description of Artificial Sequence: Synthetic DNA sequence of Bacillus caldolyticus EA1 DNA polymerase Q728S
atgaaatacctgctgccgaccgctgctgctggtctgctgctcctcgctgcccagccggcgatggccatgggattgaaaaaaaagcttgttttaatcgacggcagcagcgtggcgtaccgcgcctttttcgccttgccgcttttgcataacgacaaaggcatccatacgaacgccgtctacgggtttacgatgatgttgaataaaattttggcggaagaagagccaactcatatgcttgtcgcgtttgacgccgggaaaacgacgttccggcatgaagcgtttcaagagtataaaggtgggcgccagcagacgccaccggagctgtcggagcagtttccgctgttgcgcgagctgctgagggcgtatcgcatccccgcctatgaactcgagaactacgaagcggacgatattatcggaacgcttgccgcccgcgctgagcaggaagggtttgaggtgaaagtcatttccggcgaccgcgatctgacccagctcgcctccccccatgtgacggtggacattacgaaaaaagggattaccgatatcgaaccgtacacgccggaggcggtccgcgaaaaatacggcttaactccggaacaaatcgttgatttgaaaggattgatgggcgacaaatcggacaacattcccggagtgccgggcatcggggaaaagacggcggtcaagctgctcaagcaattcggcacggtcgaaaacgtgcttgcctccattgacgagatcaaaggcgaaaagttgaaagaaacgctgcgccaacaccgggagatggcgctgttaagcaaaaagctcgccgccattcgccgcgacgccccggtcgagctctcgcttgatgacatcgtctatcaaggggaagaccgggagaaagtggtcgctttatttaaagagcttgggtttcaatcgtttttagagaaaatggaatcgccgtcatcagaagaggaaaaaccgcttgccaagatggcatttacgcttgctgaccgcgtgacggaggagatgcttgccgacaaggcggcgcttgtcgttgaagtggtcgaggaaaattatcatgatgcgccgatcgtcggcatcgctgtggtcaacgaacatggacggtttttcctgcgcccggagacggcgcttgccgatccgcagtttgtcgcctggcttggtgatgaaacgaagaaaaaaagcatgtttgactcaaagcgcgcggcagtcgccttgaaatggaaaggaattgagctatgcggcgtttcctttgatttattgctggccgcctatttgcttgatccggcgcaaggtgttgatgatgtggctgccgcagcaaaaatgaagcaatacgaagcggtgcgctcggatgaagcggtgtatggcaaaggggcgaagcgggccgtgccggatgagccagtgctcgccgagcatctcgtccgcaaggcggcggcgatttgggcgctcgaacgtccgtttttggatgagctgcgccgcaacgaacaagatcggttgctcgtcgagctcgagcagccgttgtcttcgattttggcggaaatggaatttgccggagtgaaagtggatacgaagcggctcgaacagatgggcgaagagctcgccgagcagctgcgcacggtcgagcagcgcatttatgagctcgccggccaagaattcaacatcaattcaccgaaacagctcggcgtcattttatttgaaaaactgcagctgcccgtcttgaaaaaaacgaaaaccggctactccacttcggcggatgtgcttgaaaaacttgcgccttatcacgagatcgtggaaaacattttgcattaccgccagcttggcaagttgcagtcgacgtatattgaaggattgctgaaagtcgtgcgacccgatacaaagaaggtgcatacgattttcaatcaggcgttgacgcaaaccggacggctcagctcgacggagccgaacttgcaaaacattccgattcggcttgaggaaggacggaaaatccgccaagcgttcgtgccgtcggagtctgattggctcattttcgctgccgactactcgcaaattgagttgcgcgtcctcgcccatattgcggaagatgacaatttaatggaagcgttccgccgcgatttggatatccatacgaaaacagcgatggacattttccaagtgagcgaggacgaagtgacgcccaacatgcgccgttctgcgaaggcggtcaactttgggatcgtttacgggatcagtgattacggcttggcgcaaaacttaaatatttcacgcaaagaggccgctgaattcatcgagcgctacttcgaaagcttccctggcgtgaagcggtatatggaaaacattgtgcaagaagcaaaacagaaagggtatgtgacgacgctgctgcatcggcgccgctatttgccggatatcacgagccgcaacttcaacgtccgcagctttgctgaacggatggcgatgaacacgccgattcaagggagcgccgctgacattattaaaaaggcgatgatcgatctgaacgctagactgaaggaagagcggctgcaagcgcgccttttgctacaggtgcatgacgagctcattttggaggcgccgaaagaagagatggagcggctgtgccggctcgttccggaagtgatggagcaagcggtcacacttcgcgtgccgctcaaagtcgattaccattatggctcgacgtggtatgacgcgaaataaaaaggatcc

SEQ ID NO: 2721 - DNA, 2712 bp, Artificial Sequence
  Description of Artificial Sequence: Synthetic DNA sequence of Bacillus caldolyticus EA1 DNA polymerase Q728Y
atgaaatacctgctgccgaccgctgctgctggtctgctgctcctcgctgcccagccggcgatggccatgggattgaaaaaaaagcttgttttaatcgacggcagcagcgtggcgtaccgcgcctttttcgccttgccgcttttgcataacgacaaaggcatccatacgaacgccgtctacgggtttacgatgatgttgaataaaattttggcggaagaagagccaactcatatgcttgtcgcgtttgacgccgggaaaacgacgttccggcatgaagcgtttcaagagtataaaggtgggcgccagcagacgccaccggagctgtcggagcagtttccgctgttgcgcgagctgctgagggcgtatcgcatccccgcctatgaactcgagaactacgaagcggacgatattatcggaacgcttgccgcccgcgctgagcaggaagggtttgaggtgaaagtcatttccggcgaccgcgatctgacccagctcgcctccccccatgtgacggtggacattacgaaaaaagggattaccgatatcgaaccgtacacgccggaggcggtccgcgaaaaatacggcttaactccggaacaaatcgttgatttgaaaggattgatgggcgacaaatcggacaacattcccggagtgccgggcatcggggaaaagacggcggtcaagctgctcaagcaattcggcacggtcgaaaacgtgcttgcctccattgacgagatcaaaggcgaaaagttgaaagaaacgctgcgccaacaccgggagatggcgctgttaagcaaaaagctcgccgccattcgccgcgacgccccggtcgagctctcgcttgatgacatcgtctatcaaggggaagaccgggagaaagtggtcgctttatttaaagagcttgggtttcaatcgtttttagagaaaatggaatcgccgtcatcagaagaggaaaaaccgcttgccaagatggcatttacgcttgctgaccgcgtgacggaggagatgcttgccgacaaggcggcgcttgtcgttgaagtggtcgaggaaaattatcatgatgcgccgatcgtcggcatcgctgtggtcaacgaacatggacggtttttcctgcgcccggagacggcgcttgccgatccgcagtttgtcgcctggcttggtgatgaaacgaagaaaaaaagcatgtttgactcaaagcgcgcggcagtcgccttgaaatggaaaggaattgagctatgcggcgtttcctttgatttattgctggccgcctatttgcttgatccggcgcaaggtgttgatgatgtggctgccgcagcaaaaatgaagcaatacgaagcggtgcgctcggatgaagcggtgtatggcaaaggggcgaagcgggccgtgccggatgagccagtgctcgccgagcatctcgtccgcaaggcggcggcgatttgggcgctcgaacgtccgtttttggatgagctgcgccgcaacgaacaagatcggttgctcgtcgagctcgagcagccgttgtcttcgattttggcggaaatggaatttgccggagtgaaagtggatacgaagcggctcgaacagatgggcgaagagctcgccgagcagctgcgcacggtcgagcagcgcatttatgagctcgccggccaagaattcaacatcaattcaccgaaacagctcggcgtcattttatttgaaaaactgcagctgcccgtcttgaaaaaaacgaaaaccggctactccacttcggcggatgtgcttgaaaaacttgcgccttatcacgagatcgtggaaaacattttgcattaccgccagcttggcaagttgcagtcgacgtatattgaaggattgctgaaagtcgtgcgacccgatacaaagaaggtgcatacgattttcaatcaggcgttgacgcaaaccggacggctcagctcgacggagccgaacttgcaaaacattccgattcggcttgaggaaggacggaaaatccgccaagcgttcgtgccgtcggagtctgattggctcattttcgctgccgactactcgcaaattgagttgcgcgtcctcgcccatattgcggaagatgacaatttaatggaagcgttccgccgcgatttggatatccatacgaaaacagcgatggacattttccaagtgagcgaggacgaagtgacgcccaacatgcgccgttatgcgaaggcggtcaactttgggatcgtttacgggatcagtgattacggcttggcgcaaaacttaaatatttcacgcaaagaggccgctgaattcatcgagcgctacttcgaaagcttccctggcgtgaagcggtatatggaaaacattgtgcaagaagcaaaacagaaagggtatgtgacgacgctgctgcatcggcgccgctatttgccggatatcacgagccgcaacttcaacgtccgcagctttgctgaacggatggcgatgaacacgccgattcaagggagcgccgctgacattattaaaaaggcgatgatcgatctgaacgctagactgaaggaagagcggctgcaagcgcgccttttgctacaggtgcatgacgagctcattttggaggcgccgaaagaagagatggagcggctgtgccggctcgttccggaagtgatggagcaagcggtcacacttcgcgtgccgctcaaagtcgattaccattatggctcgacgtggtatgacgcgaaataaaaaggatcc

SEQ ID NO: 2722 - DNA, 2712 bp, Artificial Sequence
  Description of Artificial Sequence: Synthetic DNA sequence of Bacillus caldolyticus EA1 DNA polymerase Q728W
atgaaatacctgctgccgaccgctgctgctggtctgctgctcctcgctgcccagccggcgatggccatgggattgaaaaaaaagcttgttttaatcgacggcagcagcgtggcgtaccgcgcctttttcgccttgccgcttttgcataacgacaaaggcatccatacgaacgccgtctacgggtttacgatgatgttgaataaaattttggcggaagaagagccaactcatatgcttgtcgcgtttgacgccgggaaaacgacgttccggcatgaagcgtttcaagagtataaaggtgggcgccagcagacgccaccggagctgtcggagcagtttccgctgttgcgcgagctgctgagggcgtatcgcatccccgcctatgaactcgagaactacgaagcggacgatattatcggaacgcttgccgcccgcgctgagcaggaagggtttgaggtgaaagtcatttccggcgaccgcgatctgacccagctcgcctccccccatgtgacggtggacattacgaaaaaagggattaccgatatcgaaccgtacacgccggaggcggtccgcgaaaaatacggcttaactccggaacaaatcgttgatttgaaaggattgatgggcgacaaatcggacaacattcccggagtgccgggcatcggggaaaagacggcggtcaagctgctcaagcaattcggcacggtcgaaaacgtgcttgcctccattgacgagatcaaaggcgaaaagttgaaagaaacgctgcgccaacaccgggagatggcgctgttaagcaaaaagctcgccgccattcgccgcgacgccccggtcgagctctcgcttgatgacatcgtctatcaaggggaagaccgggagaaagtggtcgctttatttaaagagcttgggtttcaatcgtttttagagaaaatggaatcgccgtcatcagaagaggaaaaaccgcttgccaagatggcatttacgcttgctgaccgcgtgacggaggagatgcttgccgacaaggcggcgcttgtcgttgaagtggtcgaggaaaattatcatgatgcgccgatcgtcggcatcgctgtggtcaacgaacatggacggtttttcctgcgcccggagacggcgcttgccgatccgcagtttgtcgcctggcttggtgatgaaacgaagaaaaaaagcatgtttgactcaaagcgcgcggcagtcgccttgaaatggaaaggaattgagctatgcggcgtttcctttgatttattgctggccgcctatttgcttgatccggcgcaaggtgttgatgatgtggctgccgcagcaaaaatgaagcaatacgaagcggtgcgctcggatgaagcggtgtatggcaaaggggcgaagcgggccgtgccggatgagccagtgctcgccgagcatctcgtccgcaaggcggcggcgatttgggcgctcgaacgtccgtttttggatgagctgcgccgcaacgaacaagatcggttgctcgtcgagctcgagcagccgttgtcttcgattttggcggaaatggaatttgccggagtgaaagtggatacgaagcggctcgaacagatgggcgaagagctcgccgagcagctgcgcacggtcgagcagcgcatttatgagctcgccggccaagaattcaacatcaattcaccgaaacagctcggcgtcattttatttgaaaaactgcagctgcccgtcttgaaaaaaacgaaaaccggctactccacttcggcggatgtgcttgaaaaacttgcgccttatcacgagatcgtggaaaacattttgcattaccgccagcttggcaagttgcagtcgacgtatattgaaggattgctgaaagtcgtgcgacccgatacaaagaaggtgcatacgattttcaatcaggcgttgacgcaaaccggacggctcagctcgacggagccgaacttgcaaaacattccgattcggcttgaggaaggacggaaaatccgccaagcgttcgtgccgtcggagtctgattggctcattttcgctgccgactactcgcaaattgagttgcgcgtcctcgcccatattgcggaagatgacaatttaatggaagcgttccgccgcgatttggatatccatacgaaaacagcgatggacattttccaagtgagcgaggacgaagtgacgcccaacatgcgccgttgggcgaaggcggtcaactttgggatcgtttacgggatcagtgattacggcttggcgcaaaacttaaatatttcacgcaaagaggccgctgaattcatcgagcgctacttcgaaagcttccctggcgtgaagcggtatatggaaaacattgtgcaagaagcaaaacagaaagggtatgtgacgacgctgctgcatcggcgccgctatttgccggatatcacgagccgcaacttcaacgtccgcagctttgctgaacggatggcgatgaacacgccgattcaagggagcgccgctgacattattaaaaaggcgatgatcgatctgaacgctagactgaaggaagagcggctgcaagcgcgccttttgctacaggtgcatgacgagctcattttggaggcgccgaaagaagagatggagcggctgtgccggctcgttccggaagtgatggagcaagcggtcacacttcgcgtgccgctcaaagtcgattaccattatggctcgacgtggtatgacgcgaaataaaaaggatcc

SEQ ID NO: 2723 - DNA, 2712 bp, Artificial Sequence
  Description of Artificial Sequence: Synthetic DNA sequence of Bacillus caldolyticus EA1 DNA polymerase Q728P
atgaaatacctgctgccgaccgctgctgctggtctgctgctcctcgctgcccagccggcgatggccatgggattgaaaaaaaagcttgttttaatcgacggcagcagcgtggcgtaccgcgcctttttcgccttgccgcttttgcataacgacaaaggcatccatacgaacgccgtctacgggtttacgatgatgttgaataaaattttggcggaagaagagccaactcatatgcttgtcgcgtttgacgccgggaaaacgacgttccggcatgaagcgtttcaagagtataaaggtgggcgccagcagacgccaccggagctgtcggagcagtttccgctgttgcgcgagctgctgagggcgtatcgcatccccgcctatgaactcgagaactacgaagcggacgatattatcggaacgcttgccgcccgcgctgagcaggaagggtttgaggtgaaagtcatttccggcgaccgcgatctgacccagctcgcctccccccatgtgacggtggacattacgaaaaaagggattaccgatatcgaaccgtacacgccggaggcggtccgcgaaaaatacggcttaactccggaacaaatcgttgatttgaaaggattgatgggcgacaaatcggacaacattcccggagtgccgggcatcggggaaaagacggcggtcaagctgctcaagcaattcggcacggtcgaaaacgtgcttgcctccattgacgagatcaaaggcgaaaagttgaaagaaacgctgcgccaacaccgggagatggcgctgttaagcaaaaagctcgccgccattcgccgcgacgccccggtcgagctctcgcttgatgacatcgtctatcaaggggaagaccgggagaaagtggtcgctttatttaaagagcttgggtttcaatcgtttttagagaaaatggaatcgccgtcatcagaagaggaaaaaccgcttgccaagatggcatttacgcttgctgaccgcgtgacggaggagatgcttgccgacaaggcggcgcttgtcgttgaagtggtcgaggaaaattatcatgatgcgccgatcgtcggcatcgctgtggtcaacgaacatggacggtttttcctgcgcccggagacggcgcttgccgatccgcagtttgtcgcctggcttggtgatgaaacgaagaaaaaaagcatgtttgactcaaagcgcgcggcagtcgccttgaaatggaaaggaattgagctatgcggcgtttcctttgatttattgctggccgcctatttgcttgatccggcgcaaggtgttgatgatgtggctgccgcagcaaaaatgaagcaatacgaagcggtgcgctcggatgaagcggtgtatggcaaaggggcgaagcgggccgtgccggatgagccagtgctcgccgagcatctcgtccgcaaggcggcggcgatttgggcgctcgaacgtccgtttttggatgagctgcgccgcaacgaacaagatcggttgctcgtcgagctcgagcagccgttgtcttcgattttggcggaaatggaatttgccggagtgaaagtggatacgaagcggctcgaacagatgggcgaagagctcgccgagcagctgcgcacggtcgagcagcgcatttatgagctcgccggccaagaattcaacatcaattcaccgaaacagctcggcgtcattttatttgaaaaactgcagctgcccgtcttgaaaaaaacgaaaaccggctactccacttcggcggatgtgcttgaaaaacttgcgccttatcacgagatcgtggaaaacattttgcattaccgccagcttggcaagttgcagtcgacgtatattgaaggattgctgaaagtcgtgcgacccgatacaaagaaggtgcatacgattttcaatcaggcgttgacgcaaaccggacggctcagctcgacggagccgaacttgcaaaacattccgattcggcttgaggaaggacggaaaatccgccaagcgttcgtgccgtcggagtctgattggctcattttcgctgccgactactcgcaaattgagttgcgcgtcctcgcccatattgcggaagatgacaatttaatggaagcgttccgccgcgatttggatatccatacgaaaacagcgatggacattttccaagtgagcgaggacgaagtgacgcccaacatgcgccgtcctgcgaaggcggtcaactttgggatcgtttacgggatcagtgattacggcttggcgcaaaacttaaatatttcacgcaaagaggccgctgaattcatcgagcgctacttcgaaagcttccctggcgtgaagcggtatatggaaaacattgtgcaagaagcaaaacagaaagggtatgtgacgacgctgctgcatcggcgccgctatttgccggatatcacgagccgcaacttcaacgtccgcagctttgctgaacggatggcgatgaacacgccgattcaagggagcgccgctgacattattaaaaaggcgatgatcgatctgaacgctagactgaaggaagagcggctgcaagcgcgccttttgctacaggtgcatgacgagctcattttggaggcgccgaaagaagagatggagcggctgtgccggctcgttccggaagtgatggagcaagcggtcacacttcgcgtgccgctcaaagtcgattaccattatggctcgacgtggtatgacgcgaaataaaaaggatcc

SEQ ID NO: 2724 - DNA, 2712 bp, Artificial Sequence
  Description of Artificial Sequence: Synthetic DNA sequence of Bacillus caldolyticus EA1 DNA polymerase Q728M
atgaaatacctgctgccgaccgctgctgctggtctgctgctcctcgctgcccagccggcgatggccatgggattgaaaaaaaagcttgttttaatcgacggcagcagcgtggcgtaccgcgcctttttcgccttgccgcttttgcataacgacaaaggcatccatacgaacgccgtctacgggtttacgatgatgttgaataaaattttggcggaagaagagccaactcatatgcttgtcgcgtttgacgccgggaaaacgacgttccggcatgaagcgtttcaagagtataaaggtgggcgccagcagacgccaccggagctgtcggagcagtttccgctgttgcgcgagctgctgagggcgtatcgcatccccgcctatgaactcgagaactacgaagcggacgatattatcggaacgcttgccgcccgcgctgagcaggaagggtttgaggtgaaagtcatttccggcgaccgcgatctgacccagctcgcctccccccatgtgacggtggacattacgaaaaaagggattaccgatatcgaaccgtacacgccggaggcggtccgcgaaaaatacggcttaactccggaacaaatcgttgatttgaaaggattgatgggcgacaaatcggacaacattcccggagtgccgggcatcggggaaaagacggcggtcaagctgctcaagcaattcggcacggtcgaaaacgtgcttgcctccattgacgagatcaaaggcgaaaagttgaaagaaacgctgcgccaacaccgggagatggcgctgttaagcaaaaagctcgccgccattcgccgcgacgccccggtcgagctctcgcttgatgacatcgtctatcaaggggaagaccgggagaaagtggtcgctttatttaaagagcttgggtttcaatcgtttttagagaaaatggaatcgccgtcatcagaagaggaaaaaccgcttgccaagatggcatttacgcttgctgaccgcgtgacggaggagatgcttgccgacaaggcggcgcttgtcgttgaagtggtcgaggaaaattatcatgatgcgccgatcgtcggcatcgctgtggtcaacgaacatggacggtttttcctgcgcccggagacggcgcttgccgatccgcagtttgtcgcctggcttggtgatgaaacgaagaaaaaaagcatgtttgactcaaagcgcgcggcagtcgccttgaaatggaaaggaattgagctatgcggcgtttcctttgatttattgctggccgcctatttgcttgatccggcgcaaggtgttgatgatgtggctgccgcagcaaaaatgaagcaatacgaagcggtgcgctcggatgaagcggtgtatggcaaaggggcgaagcgggccgtgccggatgagccagtgctcgccgagcatctcgtccgcaaggcggcggcgatttgggcgctcgaacgtccgtttttggatgagctgcgccgcaacgaacaagatcggttgctcgtcgagctcgagcagccgttgtcttcgattttggcggaaatggaatttgccggagtgaaagtggatacgaagcggctcgaacagatgggcgaagagctcgccgagcagctgcgcacggtcgagcagcgcatttatgagctcgccggccaagaattcaacatcaattcaccgaaacagctcggcgtcattttatttgaaaaactgcagctgcccgtcttgaaaaaaacgaaaaccggctactccacttcggcggatgtgcttgaaaaacttgcgccttatcacgagatcgtggaaaacattttgcattaccgccagcttggcaagttgcagtcgacgtatattgaaggattgctgaaagtcgtgcgacccgatacaaagaaggtgcatacgattttcaatcaggcgttgacgcaaaccggacggctcagctcgacggagccgaacttgcaaaacattccgattcggcttgaggaaggacggaaaatccgccaagcgttcgtgccgtcggagtctgattggctcattttcgctgccgactactcgcaaattgagttgcgcgtcctcgcccatattgcggaagatgacaatttaatggaagcgttccgccgcgatttggatatccatacgaaaacagcgatggacattttccaagtgagcgaggacgaagtgacgcccaacatgcgccgtatggcgaaggcggtcaactttgggatcgtttacgggatcagtgattacggcttggcgcaaaacttaaatatttcacgcaaagaggccgctgaattcatcgagcgctacttcgaaagcttccctggcgtgaagcggtatatggaaaacattgtgcaagaagcaaaacagaaagggtatgtgacgacgctgctgcatcggcgccgctatttgccggatatcacgagccgcaacttcaacgtccgcagctttgctgaacggatggcgatgaacacgccgattcaagggagcgccgctgacattattaaaaaggcgatgatcgatctgaacgctagactgaaggaagagcggctgcaagcgcgccttttgctacaggtgcatgacgagctcattttggaggcgccgaaagaagagatggagcggctgtgccggctcgttccggaagtgatggagcaagcggtcacacttcgcgtgccgctcaaagtcgattaccattatggctcgacgtggtatgacgcgaaataaaaaggatcc

SEQ ID NO: 2725 - DNA, 2712 bp, Artificial Sequence
  Description of Artificial Sequence: Synthetic DNA sequence of Bacillus caldolyticus EA1 DNA polymerase Q728T
atgaaatacctgctgccgaccgctgctgctggtctgctgctcctcgctgcccagccggcgatggccatgggattgaaaaaaaagcttgttttaatcgacggcagcagcgtggcgtaccgcgcctttttcgccttgccgcttttgcataacgacaaaggcatccatacgaacgccgtctacgggtttacgatgatgttgaataaaattttggcggaagaagagccaactcatatgcttgtcgcgtttgacgccgggaaaacgacgttccggcatgaagcgtttcaagagtataaaggtgggcgccagcagacgccaccggagctgtcggagcagtttccgctgttgcgcgagctgctgagggcgtatcgcatccccgcctatgaactcgagaactacgaagcggacgatattatcggaacgcttgccgcccgcgctgagcaggaagggtttgaggtgaaagtcatttccggcgaccgcgatctgacccagctcgcctccccccatgtgacggtggacattacgaaaaaagggattaccgatatcgaaccgtacacgccggaggcggtccgcgaaaaatacggcttaactccggaacaaatcgttgatttgaaaggattgatgggcgacaaatcggacaacattcccggagtgccgggcatcggggaaaagacggcggtcaagctgctcaagcaattcggcacggtcgaaaacgtgcttgcctccattgacgagatcaaaggcgaaaagttgaaagaaacgctgcgccaacaccgggagatggcgctgttaagcaaaaagctcgccgccattcgccgcgacgccccggtcgagctctcgcttgatgacatcgtctatcaaggggaagaccgggagaaagtggtcgctttatttaaagagcttgggtttcaatcgtttttagagaaaatggaatcgccgtcatcagaagaggaaaaaccgcttgccaagatggcatttacgcttgctgaccgcgtgacggaggagatgcttgccgacaaggcggcgcttgtcgttgaagtggtcgaggaaaattatcatgatgcgccgatcgtcggcatcgctgtggtcaacgaacatggacggtttttcctgcgcccggagacggcgcttgccgatccgcagtttgtcgcctggcttggtgatgaaacgaagaaaaaaagcatgtttgactcaaagcgcgcggcagtcgccttgaaatggaaaggaattgagctatgcggcgtttcctttgatttattgctggccgcctatttgcttgatccggcgcaaggtgttgatgatgtggctgccgcagcaaaaatgaagcaatacgaagcggtgcgctcggatgaagcggtgtatggcaaaggggcgaagcgggccgtgccggatgagccagtgctcgccgagcatctcgtccgcaaggcggcggcgatttgggcgctcgaacgtccgtttttggatgagctgcgccgcaacgaacaagatcggttgctcgtcgagctcgagcagccgttgtcttcgattttggcggaaatggaatttgccggagtgaaagtggatacgaagcggctcgaacagatgggcgaagagctcgccgagcagctgcgcacggtcgagcagcgcatttatgagctcgccggccaagaattcaacatcaattcaccgaaacagctcggcgtcattttatttgaaaaactgcagctgcccgtcttgaaaaaaacgaaaaccggctactccacttcggcggatgtgcttgaaaaacttgcgccttatcacgagatcgtggaaaacattttgcattaccgccagcttggcaagttgcagtcgacgtatattgaaggattgctgaaagtcgtgcgacccgatacaaagaaggtgcatacgattttcaatcaggcgttgacgcaaaccggacggctcagctcgacggagccgaacttgcaaaacattccgattcggcttgaggaaggacggaaaatccgccaagcgttcgtgccgtcggagtctgattggctcattttcgctgccgactactcgcaaattgagttgcgcgtcctcgcccatattgcggaagatgacaatttaatggaagcgttccgccgcgatttggatatccatacgaaaacagcgatggacattttccaagtgagcgaggacgaagtgacgcccaacatgcgccgtactgcgaaggcggtcaactttgggatcgtttacgggatcagtgattacggcttggcgcaaaacttaaatatttcacgcaaagaggccgctgaattcatcgagcgctacttcgaaagcttccctggcgtgaagcggtatatggaaaacattgtgcaagaagcaaaacagaaagggtatgtgacgacgctgctgcatcggcgccgctatttgccggatatcacgagccgcaacttcaacgtccgcagctttgctgaacggatggcgatgaacacgccgattcaagggagcgccgctgacattattaaaaaggcgatgatcgatctgaacgctagactgaaggaagagcggctgcaagcgcgccttttgctacaggtgcatgacgagctcattttggaggcgccgaaagaagagatggagcggctgtgccggctcgttccggaagtgatggagcaagcggtcacacttcgcgtgccgctcaaagtcgattaccattatggctcgacgtggtatgacgcgaaataaaaaggatcc

SEQ ID NO: 2726 - DNA, 2712 bp, Artificial Sequence
  Description of Artificial Sequence: Synthetic DNA sequence of Bacillus caldolyticus EA1 DNA polymerase Q728N
atgaaatacctgctgccgaccgctgctgctggtctgctgctcctcgctgcccagccggcgatggccatgggattgaaaaaaaagcttgttttaatcgacggcagcagcgtggcgtaccgcgcctttttcgccttgccgcttttgcataacgacaaaggcatccatacgaacgccgtctacgggtttacgatgatgttgaataaaattttggcggaagaagagccaactcatatgcttgtcgcgtttgacgccgggaaaacgacgttccggcatgaagcgtttcaagagtataaaggtgggcgccagcagacgccaccggagctgtcggagcagtttccgctgttgcgcgagctgctgagggcgtatcgcatccccgcctatgaactcgagaactacgaagcggacgatattatcggaacgcttgccgcccgcgctgagcaggaagggtttgaggtgaaagtcatttccggcgaccgcgatctgacccagctcgcctccccccatgtgacggtggacattacgaaaaaagggattaccgatatcgaaccgtacacgccggaggcggtccgcgaaaaatacggcttaactccggaacaaatcgttgatttgaaaggattgatgggcgacaaatcggacaacattcccggagtgccgggcatcggggaaaagacggcggtcaagctgctcaagcaattcggcacggtcgaaaacgtgcttgcctccattgacgagatcaaaggcgaaaagttgaaagaaacgctgcgccaacaccgggagatggcgctgttaagcaaaaagctcgccgccattcgccgcgacgccccggtcgagctctcgcttgatgacatcgtctatcaaggggaagaccgggagaaagtggtcgctttatttaaagagcttgggtttcaatcgtttttagagaaaatggaatcgccgtcatcagaagaggaaaaaccgcttgccaagatggcatttacgcttgctgaccgcgtgacggaggagatgcttgccgacaaggcggcgcttgtcgttgaagtggtcgaggaaaattatcatgatgcgccgatcgtcggcatcgctgtggtcaacgaacatggacggtttttcctgcgcccggagacggcgcttgccgatccgcagtttgtcgcctggcttggtgatgaaacgaagaaaaaaagcatgtttgactcaaagcgcgcggcagtcgccttgaaatggaaaggaattgagctatgcggcgtttcctttgatttattgctggccgcctatttgcttgatccggcgcaaggtgttgatgatgtggctgccgcagcaaaaatgaagcaatacgaagcggtgcgctcggatgaagcggtgtatggcaaaggggcgaagcgggccgtgccggatgagccagtgctcgccgagcatctcgtccgcaaggcggcggcgatttgggcgctcgaacgtccgtttttggatgagctgcgccgcaacgaacaagatcggttgctcgtcgagctcgagcagccgttgtcttcgattttggcggaaatggaatttgccggagtgaaagtggatacgaagcggctcgaacagatgggcgaagagctcgccgagcagctgcgcacggtcgagcagcgcatttatgagctcgccggccaagaattcaacatcaattcaccgaaacagctcggcgtcattttatttgaaaaactgcagctgcccgtcttgaaaaaaacgaaaaccggctactccacttcggcggatgtgcttgaaaaacttgcgccttatcacgagatcgtggaaaacattttgcattaccgccagcttggcaagttgcagtcgacgtatattgaaggattgctgaaagtcgtgcgacccgatacaaagaaggtgcatacgattttcaatcaggcgttgacgcaaaccggacggctcagctcgacggagccgaacttgcaaaacattccgattcggcttgaggaaggacggaaaatccgccaagcgttcgtgccgtcggagtctgattggctcattttcgctgccgactactcgcaaattgagttgcgcgtcctcgcccatattgcggaagatgacaatttaatggaagcgttccgccgcgatttggatatccatacgaaaacagcgatggacattttccaagtgagcgaggacgaagtgacgcccaacatgcgccgtaatgcgaaggcggtcaactttgggatcgtttacgggatcagtgattacggcttggcgcaaaacttaaatatttcacgcaaagaggccgctgaattcatcgagcgctacttcgaaagcttccctggcgtgaagcggtatatggaaaacattgtgcaagaagcaaaacagaaagggtatgtgacgacgctgctgcatcggcgccgctatttgccggatatcacgagccgcaacttcaacgtccgcagctttgctgaacggatggcgatgaacacgccgattcaagggagcgccgctgacattattaaaaaggcgatgatcgatctgaacgctagactgaaggaagagcggctgcaagcgcgccttttgctacaggtgcatgacgagctcattttggaggcgccgaaagaagagatggagcggctgtgccggctcgttccggaagtgatggagcaagcggtcacacttcgcgtgccgctcaaagtcgattaccattatggctcgacgtggtatgacgcgaaataaaaaggatcc

SEQ ID NO: 2727 - DNA, 2605 bp, Artificial Sequence
  Description of Artificial Sequence: Synthetic DNA sequence of Thermus Rt41A DNA Polymerase R759A
atgaaatacctgctgccgaccgctgctgctggtctgctgctcctcgctgcccagccggcgatggccatggatatcggaattaattcggatccgaattccccactttttgacctggaggaaccccccaagcgggtgcttctggtggacggccaccacctggcctaccgcaccttctacgccctgagcctcaccacctcccggggggagccggtgcagatggtctacggcttcgcccggagcctcctcaaggccttgaaggaggacgggcaggcggtggtcgtggtctttgacgccaaggccccctccttccgccacgaggcctacgaggcctacaaggcgggccgggcccccaccccggaggacttcccccgccagctcgccttggtcaagcggctggtggaccttctgggcctggtccgcctcgaggccccgggttacgaggcggacgacgtcctgggcaccctggccaagaaggccgaaagggaggggatggaggtgcgcatcctcacgggagaccgggacttcttccagctcctctccgagaaggtctcggtcctcctgccggacgggaccctggtcaccccaaaggacgtccaggagaagtacggggtgccgccggagcgctgggtggacttccgcgccctcacgggggaccgctcggacaacatccccggggtggcggggataggggagaagaccgcccttcgactcctcgcggagtgggggagcgtggagaacctcctgaagaacctggaccgggtgaagccggactcggtccggcgcaagatagaggcgcaccttgaggacctccgcctctccttggacctggcccgcatccgcaccgacctccccttggaggtggactttaaggccctgcgccgcaggacccccgacctggagggcctgagggcctttttggaggagctggagttcggaagcctccttcatgagttcggcctcctgggaggggagaagccccgggaggaggccccctggcccccgcccgaaggggccttcgtaggcttcctcctctcccgcaaggagcccatgtgggcggagcttctggccctggcggccgccgcagagggccgggtccaccgggcaacaagcccggttgaggccctggccgacctcaaggaggcccgggggttcctggccaaggacctggccgttttggccctgcgggagggggtggccctggaccccacggacgaccccctcctggtggcctacctcctggacccggccaacaccaaccccgagggggtggcccggcgctacgggggcgagttcacggaggacgcagcggagagggccctcctctccgagaggctcttccagaacctctttccccggctttccgagaagctcctctggctctaccaggaggtggagcggcccctctcccgggtcttggcccacatggaggcccggggggtgaggctggacgtcccccttctggaggccctctcctttgagctggagaaggagatggagcgcctggagggggaggtcttccgcttggccggccaccccttcaacctcaactcccgcgaccagctggaaagggtcctctttgacgagctgggccttaccccggtgggtcggacggagaagacgggcaagcgctccaccgcccagggggccctggaggccctccggggggcccaccccatcgtggagctcatcctccagtaccgggagctttccaagctcaaaagcacctacctggaccccctgccccggctcgtccacccgcggacgggccggcttcacacccgcttcaaccagacggccacggccacgggaaggctttccagctccgaccccaacctgcagaacatccccgtgcgcacccccttggggcagcgcatccgcaaggccttcgtggccgaggaggggtggctccttttggcggcggactactcccagatcgagcttcgggtcctggcccacctctcgggggacgagaacctgaagcgggtcttccgggaggggaaggacatccataccgaaaccgccgcctggatgttcggcttagaccccgctctagtggatccaaagatgcgccgggcggccaagacggtcaacttcggcgtcctctacgggatgtccgcccacaggctctcccaggagctcggcatagactacaaggaggcggaggcctttattgagcgctacttccagagcttccccaaggtgcgggcctggatagaaaggaccctggaggagggccggacgcggggctacgtggagaccctgttcggcaggagggcttatgtgcccgacctggcctcccgggtccgctcggtgcgggaggcggcggagcggatggccttcaacatgcccgtgcagggcaccgccgccgacctgatgaagatcgccatggtcaagctcttccccaggctaaagcccctgggggcccacctcctcctccaggtgcacgacgagctggtcctggaggtgcccgaggaccgggccgaggaggccaaggccctggtcaaggaggtcatggagaacacctaccccttggacgtgcccctcgaggtggaggtgggcgtgggtcgggactggctggaggcgaagggggattgaagcggtcgac

SEQ ID NO: 2728 - DNA, 2605 bp, Artificial Sequence
  Description of Artificial Sequence: Synthetic DNA sequence of Thermus Rt41A DNA Polymerase R759C
atgaaatacctgctgccgaccgctgctgctggtctgctgctcctcgctgcccagccggcgatggccatggatatcggaattaattcggatccgaattccccactttttgacctggaggaaccccccaagcgggtgcttctggtggacggccaccacctggcctaccgcaccttctacgccctgagcctcaccacctcccggggggagccggtgcagatggtctacggcttcgcccggagcctcctcaaggccttgaaggaggacgggcaggcggtggtcgtggtctttgacgccaaggccccctccttccgccacgaggcctacgaggcctacaaggcgggccgggcccccaccccggaggacttcccccgccagctcgccttggtcaagcggctggtggaccttctgggcctggtccgcctcgaggccccgggttacgaggcggacgacgtcctgggcaccctggccaagaaggccgaaagggaggggatggaggtgcgcatcctcacgggagaccgggacttcttccagctcctctccgagaaggtctcggtcctcctgccggacgggaccctggtcaccccaaaggacgtccaggagaagtacggggtgccgccggagcgctgggtggacttccgcgccctcacgggggaccgctcggacaacatccccggggtggcggggataggggagaagaccgcccttcgactcctcgcggagtgggggagcgtggagaacctcctgaagaacctggaccgggtgaagccggactcggtccggcgcaagatagaggcgcaccttgaggacctccgcctctccttggacctggcccgcatccgcaccgacctccccttggaggtggactttaaggccctgcgccgcaggacccccgacctggagggcctgagggcctttttggaggagctggagttcggaagcctccttcatgagttcggcctcctgggaggggagaagccccgggaggaggccccctggcccccgcccgaaggggccttcgtaggcttcctcctctcccgcaaggagcccatgtgggcggagcttctggccctggcggccgccgcagagggccgggtccaccgggcaacaagcccggttgaggccctggccgacctcaaggaggcccgggggttcctggccaaggacctggccgttttggccctgcgggagggggtggccctggaccccacggacgaccccctcctggtggcctacctcctggacccggccaacaccaaccccgagggggtggcccggcgctacgggggcgagttcacggaggacgcagcggagagggccctcctctccgagaggctcttccagaacctctttccccggctttccgagaagctcctctggctctaccaggaggtggagcggcccctctcccgggtcttggcccacatggaggcccggggggtgaggctggacgtcccccttctggaggccctctcctttgagctggagaaggagatggagcgcctggagggggaggtcttccgcttggccggccaccccttcaacctcaactcccgcgaccagctggaaagggtcctctttgacgagctgggccttaccccggtgggtcggacggagaagacgggcaagcgctccaccgcccagggggccctggaggccctccggggggcccaccccatcgtggagctcatcctccagtaccgggagctttccaagctcaaaagcacctacctggaccccctgccccggctcgtccacccgcggacgggccggcttcacacccgcttcaaccagacggccacggccacgggaaggctttccagctccgaccccaacctgcagaacatccccgtgcgcacccccttggggcagcgcatccgcaaggccttcgtggccgaggaggggtggctccttttggcggcggactactcccagatcgagcttcgggtcctggcccacctctcgggggacgagaacctgaagcgggtcttccgggaggggaaggacatccataccgaaaccgccgcctggatgttcggcttagaccccgctctagtggatccaaagatgcgccgggcggccaagacggtcaacttcggcgtcctctacgggatgtccgcccacaggctctcccaggagctcggcatagactacaaggaggcggaggcctttattgagcgctacttccagagcttccccaaggtgcgggcctggatagaaaggaccctggaggagggccggacgcggggctacgtggagaccctgttcggcaggaggtgttatgtgcccgacctggcctcccgggtccgctcggtgcgggaggcggcggagcggatggccttcaacatgcccgtgcagggcaccgccgccgacctgatgaagatcgccatggtcaagctcttccccaggctaaagcccctgggggcccacctcctcctccaggtgcacgacgagctggtcctggaggtgcccgaggaccgggccgaggaggccaaggccctggtcaaggaggtcatggagaacacctaccccttggacgtgcccctcgaggtggaggtgggcgtgggtcgggactggctggaggcgaagggggattgaagcggtcgac

SEQ ID NO: 2729 - DNA, 2605 bp, Artificial Sequence
  Description of Artificial Sequence: Synthetic DNA sequence of Thermus Rt41A DNA Polymerase R759G
atgaaatacctgctgccgaccgctgctgctggtctgctgctcctcgctgcccagccggcgatggccatggatatcggaattaattcggatccgaattccccactttttgacctggaggaaccccccaagcgggtgcttctggtggacggccaccacctggcctaccgcaccttctacgccctgagcctcaccacctcccggggggagccggtgcagatggtctacggcttcgcccggagcctcctcaaggccttgaaggaggacgggcaggcggtggtcgtggtctttgacgccaaggccccctccttccgccacgaggcctacgaggcctacaaggcgggccgggcccccaccccggaggacttcccccgccagctcgccttggtcaagcggctggtggaccttctgggcctggtccgcctcgaggccccgggttacgaggcggacgacgtcctgggcaccctggccaagaaggccgaaagggaggggatggaggtgcgcatcctcacgggagaccgggacttcttccagctcctctccgagaaggtctcggtcctcctgccggacgggaccctggtcaccccaaaggacgtccaggagaagtacggggtgccgccggagcgctgggtggacttccgcgccctcacgggggaccgctcggacaacatccccggggtggcggggataggggagaagaccgcccttcgactcctcgcggagtgggggagcgtggagaacctcctgaagaacctggaccgggtgaagccggactcggtccggcgcaagatagaggcgcaccttgaggacctccgcctctccttggacctggcccgcatccgcaccgacctccccttggaggtggactttaaggccctgcgccgcaggacccccgacctggagggcctgagggcctttttggaggagctggagttcggaagcctccttcatgagttcggcctcctgggaggggagaagccccgggaggaggccccctggcccccgcccgaaggggccttcgtaggcttcctcctctcccgcaaggagcccatgtgggcggagcttctggccctggcggccgccgcagagggccgggtccaccgggcaacaagcccggttgaggccctggccgacctcaaggaggcccgggggttcctggccaaggacctggccgttttggccctgcgggagggggtggccctggaccccacggacgaccccctcctggtggcctacctcctggacccggccaacaccaaccccgagggggtggcccggcgctacgggggcgagttcacggaggacgcagcggagagggccctcctctccgagaggctcttccagaacctctttccccggctttccgagaagctcctctggctctaccaggaggtggagcggcccctctcccgggtcttggcccacatggaggcccggggggtgaggctggacgtcccccttctggaggccctctcctttgagctggagaaggagatggagcgcctggagggggaggtcttccgcttggccggccaccccttcaacctcaactcccgcgaccagctggaaagggtcctctttgacgagctgggccttaccccggtgggtcggacggagaagacgggcaagcgctccaccgcccagggggccctggaggccctccggggggcccaccccatcgtggagctcatcctccagtaccgggagctttccaagctcaaaagcacctacctggaccccctgccccggctcgtccacccgcggacgggccggcttcacacccgcttcaaccagacggccacggccacgggaaggctttccagctccgaccccaacctgcagaacatccccgtgcgcacccccttggggcagcgcatccgcaaggccttcgtggccgaggaggggtggctccttttggcggcggactactcccagatcgagcttcgggtcctggcccacctctcgggggacgagaacctgaagcgggtcttccgggaggggaaggacatccataccgaaaccgccgcctggatgttcggcttagaccccgctctagtggatccaaagatgcgccgggcggccaagacggtcaacttcggcgtcctctacgggatgtccgcccacaggctctcccaggagctcggcatagactacaaggaggcggaggcctttattgagcgctacttccagagcttccccaaggtgcgggcctggatagaaaggaccctggaggagggccggacgcggggctacgtggagaccctgttcggcaggaggggttatgtgcccgacctggcctcccgggtccgctcggtgcgggaggcggcggagcggatggccttcaacatgcccgtgcagggcaccgccgccgacctgatgaagatcgccatggtcaagctcttccccaggctaaagcccctgggggcccacctcctcctccaggtgcacgacgagctggtcctggaggtgcccgaggaccgggccgaggaggccaaggccctggtcaaggaggtcatggagaacacctaccccttggacgtgcccctcgaggtggaggtgggcgtgggtcgggactggctggaggcgaagggggattgaagcggtcgac

SEQ ID NO: 2730 - DNA, 2605 bp, Artificial Sequence
  Description of Artificial Sequence: Synthetic DNA sequence of Thermus Rt41A DNA Polymerase R759Q
atgaaatacctgctgccgaccgctgctgctggtctgctgctcctcgctgcccagccggcgatggccatggatatcggaattaattcggatccgaattccccactttttgacctggaggaaccccccaagcgggtgcttctggtggacggccaccacctggcctaccgcaccttctacgccctgagcctcaccacctcccggggggagccggtgcagatggtctacggcttcgcccggagcctcctcaaggccttgaaggaggacgggcaggcggtggtcgtggtctttgacgccaaggccccctccttccgccacgaggcctacgaggcctacaaggcgggccgggcccccaccccggaggacttcccccgccagctcgccttggtcaagcggctggtggaccttctgggcctggtccgcctcgaggccccgggttacgaggcggacgacgtcctgggcaccctggccaagaaggccgaaagggaggggatggaggtgcgcatcctcacgggagaccgggacttcttccagctcctctccgagaaggtctcggtcctcctgccggacgggaccctggtcaccccaaaggacgtccaggagaagtacggggtgccgccggagcgctgggtggacttccgcgccctcacgggggaccgctcggacaacatccccggggtggcggggataggggagaagaccgcccttcgactcctcgcggagtgggggagcgtggagaacctcctgaagaacctggaccgggtgaagccggactcggtccggcgcaagatagaggcgcaccttgaggacctccgcctctccttggacctggcccgcatccgcaccgacctccccttggaggtggactttaaggccctgcgccgcaggacccccgacctggagggcctgagggcctttttggaggagctggagttcggaagcctccttcatgagttcggcctcctgggaggggagaagccccgggaggaggccccctggcccccgcccgaaggggccttcgtaggcttcctcctctcccgcaaggagcccatgtgggcggagcttctggccctggcggccgccgcagagggccgggtccaccgggcaacaagcccggttgaggccctggccgacctcaaggaggcccgggggttcctggccaaggacctggccgttttggccctgcgggagggggtggccctggaccccacggacgaccccctcctggtggcctacctcctggacccggccaacaccaaccccgagggggtggcccggcgctacgggggcgagttcacggaggacgcagcggagagggccctcctctccgagaggctcttccagaacctctttccccggctttccgagaagctcctctggctctaccaggaggtggagcggcccctctcccgggtcttggcccacatggaggcccggggggtgaggctggacgtcccccttctggaggccctctcctttgagctggagaaggagatggagcgcctggagggggaggtcttccgcttggccggccaccccttcaacctcaactcccgcgaccagctggaaagggtcctctttgacgagctgggccttaccccggtgggtcggacggagaagacgggcaagcgctccaccgcccagggggccctggaggccctccggggggcccaccccatcgtggagctcatcctccagtaccgggagctttccaagctcaaaagcacctacctggaccccctgccccggctcgtccacccgcggacgggccggcttcacacccgcttcaaccagacggccacggccacgggaaggctttccagctccgaccccaacctgcagaacatccccgtgcgcacccccttggggcagcgcatccgcaaggccttcgtggccgaggaggggtggctccttttggcggcggactactcccagatcgagcttcgggtcctggcccacctctcgggggacgagaacctgaagcgggtcttccgggaggggaaggacatccataccgaaaccgccgcctggatgttcggcttagaccccgctctagtggatccaaagatgcgccgggcggccaagacggtcaacttcggcgtcctctacgggatgtccgcccacaggctctcccaggagctcggcatagactacaaggaggcggaggcctttattgagcgctacttccagagcttccccaaggtgcgggcctggatagaaaggaccctggaggagggccggacgcggggctacgtggagaccctgttcggcaggaggcaatatgtgcccgacctggcctcccgggtccgctcggtgcgggaggcggcggagcggatggccttcaacatgcccgtgcagggcaccgccgccgacctgatgaagatcgccatggtcaagctcttccccaggctaaagcccctgggggcccacctcctcctccaggtgcacgacgagctggtcctggaggtgcccgaggaccgggccgaggaggccaaggccctggtcaaggaggtcatggagaacacctaccccttggacgtgcccctcgaggtggaggtgggcgtgggtcgggactggctggaggcgaagggggattgaagcggtcgac

SEQ ID NO: 2731 - DNA, 2605 bp, Artificial Sequence
  Description of Artificial Sequence: Synthetic DNA sequence of Thermus Rt41A DNA Polymerase R759H
atgaaatacctgctgccgaccgctgctgctggtctgctgctcctcgctgcccagccggcgatggccatggatatcggaattaattcggatccgaattccccactttttgacctggaggaaccccccaagcgggtgcttctggtggacggccaccacctggcctaccgcaccttctacgccctgagcctcaccacctcccggggggagccggtgcagatggtctacggcttcgcccggagcctcctcaaggccttgaaggaggacgggcaggcggtggtcgtggtctttgacgccaaggccccctccttccgccacgaggcctacgaggcctacaaggcgggccgggcccccaccccggaggacttcccccgccagctcgccttggtcaagcggctggtggaccttctgggcctggtccgcctcgaggccccgggttacgaggcggacgacgtcctgggcaccctggccaagaaggccgaaagggaggggatggaggtgcgcatcctcacgggagaccgggacttcttccagctcctctccgagaaggtctcggtcctcctgccggacgggaccctggtcaccccaaaggacgtccaggagaagtacggggtgccgccggagcgctgggtggacttccgcgccctcacgggggaccgctcggacaacatccccggggtggcggggataggggagaagaccgcccttcgactcctcgcggagtgggggagcgtggagaacctcctgaagaacctggaccgggtgaagccggactcggtccggcgcaagatagaggcgcaccttgaggacctccgcctctccttggacctggcccgcatccgcaccgacctccccttggaggtggactttaaggccctgcgccgcaggacccccgacctggagggcctgagggcctttttggaggagctggagttcggaagcctccttcatgagttcggcctcctgggaggggagaagccccgggaggaggccccctggcccccgcccgaaggggccttcgtaggcttcctcctctcccgcaaggagcccatgtgggcggagcttctggccctggcggccgccgcagagggccgggtccaccgggcaacaagcccggttgaggccctggccgacctcaaggaggcccgggggttcctggccaaggacctggccgttttggccctgcgggagggggtggccctggaccccacggacgaccccctcctggtggcctacctcctggacccggccaacaccaaccccgagggggtggcccggcgctacgggggcgagttcacggaggacgcagcggagagggccctcctctccgagaggctcttccagaacctctttccccggctttccgagaagctcctctggctctaccaggaggtggagcggcccctctcccgggtcttggcccacatggaggcccggggggtgaggctggacgtcccccttctggaggccctctcctttgagctggagaaggagatggagcgcctggagggggaggtcttccgcttggccggccaccccttcaacctcaactcccgcgaccagctggaaagggtcctctttgacgagctgggccttaccccggtgggtcggacggagaagacgggcaagcgctccaccgcccagggggccctggaggccctccggggggcccaccccatcgtggagctcatcctccagtaccgggagctttccaagctcaaaagcacctacctggaccccctgccccggctcgtccacccgcggacgggccggcttcacacccgcttcaaccagacggccacggccacgggaaggctttccagctccgaccccaacctgcagaacatccccgtgcgcacccccttggggcagcgcatccgcaaggccttcgtggccgaggaggggtggctccttttggcggcggactactcccagatcgagcttcgggtcctggcccacctctcgggggacgagaacctgaagcgggtcttccgggaggggaaggacatccataccgaaaccgccgcctggatgttcggcttagaccccgctctagtggatccaaagatgcgccgggcggccaagacggtcaacttcggcgtcctctacgggatgtccgcccacaggctctcccaggagctcggcatagactacaaggaggcggaggcctttattgagcgctacttccagagcttccccaaggtgcgggcctggatagaaaggaccctggaggagggccggacgcggggctacgtggagaccctgttcggcaggaggcattatgtgcccgacctggcctcccgggtccgctcggtgcgggaggcggcggagcggatggccttcaacatgcccgtgcagggcaccgccgccgacctgatgaagatcgccatggtcaagctcttccccaggctaaagcccctgggggcccacctcctcctccaggtgcacgacgagctggtcctggaggtgcccgaggaccgggccgaggaggccaaggccctggtcaaggaggtcatggagaacacctaccccttggacgtgcccctcgaggtggaggtgggcgtgggtcgggactggctggaggcgaagggggattgaagcggtcgac

SEQ ID NO: 2732 - DNA, 2605 bp, Artificial Sequence
  Description of Artificial Sequence: Synthetic DNA sequence of Thermus Rt41A DNA Polymerase R759I
atgaaatacctgctgccgaccgctgctgctggtctgctgctcctcgctgcccagccggcgatggccatggatatcggaattaattcggatccgaattccccactttttgacctggaggaaccccccaagcgggtgcttctggtggacggccaccacctggcctaccgcaccttctacgccctgagcctcaccacctcccggggggagccggtgcagatggtctacggcttcgcccggagcctcctcaaggccttgaaggaggacgggcaggcggtggtcgtggtctttgacgccaaggccccctccttccgccacgaggcctacgaggcctacaaggcgggccgggcccccaccccggaggacttcccccgccagctcgccttggtcaagcggctggtggaccttctgggcctggtccgcctcgaggccccgggttacgaggcggacgacgtcctgggcaccctggccaagaaggccgaaagggaggggatggaggtgcgcatcctcacgggagaccgggacttcttccagctcctctccgagaaggtctcggtcctcctgccggacgggaccctggtcaccccaaaggacgtccaggagaagtacggggtgccgccggagcgctgggtggacttccgcgccctcacgggggaccgctcggacaacatccccggggtggcggggataggggagaagaccgcccttcgactcctcgcggagtgggggagcgtggagaacctcctgaagaacctggaccgggtgaagccggactcggtccggcgcaagatagaggcgcaccttgaggacctccgcctctccttggacctggcccgcatccgcaccgacctccccttggaggtggactttaaggccctgcgccgcaggacccccgacctggagggcctgagggcctttttggaggagctggagttcggaagcctccttcatgagttcggcctcctgggaggggagaagccccgggaggaggccccctggcccccgcccgaaggggccttcgtaggcttcctcctctcccgcaaggagcccatgtgggcggagcttctggccctggcggccgccgcagagggccgggtccaccgggcaacaagcccggttgaggccctggccgacctcaaggaggcccgggggttcctggccaaggacctggccgttttggccctgcgggagggggtggccctggaccccacggacgaccccctcctggtggcctacctcctggacccggccaacaccaaccccgagggggtggcccggcgctacgggggcgagttcacggaggacgcagcggagagggccctcctctccgagaggctcttccagaacctctttccccggctttccgagaagctcctctggctctaccaggaggtggagcggcccctctcccgggtcttggcccacatggaggcccggggggtgaggctggacgtcccccttctggaggccctctcctttgagctggagaaggagatggagcgcctggagggggaggtcttccgcttggccggccaccccttcaacctcaactcccgcgaccagctggaaagggtcctctttgacgagctgggccttaccccggtgggtcggacggagaagacgggcaagcgctccaccgcccagggggccctggaggccctccggggggcccaccccatcgtggagctcatcctccagtaccgggagctttccaagctcaaaagcacctacctggaccccctgccccggctcgtccacccgcggacgggccggcttcacacccgcttcaaccagacggccacggccacgggaaggctttccagctccgaccccaacctgcagaacatccccgtgcgcacccccttggggcagcgcatccgcaaggccttcgtggccgaggaggggtggctccttttggcggcggactactcccagatcgagcttcgggtcctggcccacctctcgggggacgagaacctgaagcgggtcttccgggaggggaaggacatccataccgaaaccgccgcctggatgttcggcttagaccccgctctagtggatccaaagatgcgccgggcggccaagacggtcaacttcggcgtcctctacgggatgtccgcccacaggctctcccaggagctcggcatagactacaaggaggcggaggcctttattgagcgctacttccagagcttccccaaggtgcgggcctggatagaaaggaccctggaggagggccggacgcggggctacgtggagaccctgttcggcaggaggatttatgtgcccgacctggcctcccgggtccgctcggtgcgggaggcggcggagcggatggccttcaacatgcccgtgcagggcaccgccgccgacctgatgaagatcgccatggtcaagctcttccccaggctaaagcccctgggggcccacctcctcctccaggtgcacgacgagctggtcctggaggtgcccgaggaccgggccgaggaggccaaggccctggtcaaggaggtcatggagaacacctaccccttggacgtgcccctcgaggtggaggtgggcgtgggtcgggactggctggaggcgaagggggattgaagcggtcgac

SEQ ID NO: 2733 - DNA, 2605 bp, Artificial Sequence
  Description of Artificial Sequence: Synthetic DNA sequence of Thermus Rt41A DNA Polymerase R759L
atgaaatacctgctgccgaccgctgctgctggtctgctgctcctcgctgcccagccggcgatggccatggatatcggaattaattcggatccgaattccccactttttgacctggaggaaccccccaagcgggtgcttctggtggacggccaccacctggcctaccgcaccttctacgccctgagcctcaccacctcccggggggagccggtgcagatggtctacggcttcgcccggagcctcctcaaggccttgaaggaggacgggcaggcggtggtcgtggtctttgacgccaaggccccctccttccgccacgaggcctacgaggcctacaaggcgggccgggcccccaccccggaggacttcccccgccagctcgccttggtcaagcggctggtggaccttctgggcctggtccgcctcgaggccccgggttacgaggcggacgacgtcctgggcaccctggccaagaaggccgaaagggaggggatggaggtgcgcatcctcacgggagaccgggacttcttccagctcctctccgagaaggtctcggtcctcctgccggacgggaccctggtcaccccaaaggacgtccaggagaagtacggggtgccgccggagcgctgggtggacttccgcgccctcacgggggaccgctcggacaacatccccggggtggcggggataggggagaagaccgcccttcgactcctcgcggagtgggggagcgtggagaacctcctgaagaacctggaccgggtgaagccggactcggtccggcgcaagatagaggcgcaccttgaggacctccgcctctccttggacctggcccgcatccgcaccgacctccccttggaggtggactttaaggccctgcgccgcaggacccccgacctggagggcctgagggcctttttggaggagctggagttcggaagcctccttcatgagttcggcctcctgggaggggagaagccccgggaggaggccccctggcccccgcccgaaggggccttcgtaggcttcctcctctcccgcaaggagcccatgtgggcggagcttctggccctggcggccgccgcagagggccgggtccaccgggcaacaagcccggttgaggccctggccgacctcaaggaggcccgggggttcctggccaaggacctggccgttttggccctgcgggagggggtggccctggaccccacggacgaccccctcctggtggcctacctcctggacccggccaacaccaaccccgagggggtggcccggcgctacgggggcgagttcacggaggacgcagcggagagggccctcctctccgagaggctcttccagaacctctttccccggctttccgagaagctcctctggctctaccaggaggtggagcggcccctctcccgggtcttggcccacatggaggcccggggggtgaggctggacgtcccccttctggaggccctctcctttgagctggagaaggagatggagcgcctggagggggaggtcttccgcttggccggccaccccttcaacctcaactcccgcgaccagctggaaagggtcctctttgacgagctgggccttaccccggtgggtcggacggagaagacgggcaagcgctccaccgcccagggggccctggaggccctccggggggcccaccccatcgtggagctcatcctccagtaccgggagctttccaagctcaaaagcacctacctggaccccctgccccggctcgtccacccgcggacgggccggcttcacacccgcttcaaccagacggccacggccacgggaaggctttccagctccgaccccaacctgcagaacatccccgtgcgcacccccttggggcagcgcatccgcaaggccttcgtggccgaggaggggtggctccttttggcggcggactactcccagatcgagcttcgggtcctggcccacctctcgggggacgagaacctgaagcgggtcttccgggaggggaaggacatccataccgaaaccgccgcctggatgttcggcttagaccccgctctagtggatccaaagatgcgccgggcggccaagacggtcaacttcggcgtcctctacgggatgtccgcccacaggctctcccaggagctcggcatagactacaaggaggcggaggcctttattgagcgctacttccagagcttccccaaggtgcgggcctggatagaaaggaccctggaggagggccggacgcggggctacgtggagaccctgttcggcaggaggttatatgtgcccgacctggcctcccgggtccgctcggtgcgggaggcggcggagcggatggccttcaacatgcccgtgcagggcaccgccgccgacctgatgaagatcgccatggtcaagctcttccccaggctaaagcccctgggggcccacctcctcctccaggtgcacgacgagctggtcctggaggtgcccgaggaccgggccgaggaggccaaggccctggtcaaggaggtcatggagaacacctaccccttggacgtgcccctcgaggtggaggtgggcgtgggtcgggactggctggaggcgaagggggattgaagcggtcgac

SEQ ID NO: 2734 - DNA, 2605 bp, Artificial Sequence
  Description of Artificial Sequence: Synthetic DNA sequence of Thermus Rt41A DNA Polymerase R759K
atgaaatacctgctgccgaccgctgctgctggtctgctgctcctcgctgcccagccggcgatggccatggatatcggaattaattcggatccgaattccccactttttgacctggaggaaccccccaagcgggtgcttctggtggacggccaccacctggcctaccgcaccttctacgccctgagcctcaccacctcccggggggagccggtgcagatggtctacggcttcgcccggagcctcctcaaggccttgaaggaggacgggcaggcggtggtcgtggtctttgacgccaaggccccctccttccgccacgaggcctacgaggcctacaaggcgggccgggcccccaccccggaggacttcccccgccagctcgccttggtcaagcggctggtggaccttctgggcctggtccgcctcgaggccccgggttacgaggcggacgacgtcctgggcaccctggccaagaaggccgaaagggaggggatggaggtgcgcatcctcacgggagaccgggacttcttccagctcctctccgagaaggtctcggtcctcctgccggacgggaccctggtcaccccaaaggacgtccaggagaagtacggggtgccgccggagcgctgggtggacttccgcgccctcacgggggaccgctcggacaacatccccggggtggcggggataggggagaagaccgcccttcgactcctcgcggagtgggggagcgtggagaacctcctgaagaacctggaccgggtgaagccggactcggtccggcgcaagatagaggcgcaccttgaggacctccgcctctccttggacctggcccgcatccgcaccgacctccccttggaggtggactttaaggccctgcgccgcaggacccccgacctggagggcctgagggcctttttggaggagctggagttcggaagcctccttcatgagttcggcctcctgggaggggagaagccccgggaggaggccccctggcccccgcccgaaggggccttcgtaggcttcctcctctcccgcaaggagcccatgtgggcggagcttctggccctggcggccgccgcagagggccgggtccaccgggcaacaagcccggttgaggccctggccgacctcaaggaggcccgggggttcctggccaaggacctggccgttttggccctgcgggagggggtggccctggaccccacggacgaccccctcctggtggcctacctcctggacccggccaacaccaaccccgagggggtggcccggcgctacgggggcgagttcacggaggacgcagcggagagggccctcctctccgagaggctcttccagaacctctttccccggctttccgagaagctcctctggctctaccaggaggtggagcggcccctctcccgggtcttggcccacatggaggcccggggggtgaggctggacgtcccccttctggaggccctctcctttgagctggagaaggagatggagcgcctggagggggaggtcttccgcttggccggccaccccttcaacctcaactcccgcgaccagctggaaagggtcctctttgacgagctgggccttaccccggtgggtcggacggagaagacgggcaagcgctccaccgcccagggggccctggaggccctccggggggcccaccccatcgtggagctcatcctccagtaccgggagctttccaagctcaaaagcacctacctggaccccctgccccggctcgtccacccgcggacgggccggcttcacacccgcttcaaccagacggccacggccacgggaaggctttccagctccgaccccaacctgcagaacatccccgtgcgcacccccttggggcagcgcatccgcaaggccttcgtggccgaggaggggtggctccttttggcggcggactactcccagatcgagcttcgggtcctggcccacctctcgggggacgagaacctgaagcgggtcttccgggaggggaaggacatccataccgaaaccgccgcctggatgttcggcttagaccccgctctagtggatccaaagatgcgccgggcggccaagacggtcaacttcggcgtcctctacgggatgtccgcccacaggctctcccaggagctcggcatagactacaaggaggcggaggcctttattgagcgctacttccagagcttccccaaggtgcgggcctggatagaaaggaccctggaggagggccggacgcggggctacgtggagaccctgttcggcaggaggaaatatgtgcccgacctggcctcccgggtccgctcggtgcgggaggcggcggagcggatggccttcaacatgcccgtgcagggcaccgccgccgacctgatgaagatcgccatggtcaagctcttccccaggctaaagcccctgggggcccacctcctcctccaggtgcacgacgagctggtcctggaggtgcccgaggaccgggccgaggaggccaaggccctggtcaaggaggtcatggagaacacctaccccttggacgtgcccctcgaggtggaggtgggcgtgggtcgggactggctggaggcgaagggggattgaagcggtcgac

SEQ ID NO: 2735 - DNA, 2605 bp, Artificial Sequence
  Description of Artificial Sequence: Synthetic DNA sequence of Thermus Rt41A DNA Polymerase R759E
atgaaatacctgctgccgaccgctgctgctggtctgctgctcctcgctgcccagccggcgatggccatggatatcggaattaattcggatccgaattccccactttttgacctggaggaaccccccaagcgggtgcttctggtggacggccaccacctggcctaccgcaccttctacgccctgagcctcaccacctcccggggggagccggtgcagatggtctacggcttcgcccggagcctcctcaaggccttgaaggaggacgggcaggcggtggtcgtggtctttgacgccaaggccccctccttccgccacgaggcctacgaggcctacaaggcgggccgggcccccaccccggaggacttcccccgccagctcgccttggtcaagcggctggtggaccttctgggcctggtccgcctcgaggccccgggttacgaggcggacgacgtcctgggcaccctggccaagaaggccgaaagggaggggatggaggtgcgcatcctcacgggagaccgggacttcttccagctcctctccgagaaggtctcggtcctcctgccggacgggaccctggtcaccccaaaggacgtccaggagaagtacggggtgccgccggagcgctgggtggacttccgcgccctcacgggggaccgctcggacaacatccccggggtggcggggataggggagaagaccgcccttcgactcctcgcggagtgggggagcgtggagaacctcctgaagaacctggaccgggtgaagccggactcggtccggcgcaagatagaggcgcaccttgaggacctccgcctctccttggacctggcccgcatccgcaccgacctccccttggaggtggactttaaggccctgcgccgcaggacccccgacctggagggcctgagggcctttttggaggagctggagttcggaagcctccttcatgagttcggcctcctgggaggggagaagccccgggaggaggccccctggcccccgcccgaaggggccttcgtaggcttcctcctctcccgcaaggagcccatgtgggcggagcttctggccctggcggccgccgcagagggccgggtccaccgggcaacaagcccggttgaggccctggccgacctcaaggaggcccgggggttcctggccaaggacctggccgttttggccctgcgggagggggtggccctggaccccacggacgaccccctcctggtggcctacctcctggacccggccaacaccaaccccgagggggtggcccggcgctacgggggcgagttcacggaggacgcagcggagagggccctcctctccgagaggctcttccagaacctctttccccggctttccgagaagctcctctggctctaccaggaggtggagcggcccctctcccgggtcttggcccacatggaggcccggggggtgaggctggacgtcccccttctggaggccctctcctttgagctggagaaggagatggagcgcctggagggggaggtcttccgcttggccggccaccccttcaacctcaactcccgcgaccagctggaaagggtcctctttgacgagctgggccttaccccggtgggtcggacggagaagacgggcaagcgctccaccgcccagggggccctggaggccctccggggggcccaccccatcgtggagctcatcctccagtaccgggagctttccaagctcaaaagcacctacctggaccccctgccccggctcgtccacccgcggacgggccggcttcacacccgcttcaaccagacggccacggccacgggaaggctttccagctccgaccccaacctgcagaacatccccgtgcgcacccccttggggcagcgcatccgcaaggccttcgtggccgaggaggggtggctccttttggcggcggactactcccagatcgagcttcgggtcctggcccacctctcgggggacgagaacctgaagcgggtcttccgggaggggaaggacatccataccgaaaccgccgcctggatgttcggcttagaccccgctctagtggatccaaagatgcgccgggcggccaagacggtcaacttcggcgtcctctacgggatgtccgcccacaggctctcccaggagctcggcatagactacaaggaggcggaggcctttattgagcgctacttccagagcttccccaaggtgcgggcctggatagaaaggaccctggaggagggccggacgcggggctacgtggagaccctgttcggcaggagggaatatgtgcccgacctggcctcccgggtccgctcggtgcgggaggcggcggagcggatggccttcaacatgcccgtgcagggcaccgccgccgacctgatgaagatcgccatggtcaagctcttccccaggctaaagcccctgggggcccacctcctcctccaggtgcacgacgagctggtcctggaggtgcccgaggaccgggccgaggaggccaaggccctggtcaaggaggtcatggagaacacctaccccttggacgtgcccctcgaggtggaggtgggcgtgggtcgggactggctggaggcgaagggggattgaagcggtcgac

SEQ ID NO: 2736 - DNA, 2605 bp, Artificial Sequence
  Description of Artificial Sequence: Synthetic DNA sequence of Thermus Rt41A DNA Polymerase R759D
atgaaatacctgctgccgaccgctgctgctggtctgctgctcctcgctgcccagccggcgatggccatggatatcggaattaattcggatccgaattccccactttttgacctggaggaaccccccaagcgggtgcttctggtggacggccaccacctggcctaccgcaccttctacgccctgagcctcaccacctcccggggggagccggtgcagatggtctacggcttcgcccggagcctcctcaaggccttgaaggaggacgggcaggcggtggtcgtggtctttgacgccaaggccccctccttccgccacgaggcctacgaggcctacaaggcgggccgggcccccaccccggaggacttcccccgccagctcgccttggtcaagcggctggtggaccttctgggcctggtccgcctcgaggccccgggttacgaggcggacgacgtcctgggcaccctggccaagaaggccgaaagggaggggatggaggtgcgcatcctcacgggagaccgggacttcttccagctcctctccgagaaggtctcggtcctcctgccggacgggaccctggtcaccccaaaggacgtccaggagaagtacggggtgccgccggagcgctgggtggacttccgcgccctcacgggggaccgctcggacaacatccccggggtggcggggataggggagaagaccgcccttcgactcctcgcggagtgggggagcgtggagaacctcctgaagaacctggaccgggtgaagccggactcggtccggcgcaagatagaggcgcaccttgaggacctccgcctctccttggacctggcccgcatccgcaccgacctccccttggaggtggactttaaggccctgcgccgcaggacccccgacctggagggcctgagggcctttttggaggagctggagttcggaagcctccttcatgagttcggcctcctgggaggggagaagccccgggaggaggccccctggcccccgcccgaaggggccttcgtaggcttcctcctctcccgcaaggagcccatgtgggcggagcttctggccctggcggccgccgcagagggccgggtccaccgggcaacaagcccggttgaggccctggccgacctcaaggaggcccgggggttcctggccaaggacctggccgttttggccctgcgggagggggtggccctggaccccacggacgaccccctcctggtggcctacctcctggacccggccaacaccaaccccgagggggtggcccggcgctacgggggcgagttcacggaggacgcagcggagagggccctcctctccgagaggctcttccagaacctctttccccggctttccgagaagctcctctggctctaccaggaggtggagcggcccctctcccgggtcttggcccacatggaggcccggggggtgaggctggacgtcccccttctggaggccctctcctttgagctggagaaggagatggagcgcctggagggggaggtcttccgcttggccggccaccccttcaacctcaactcccgcgaccagctggaaagggtcctctttgacgagctgggccttaccccggtgggtcggacggagaagacgggcaagcgctccaccgcccagggggccctggaggccctccggggggcccaccccatcgtggagctcatcctccagtaccgggagctttccaagctcaaaagcacctacctggaccccctgccccggctcgtccacccgcggacgggccggcttcacacccgcttcaaccagacggccacggccacgggaaggctttccagctccgaccccaacctgcagaacatccccgtgcgcacccccttggggcagcgcatccgcaaggccttcgtggccgaggaggggtggctccttttggcggcggactactcccagatcgagcttcgggtcctggcccacctctcgggggacgagaacctgaagcgggtcttccgggaggggaaggacatccataccgaaaccgccgcctggatgttcggcttagaccccgctctagtggatccaaagatgcgccgggcggccaagacggtcaacttcggcgtcctctacgggatgtccgcccacaggctctcccaggagctcggcatagactacaaggaggcggaggcctttattgagcgctacttccagagcttccccaaggtgcgggcctggatagaaaggaccctggaggagggccggacgcggggctacgtggagaccctgttcggcaggagggattatgtgcccgacctggcctcccgggtccgctcggtgcgggaggcggcggagcggatggccttcaacatgcccgtgcagggcaccgccgccgacctgatgaagatcgccatggtcaagctcttccccaggctaaagcccctgggggcccacctcctcctccaggtgcacgacgagctggtcctggaggtgcccgaggaccgggccgaggaggccaaggccctggtcaaggaggtcatggagaacacctaccccttggacgtgcccctcgaggtggaggtgggcgtgggtcgggactggctggaggcgaagggggattgaagcggtcgac

SEQ ID NO: 2737 - DNA, 2605 bp, Artificial Sequence
  Description of Artificial Sequence: Synthetic DNA sequence of Thermus Rt41A DNA Polymerase R759F
atgaaatacctgctgccgaccgctgctgctggtctgctgctcctcgctgcccagccggcgatggccatggatatcggaattaattcggatccgaattccccactttttgacctggaggaaccccccaagcgggtgcttctggtggacggccaccacctggcctaccgcaccttctacgccctgagcctcaccacctcccggggggagccggtgcagatggtctacggcttcgcccggagcctcctcaaggccttgaaggaggacgggcaggcggtggtcgtggtctttgacgccaaggccccctccttccgccacgaggcctacgaggcctacaaggcgggccgggcccccaccccggaggacttcccccgccagctcgccttggtcaagcggctggtggaccttctgggcctggtccgcctcgaggccccgggttacgaggcggacgacgtcctgggcaccctggccaagaaggccgaaagggaggggatggaggtgcgcatcctcacgggagaccgggacttcttccagctcctctccgagaaggtctcggtcctcctgccggacgggaccctggtcaccccaaaggacgtccaggagaagtacggggtgccgccggagcgctgggtggacttccgcgccctcacgggggaccgctcggacaacatccccggggtggcggggataggggagaagaccgcccttcgactcctcgcggagtgggggagcgtggagaacctcctgaagaacctggaccgggtgaagccggactcggtccggcgcaagatagaggcgcaccttgaggacctccgcctctccttggacctggcccgcatccgcaccgacctccccttggaggtggactttaaggccctgcgccgcaggacccccgacctggagggcctgagggcctttttggaggagctggagttcggaagcctccttcatgagttcggcctcctgggaggggagaagccccgggaggaggccccctggcccccgcccgaaggggccttcgtaggcttcctcctctcccgcaaggagcccatgtgggcggagcttctggccctggcggccgccgcagagggccgggtccaccgggcaacaagcccggttgaggccctggccgacctcaaggaggcccgggggttcctggccaaggacctggccgttttggccctgcgggagggggtggccctggaccccacggacgaccccctcctggtggcctacctcctggacccggccaacaccaaccccgagggggtggcccggcgctacgggggcgagttcacggaggacgcagcggagagggccctcctctccgagaggctcttccagaacctctttccccggctttccgagaagctcctctggctctaccaggaggtggagcggcccctctcccgggtcttggcccacatggaggcccggggggtgaggctggacgtcccccttctggaggccctctcctttgagctggagaaggagatggagcgcctggagggggaggtcttccgcttggccggccaccccttcaacctcaactcccgcgaccagctggaaagggtcctctttgacgagctgggccttaccccggtgggtcggacggagaagacgggcaagcgctccaccgcccagggggccctggaggccctccggggggcccaccccatcgtggagctcatcctccagtaccgggagctttccaagctcaaaagcacctacctggaccccctgccccggctcgtccacccgcggacgggccggcttcacacccgcttcaaccagacggccacggccacgggaaggctttccagctccgaccccaacctgcagaacatccccgtgcgcacccccttggggcagcgcatccgcaaggccttcgtggccgaggaggggtggctccttttggcggcggactactcccagatcgagcttcgggtcctggcccacctctcgggggacgagaacctgaagcgggtcttccgggaggggaaggacatccataccgaaaccgccgcctggatgttcggcttagaccccgctctagtggatccaaagatgcgccgggcggccaagacggtcaacttcggcgtcctctacgggatgtccgcccacaggctctcccaggagctcggcatagactacaaggaggcggaggcctttattgagcgctacttccagagcttccccaaggtgcgggcctggatagaaaggaccctggaggagggccggacgcggggctacgtggagaccctgttcggcaggaggttttatgtgcccgacctggcctcccgggtccgctcggtgcgggaggcggcggagcggatggccttcaacatgcccgtgcagggcaccgccgccgacctgatgaagatcgccatggtcaagctcttccccaggctaaagcccctgggggcccacctcctcctccaggtgcacgacgagctggtcctggaggtgcccgaggaccgggccgaggaggccaaggccctggtcaaggaggtcatggagaacacctaccccttggacgtgcccctcgaggtggaggtgggcgtgggtcgggactggctggaggcgaagggggattgaagcggtcgac

SEQ ID NO: 2738 - DNA, 2605 bp, Artificial Sequence
  Description of Artificial Sequence: Synthetic DNA sequence of Thermus Rt41A DNA Polymerase R759S
atgaaatacctgctgccgaccgctgctgctggtctgctgctcctcgctgcccagccggcgatggccatggatatcggaattaattcggatccgaattccccactttttgacctggaggaaccccccaagcgggtgcttctggtggacggccaccacctggcctaccgcaccttctacgccctgagcctcaccacctcccggggggagccggtgcagatggtctacggcttcgcccggagcctcctcaaggccttgaaggaggacgggcaggcggtggtcgtggtctttgacgccaaggccccctccttccgccacgaggcctacgaggcctacaaggcgggccgggcccccaccccggaggacttcccccgccagctcgccttggtcaagcggctggtggaccttctgggcctggtccgcctcgaggccccgggttacgaggcggacgacgtcctgggcaccctggccaagaaggccgaaagggaggggatggaggtgcgcatcctcacgggagaccgggacttcttccagctcctctccgagaaggtctcggtcctcctgccggacgggaccctggtcaccccaaaggacgtccaggagaagtacggggtgccgccggagcgctgggtggacttccgcgccctcacgggggaccgctcggacaacatccccggggtggcggggataggggagaagaccgcccttcgactcctcgcggagtgggggagcgtggagaacctcctgaagaacctggaccgggtgaagccggactcggtccggcgcaagatagaggcgcaccttgaggacctccgcctctccttggacctggcccgcatccgcaccgacctccccttggaggtggactttaaggccctgcgccgcaggacccccgacctggagggcctgagggcctttttggaggagctggagttcggaagcctccttcatgagttcggcctcctgggaggggagaagccccgggaggaggccccctggcccccgcccgaaggggccttcgtaggcttcctcctctcccgcaaggagcccatgtgggcggagcttctggccctggcggccgccgcagagggccgggtccaccgggcaacaagcccggttgaggccctggccgacctcaaggaggcccgggggttcctggccaaggacctggccgttttggccctgcgggagggggtggccctggaccccacggacgaccccctcctggtggcctacctcctggacccggccaacaccaaccccgagggggtggcccggcgctacgggggcgagttcacggaggacgcagcggagagggccctcctctccgagaggctcttccagaacctctttccccggctttccgagaagctcctctggctctaccaggaggtggagcggcccctctcccgggtcttggcccacatggaggcccggggggtgaggctggacgtcccccttctggaggccctctcctttgagctggagaaggagatggagcgcctggagggggaggtcttccgcttggccggccaccccttcaacctcaactcccgcgaccagctggaaagggtcctctttgacgagctgggccttaccccggtgggtcggacggagaagacgggcaagcgctccaccgcccagggggccctggaggccctccggggggcccaccccatcgtggagctcatcctccagtaccgggagctttccaagctcaaaagcacctacctggaccccctgccccggctcgtccacccgcggacgggccggcttcacacccgcttcaaccagacggccacggccacgggaaggctttccagctccgaccccaacctgcagaacatccccgtgcgcacccccttggggcagcgcatccgcaaggccttcgtggccgaggaggggtggctccttttggcggcggactactcccagatcgagcttcgggtcctggcccacctctcgggggacgagaacctgaagcgggtcttccgggaggggaaggacatccataccgaaaccgccgcctggatgttcggcttagaccccgctctagtggatccaaagatgcgccgggcggccaagacggtcaacttcggcgtcctctacgggatgtccgcccacaggctctcccaggagctcggcatagactacaaggaggcggaggcctttattgagcgctacttccagagcttccccaaggtgcgggcctggatagaaaggaccctggaggagggccggacgcggggctacgtggagaccctgttcggcaggaggtcttatgtgcccgacctggcctcccgggtccgctcggtgcgggaggcggcggagcggatggccttcaacatgcccgtgcagggcaccgccgccgacctgatgaagatcgccatggtcaagctcttccccaggctaaagcccctgggggcccacctcctcctccaggtgcacgacgagctggtcctggaggtgcccgaggaccgggccgaggaggccaaggccctggtcaaggaggtcatggagaacacctaccccttggacgtgcccctcgaggtggaggtgggcgtgggtcgggactggctggaggcgaagggggattgaagcggtcgac

SEQ ID NO: 2739 - DNA, 2605 bp, Artificial Sequence
  Description of Artificial Sequence: Synthetic DNA sequence of Thermus Rt41A DNA Polymerase R759Y
atgaaatacctgctgccgaccgctgctgctggtctgctgctcctcgctgcccagccggcgatggccatggatatcggaattaattcggatccgaattccccactttttgacctggaggaaccccccaagcgggtgcttctggtggacggccaccacctggcctaccgcaccttctacgccctgagcctcaccacctcccggggggagccggtgcagatggtctacggcttcgcccggagcctcctcaaggccttgaaggaggacgggcaggcggtggtcgtggtctttgacgccaaggccccctccttccgccacgaggcctacgaggcctacaaggcgggccgggcccccaccccggaggacttcccccgccagctcgccttggtcaagcggctggtggaccttctgggcctggtccgcctcgaggccccgggttacgaggcggacgacgtcctgggcaccctggccaagaaggccgaaagggaggggatggaggtgcgcatcctcacgggagaccgggacttcttccagctcctctccgagaaggtctcggtcctcctgccggacgggaccctggtcaccccaaaggacgtccaggagaagtacggggtgccgccggagcgctgggtggacttccgcgccctcacgggggaccgctcggacaacatccccggggtggcggggataggggagaagaccgcccttcgactcctcgcggagtgggggagcgtggagaacctcctgaagaacctggaccgggtgaagccggactcggtccggcgcaagatagaggcgcaccttgaggacctccgcctctccttggacctggcccgcatccgcaccgacctccccttggaggtggactttaaggccctgcgccgcaggacccccgacctggagggcctgagggcctttttggaggagctggagttcggaagcctccttcatgagttcggcctcctgggaggggagaagccccgggaggaggccccctggcccccgcccgaaggggccttcgtaggcttcctcctctcccgcaaggagcccatgtgggcggagcttctggccctggcggccgccgcagagggccgggtccaccgggcaacaagcccggttgaggccctggccgacctcaaggaggcccgggggttcctggccaaggacctggccgttttggccctgcgggagggggtggccctggaccccacggacgaccccctcctggtggcctacctcctggacccggccaacaccaaccccgagggggtggcccggcgctacgggggcgagttcacggaggacgcagcggagagggccctcctctccgagaggctcttccagaacctctttccccggctttccgagaagctcctctggctctaccaggaggtggagcggcccctctcccgggtcttggcccacatggaggcccggggggtgaggctggacgtcccccttctggaggccctctcctttgagctggagaaggagatggagcgcctggagggggaggtcttccgcttggccggccaccccttcaacctcaactcccgcgaccagctggaaagggtcctctttgacgagctgggccttaccccggtgggtcggacggagaagacgggcaagcgctccaccgcccagggggccctggaggccctccggggggcccaccccatcgtggagctcatcctccagtaccgggagctttccaagctcaaaagcacctacctggaccccctgccccggctcgtccacccgcggacgggccggcttcacacccgcttcaaccagacggccacggccacgggaaggctttccagctccgaccccaacctgcagaacatccccgtgcgcacccccttggggcagcgcatccgcaaggccttcgtggccgaggaggggtggctccttttggcggcggactactcccagatcgagcttcgggtcctggcccacctctcgggggacgagaacctgaagcgggtcttccgggaggggaaggacatccataccgaaaccgccgcctggatgttcggcttagaccccgctctagtggatccaaagatgcgccgggcggccaagacggtcaacttcggcgtcctctacgggatgtccgcccacaggctctcccaggagctcggcatagactacaaggaggcggaggcctttattgagcgctacttccagagcttccccaaggtgcgggcctggatagaaaggaccctggaggagggccggacgcggggctacgtggagaccctgttcggcaggaggtattatgtgcccgacctggcctcccgggtccgctcggtgcgggaggcggcggagcggatggccttcaacatgcccgtgcagggcaccgccgccgacctgatgaagatcgccatggtcaagctcttccccaggctaaagcccctgggggcccacctcctcctccaggtgcacgacgagctggtcctggaggtgcccgaggaccgggccgaggaggccaaggccctggtcaaggaggtcatggagaacacctaccccttggacgtgcccctcgaggtggaggtgggcgtgggtcgggactggctggaggcgaagggggattgaagcggtcgac

SEQ ID NO: 2740 - DNA, 2605 bp, Artificial Sequence
  Description of Artificial Sequence: Synthetic DNA sequence of Thermus Rt41A DNA Polymerase R759W
atgaaatacctgctgccgaccgctgctgctggtctgctgctcctcgctgcccagccggcgatggccatggatatcggaattaattcggatccgaattccccactttttgacctggaggaaccccccaagcgggtgcttctggtggacggccaccacctggcctaccgcaccttctacgccctgagcctcaccacctcccggggggagccggtgcagatggtctacggcttcgcccggagcctcctcaaggccttgaaggaggacgggcaggcggtggtcgtggtctttgacgccaaggccccctccttccgccacgaggcctacgaggcctacaaggcgggccgggcccccaccccggaggacttcccccgccagctcgccttggtcaagcggctggtggaccttctgggcctggtccgcctcgaggccccgggttacgaggcggacgacgtcctgggcaccctggccaagaaggccgaaagggaggggatggaggtgcgcatcctcacgggagaccgggacttcttccagctcctctccgagaaggtctcggtcctcctgccggacgggaccctggtcaccccaaaggacgtccaggagaagtacggggtgccgccggagcgctgggtggacttccgcgccctcacgggggaccgctcggacaacatccccggggtggcggggataggggagaagaccgcccttcgactcctcgcggagtgggggagcgtggagaacctcctgaagaacctggaccgggtgaagccggactcggtccggcgcaagatagaggcgcaccttgaggacctccgcctctccttggacctggcccgcatccgcaccgacctccccttggaggtggactttaaggccctgcgccgcaggacccccgacctggagggcctgagggcctttttggaggagctggagttcggaagcctccttcatgagttcggcctcctgggaggggagaagccccgggaggaggccccctggcccccgcccgaaggggccttcgtaggcttcctcctctcccgcaaggagcccatgtgggcggagcttctggccctggcggccgccgcagagggccgggtccaccgggcaacaagcccggttgaggccctggccgacctcaaggaggcccgggggttcctggccaaggacctggccgttttggccctgcgggagggggtggccctggaccccacggacgaccccctcctggtggcctacctcctggacccggccaacaccaaccccgagggggtggcccggcgctacgggggcgagttcacggaggacgcagcggagagggccctcctctccgagaggctcttccagaacctctttccccggctttccgagaagctcctctggctctaccaggaggtggagcggcccctctcccgggtcttggcccacatggaggcccggggggtgaggctggacgtcccccttctggaggccctctcctttgagctggagaaggagatggagcgcctggagggggaggtcttccgcttggccggccaccccttcaacctcaactcccgcgaccagctggaaagggtcctctttgacgagctgggccttaccccggtgggtcggacggagaagacgggcaagcgctccaccgcccagggggccctggaggccctccggggggcccaccccatcgtggagctcatcctccagtaccgggagctttccaagctcaaaagcacctacctggaccccctgccccggctcgtccacccgcggacgggccggcttcacacccgcttcaaccagacggccacggccacgggaaggctttccagctccgaccccaacctgcagaacatccccgtgcgcacccccttggggcagcgcatccgcaaggccttcgtggccgaggaggggtggctccttttggcggcggactactcccagatcgagcttcgggtcctggcccacctctcgggggacgagaacctgaagcgggtcttccgggaggggaaggacatccataccgaaaccgccgcctggatgttcggcttagaccccgctctagtggatccaaagatgcgccgggcggccaagacggtcaacttcggcgtcctctacgggatgtccgcccacaggctctcccaggagctcggcatagactacaaggaggcggaggcctttattgagcgctacttccagagcttccccaaggtgcgggcctggatagaaaggaccctggaggagggccggacgcggggctacgtggagaccctgttcggcaggaggtggtatgtgcccgacctggcctcccgggtccgctcggtgcgggaggcggcggagcggatggccttcaacatgcccgtgcagggcaccgccgccgacctgatgaagatcgccatggtcaagctcttccccaggctaaagcccctgggggcccacctcctcctccaggtgcacgacgagctggtcctggaggtgcccgaggaccgggccgaggaggccaaggccctggtcaaggaggtcatggagaacacctaccccttggacgtgcccctcgaggtggaggtgggcgtgggtcgggactggctggaggcgaagggggattgaagcggtcgac

SEQ ID NO: 2741 - DNA, 2605 bp, Artificial Sequence
  Description of Artificial Sequence: Synthetic DNA sequence of Thermus Rt41A DNA Polymerase R759P
atgaaatacctgctgccgaccgctgctgctggtctgctgctcctcgctgcccagccggcgatggccatggatatcggaattaattcggatccgaattccccactttttgacctggaggaaccccccaagcgggtgcttctggtggacggccaccacctggcctaccgcaccttctacgccctgagcctcaccacctcccggggggagccggtgcagatggtctacggcttcgcccggagcctcctcaaggccttgaaggaggacgggcaggcggtggtcgtggtctttgacgccaaggccccctccttccgccacgaggcctacgaggcctacaaggcgggccgggcccccaccccggaggacttcccccgccagctcgccttggtcaagcggctggtggaccttctgggcctggtccgcctcgaggccccgggttacgaggcggacgacgtcctgggcaccctggccaagaaggccgaaagggaggggatggaggtgcgcatcctcacgggagaccgggacttcttccagctcctctccgagaaggtctcggtcctcctgccggacgggaccctggtcaccccaaaggacgtccaggagaagtacggggtgccgccggagcgctgggtggacttccgcgccctcacgggggaccgctcggacaacatccccggggtggcggggataggggagaagaccgcccttcgactcctcgcggagtgggggagcgtggagaacctcctgaagaacctggaccgggtgaagccggactcggtccggcgcaagatagaggcgcaccttgaggacctccgcctctccttggacctggcccgcatccgcaccgacctccccttggaggtggactttaaggccctgcgccgcaggacccccgacctggagggcctgagggcctttttggaggagctggagttcggaagcctccttcatgagttcggcctcctgggaggggagaagccccgggaggaggccccctggcccccgcccgaaggggccttcgtaggcttcctcctctcccgcaaggagcccatgtgggcggagcttctggccctggcggccgccgcagagggccgggtccaccgggcaacaagcccggttgaggccctggccgacctcaaggaggcccgggggttcctggccaaggacctggccgttttggccctgcgggagggggtggccctggaccccacggacgaccccctcctggtggcctacctcctggacccggccaacaccaaccccgagggggtggcccggcgctacgggggcgagttcacggaggacgcagcggagagggccctcctctccgagaggctcttccagaacctctttccccggctttccgagaagctcctctggctctaccaggaggtggagcggcccctctcccgggtcttggcccacatggaggcccggggggtgaggctggacgtcccccttctggaggccctctcctttgagctggagaaggagatggagcgcctggagggggaggtcttccgcttggccggccaccccttcaacctcaactcccgcgaccagctggaaagggtcctctttgacgagctgggccttaccccggtgggtcggacggagaagacgggcaagcgctccaccgcccagggggccctggaggccctccggggggcccaccccatcgtggagctcatcctccagtaccgggagctttccaagctcaaaagcacctacctggaccccctgccccggctcgtccacccgcggacgggccggcttcacacccgcttcaaccagacggccacggccacgggaaggctttccagctccgaccccaacctgcagaacatccccgtgcgcacccccttggggcagcgcatccgcaaggccttcgtggccgaggaggggtggctccttttggcggcggactactcccagatcgagcttcgggtcctggcccacctctcgggggacgagaacctgaagcgggtcttccgggaggggaaggacatccataccgaaaccgccgcctggatgttcggcttagaccccgctctagtggatccaaagatgcgccgggcggccaagacggtcaacttcggcgtcctctacgggatgtccgcccacaggctctcccaggagctcggcatagactacaaggaggcggaggcctttattgagcgctacttccagagcttccccaaggtgcgggcctggatagaaaggaccctggaggagggccggacgcggggctacgtggagaccctgttcggcaggaggccttatgtgcccgacctggcctcccgggtccgctcggtgcgggaggcggcggagcggatggccttcaacatgcccgtgcagggcaccgccgccgacctgatgaagatcgccatggtcaagctcttccccaggctaaagcccctgggggcccacctcctcctccaggtgcacgacgagctggtcctggaggtgcccgaggaccgggccgaggaggccaaggccctggtcaaggaggtcatggagaacacctaccccttggacgtgcccctcgaggtggaggtgggcgtgggtcgggactggctggaggcgaagggggattgaagcggtcgac

SEQ ID NO: 2742 - DNA, 2605 bp, Artificial Sequence
  Description of Artificial Sequence: Synthetic DNA sequence of Thermus Rt41A DNA Polymerase R759M
atgaaatacctgctgccgaccgctgctgctggtctgctgctcctcgctgcccagccggcgatggccatggatatcggaattaattcggatccgaattccccactttttgacctggaggaaccccccaagcgggtgcttctggtggacggccaccacctggcctaccgcaccttctacgccctgagcctcaccacctcccggggggagccggtgcagatggtctacggcttcgcccggagcctcctcaaggccttgaaggaggacgggcaggcggtggtcgtggtctttgacgccaaggccccctccttccgccacgaggcctacgaggcctacaaggcgggccgggcccccaccccggaggacttcccccgccagctcgccttggtcaagcggctggtggaccttctgggcctggtccgcctcgaggccccgggttacgaggcggacgacgtcctgggcaccctggccaagaaggccgaaagggaggggatggaggtgcgcatcctcacgggagaccgggacttcttccagctcctctccgagaaggtctcggtcctcctgccggacgggaccctggtcaccccaaaggacgtccaggagaagtacggggtgccgccggagcgctgggtggacttccgcgccctcacgggggaccgctcggacaacatccccggggtggcggggataggggagaagaccgcccttcgactcctcgcggagtgggggagcgtggagaacctcctgaagaacctggaccgggtgaagccggactcggtccggcgcaagatagaggcgcaccttgaggacctccgcctctccttggacctggcccgcatccgcaccgacctccccttggaggtggactttaaggccctgcgccgcaggacccccgacctggagggcctgagggcctttttggaggagctggagttcggaagcctccttcatgagttcggcctcctgggaggggagaagccccgggaggaggccccctggcccccgcccgaaggggccttcgtaggcttcctcctctcccgcaaggagcccatgtgggcggagcttctggccctggcggccgccgcagagggccgggtccaccgggcaacaagcccggttgaggccctggccgacctcaaggaggcccgggggttcctggccaaggacctggccgttttggccctgcgggagggggtggccctggaccccacggacgaccccctcctggtggcctacctcctggacccggccaacaccaaccccgagggggtggcccggcgctacgggggcgagttcacggaggacgcagcggagagggccctcctctccgagaggctcttccagaacctctttccccggctttccgagaagctcctctggctctaccaggaggtggagcggcccctctcccgggtcttggcccacatggaggcccggggggtgaggctggacgtcccccttctggaggccctctcctttgagctggagaaggagatggagcgcctggagggggaggtcttccgcttggccggccaccccttcaacctcaactcccgcgaccagctggaaagggtcctctttgacgagctgggccttaccccggtgggtcggacggagaagacgggcaagcgctccaccgcccagggggccctggaggccctccggggggcccaccccatcgtggagctcatcctccagtaccgggagctttccaagctcaaaagcacctacctggaccccctgccccggctcgtccacccgcggacgggccggcttcacacccgcttcaaccagacggccacggccacgggaaggctttccagctccgaccccaacctgcagaacatccccgtgcgcacccccttggggcagcgcatccgcaaggccttcgtggccgaggaggggtggctccttttggcggcggactactcccagatcgagcttcgggtcctggcccacctctcgggggacgagaacctgaagcgggtcttccgggaggggaaggacatccataccgaaaccgccgcctggatgttcggcttagaccccgctctagtggatccaaagatgcgccgggcggccaagacggtcaacttcggcgtcctctacgggatgtccgcccacaggctctcccaggagctcggcatagactacaaggaggcggaggcctttattgagcgctacttccagagcttccccaaggtgcgggcctggatagaaaggaccctggaggagggccggacgcggggctacgtggagaccctgttcggcaggaggatgtatgtgcccgacctggcctcccgggtccgctcggtgcgggaggcggcggagcggatggccttcaacatgcccgtgcagggcaccgccgccgacctgatgaagatcgccatggtcaagctcttccccaggctaaagcccctgggggcccacctcctcctccaggtgcacgacgagctggtcctggaggtgcccgaggaccgggccgaggaggccaaggccctggtcaaggaggtcatggagaacacctaccccttggacgtgcccctcgaggtggaggtgggcgtgggtcgggactggctggaggcgaagggggattgaagcggtcgac

SEQ ID NO: 2743 - DNA, 2605 bp, Artificial Sequence
  Description of Artificial Sequence: Synthetic DNA sequence of Thermus Rt41A DNA Polymerase R759T
atgaaatacctgctgccgaccgctgctgctggtctgctgctcctcgctgcccagccggcgatggccatggatatcggaattaattcggatccgaattccccactttttgacctggaggaaccccccaagcgggtgcttctggtggacggccaccacctggcctaccgcaccttctacgccctgagcctcaccacctcccggggggagccggtgcagatggtctacggcttcgcccggagcctcctcaaggccttgaaggaggacgggcaggcggtggtcgtggtctttgacgccaaggccccctccttccgccacgaggcctacgaggcctacaaggcgggccgggcccccaccccggaggacttcccccgccagctcgccttggtcaagcggctggtggaccttctgggcctggtccgcctcgaggccccgggttacgaggcggacgacgtcctgggcaccctggccaagaaggccgaaagggaggggatggaggtgcgcatcctcacgggagaccgggacttcttccagctcctctccgagaaggtctcggtcctcctgccggacgggaccctggtcaccccaaaggacgtccaggagaagtacggggtgccgccggagcgctgggtggacttccgcgccctcacgggggaccgctcggacaacatccccggggtggcggggataggggagaagaccgcccttcgactcctcgcggagtgggggagcgtggagaacctcctgaagaacctggaccgggtgaagccggactcggtccggcgcaagatagaggcgcaccttgaggacctccgcctctccttggacctggcccgcatccgcaccgacctccccttggaggtggactttaaggccctgcgccgcaggacccccgacctggagggcctgagggcctttttggaggagctggagttcggaagcctccttcatgagttcggcctcctgggaggggagaagccccgggaggaggccccctggcccccgcccgaaggggccttcgtaggcttcctcctctcccgcaaggagcccatgtgggcggagcttctggccctggcggccgccgcagagggccgggtccaccgggcaacaagcccggttgaggccctggccgacctcaaggaggcccgggggttcctggccaaggacctggccgttttggccctgcgggagggggtggccctggaccccacggacgaccccctcctggtggcctacctcctggacccggccaacaccaaccccgagggggtggcccggcgctacgggggcgagttcacggaggacgcagcggagagggccctcctctccgagaggctcttccagaacctctttccccggctttccgagaagctcctctggctctaccaggaggtggagcggcccctctcccgggtcttggcccacatggaggcccggggggtgaggctggacgtcccccttctggaggccctctcctttgagctggagaaggagatggagcgcctggagggggaggtcttccgcttggccggccaccccttcaacctcaactcccgcgaccagctggaaagggtcctctttgacgagctgggccttaccccggtgggtcggacggagaagacgggcaagcgctccaccgcccagggggccctggaggccctccggggggcccaccccatcgtggagctcatcctccagtaccgggagctttccaagctcaaaagcacctacctggaccccctgccccggctcgtccacccgcggacgggccggcttcacacccgcttcaaccagacggccacggccacgggaaggctttccagctccgaccccaacctgcagaacatccccgtgcgcacccccttggggcagcgcatccgcaaggccttcgtggccgaggaggggtggctccttttggcggcggactactcccagatcgagcttcgggtcctggcccacctctcgggggacgagaacctgaagcgggtcttccgggaggggaaggacatccataccgaaaccgccgcctggatgttcggcttagaccccgctctagtggatccaaagatgcgccgggcggccaagacggtcaacttcggcgtcctctacgggatgtccgcccacaggctctcccaggagctcggcatagactacaaggaggcggaggcctttattgagcgctacttccagagcttccccaaggtgcgggcctggatagaaaggaccctggaggagggccggacgcggggctacgtggagaccctgttcggcaggaggacttatgtgcccgacctggcctcccgggtccgctcggtgcgggaggcggcggagcggatggccttcaacatgcccgtgcagggcaccgccgccgacctgatgaagatcgccatggtcaagctcttccccaggctaaagcccctgggggcccacctcctcctccaggtgcacgacgagctggtcctggaggtgcccgaggaccgggccgaggaggccaaggccctggtcaaggaggtcatggagaacacctaccccttggacgtgcccctcgaggtggaggtgggcgtgggtcgggactggctggaggcgaagggggattgaagcggtcgac

SEQ ID NO: 2744 - DNA, 2605 bp, Artificial Sequence
  Description of Artificial Sequence: Synthetic DNA sequence of Thermus Rt41A DNA Polymerase R759N
atgaaatacctgctgccgaccgctgctgctggtctgctgctcctcgctgcccagccggcgatggccatggatatcggaattaattcggatccgaattccccactttttgacctggaggaaccccccaagcgggtgcttctggtggacggccaccacctggcctaccgcaccttctacgccctgagcctcaccacctcccggggggagccggtgcagatggtctacggcttcgcccggagcctcctcaaggccttgaaggaggacgggcaggcggtggtcgtggtctttgacgccaaggccccctccttccgccacgaggcctacgaggcctacaaggcgggccgggcccccaccccggaggacttcccccgccagctcgccttggtcaagcggctggtggaccttctgggcctggtccgcctcgaggccccgggttacgaggcggacgacgtcctgggcaccctggccaagaaggccgaaagggaggggatggaggtgcgcatcctcacgggagaccgggacttcttccagctcctctccgagaaggtctcggtcctcctgccggacgggaccctggtcaccccaaaggacgtccaggagaagtacggggtgccgccggagcgctgggtggacttccgcgccctcacgggggaccgctcggacaacatccccggggtggcggggataggggagaagaccgcccttcgactcctcgcggagtgggggagcgtggagaacctcctgaagaacctggaccgggtgaagccggactcggtccggcgcaagatagaggcgcaccttgaggacctccgcctctccttggacctggcccgcatccgcaccgacctccccttggaggtggactttaaggccctgcgccgcaggacccccgacctggagggcctgagggcctttttggaggagctggagttcggaagcctccttcatgagttcggcctcctgggaggggagaagccccgggaggaggccccctggcccccgcccgaaggggccttcgtaggcttcctcctctcccgcaaggagcccatgtgggcggagcttctggccctggcggccgccgcagagggccgggtccaccgggcaacaagcccggttgaggccctggccgacctcaaggaggcccgggggttcctggccaaggacctggccgttttggccctgcgggagggggtggccctggaccccacggacgaccccctcctggtggcctacctcctggacccggccaacaccaaccccgagggggtggcccggcgctacgggggcgagttcacggaggacgcagcggagagggccctcctctccgagaggctcttccagaacctctttccccggctttccgagaagctcctctggctctaccaggaggtggagcggcccctctcccgggtcttggcccacatggaggcccggggggtgaggctggacgtcccccttctggaggccctctcctttgagctggagaaggagatggagcgcctggagggggaggtcttccgcttggccggccaccccttcaacctcaactcccgcgaccagctggaaagggtcctctttgacgagctgggccttaccccggtgggtcggacggagaagacgggcaagcgctccaccgcccagggggccctggaggccctccggggggcccaccccatcgtggagctcatcctccagtaccgggagctttccaagctcaaaagcacctacctggaccccctgccccggctcgtccacccgcggacgggccggcttcacacccgcttcaaccagacggccacggccacgggaaggctttccagctccgaccccaacctgcagaacatccccgtgcgcacccccttggggcagcgcatccgcaaggccttcgtggccgaggaggggtggctccttttggcggcggactactcccagatcgagcttcgggtcctggcccacctctcgggggacgagaacctgaagcgggtcttccgggaggggaaggacatccataccgaaaccgccgcctggatgttcggcttagaccccgctctagtggatccaaagatgcgccgggcggccaagacggtcaacttcggcgtcctctacgggatgtccgcccacaggctctcccaggagctcggcatagactacaaggaggcggaggcctttattgagcgctacttccagagcttccccaaggtgcgggcctggatagaaaggaccctggaggagggccggacgcggggctacgtggagaccctgttcggcaggaggaattatgtgcccgacctggcctcccgggtccgctcggtgcgggaggcggcggagcggatggccttcaacatgcccgtgcagggcaccgccgccgacctgatgaagatcgccatggtcaagctcttccccaggctaaagcccctgggggcccacctcctcctccaggtgcacgacgagctggtcctggaggtgcccgaggaccgggccgaggaggccaaggccctggtcaaggaggtcatggagaacacctaccccttggacgtgcccctcgaggtggaggtgggcgtgggtcgggactggctggaggcgaagggggattgaagcggtcgac

SEQ ID NO: 2745 - DNA, 2605 bp, Artificial Sequence
  Description of Artificial Sequence: Synthetic DNA sequence of Thermus Rt41A DNA Polymerase R759V
atgaaatacctgctgccgaccgctgctgctggtctgctgctcctcgctgcccagccggcgatggccatggatatcggaattaattcggatccgaattccccactttttgacctggaggaaccccccaagcgggtgcttctggtggacggccaccacctggcctaccgcaccttctacgccctgagcctcaccacctcccggggggagccggtgcagatggtctacggcttcgcccggagcctcctcaaggccttgaaggaggacgggcaggcggtggtcgtggtctttgacgccaaggccccctccttccgccacgaggcctacgaggcctacaaggcgggccgggcccccaccccggaggacttcccccgccagctcgccttggtcaagcggctggtggaccttctgggcctggtccgcctcgaggccccgggttacgaggcggacgacgtcctgggcaccctggccaagaaggccgaaagggaggggatggaggtgcgcatcctcacgggagaccgggacttcttccagctcctctccgagaaggtctcggtcctcctgccggacgggaccctggtcaccccaaaggacgtccaggagaagtacggggtgccgccggagcgctgggtggacttccgcgccctcacgggggaccgctcggacaacatccccggggtggcggggataggggagaagaccgcccttcgactcctcgcggagtgggggagcgtggagaacctcctgaagaacctggaccgggtgaagccggactcggtccggcgcaagatagaggcgcaccttgaggacctccgcctctccttggacctggcccgcatccgcaccgacctccccttggaggtggactttaaggccctgcgccgcaggacccccgacctggagggcctgagggcctttttggaggagctggagttcggaagcctccttcatgagttcggcctcctgggaggggagaagccccgggaggaggccccctggcccccgcccgaaggggccttcgtaggcttcctcctctcccgcaaggagcccatgtgggcggagcttctggccctggcggccgccgcagagggccgggtccaccgggcaacaagcccggttgaggccctggccgacctcaaggaggcccgggggttcctggccaaggacctggccgttttggccctgcgggagggggtggccctggaccccacggacgaccccctcctggtggcctacctcctggacccggccaacaccaaccccgagggggtggcccggcgctacgggggcgagttcacggaggacgcagcggagagggccctcctctccgagaggctcttccagaacctctttccccggctttccgagaagctcctctggctctaccaggaggtggagcggcccctctcccgggtcttggcccacatggaggcccggggggtgaggctggacgtcccccttctggaggccctctcctttgagctggagaaggagatggagcgcctggagggggaggtcttccgcttggccggccaccccttcaacctcaactcccgcgaccagctggaaagggtcctctttgacgagctgggccttaccccggtgggtcggacggagaagacgggcaagcgctccaccgcccagggggccctggaggccctccggggggcccaccccatcgtggagctcatcctccagtaccgggagctttccaagctcaaaagcacctacctggaccccctgccccggctcgtccacccgcggacgggccggcttcacacccgcttcaaccagacggccacggccacgggaaggctttccagctccgaccccaacctgcagaacatccccgtgcgcacccccttggggcagcgcatccgcaaggccttcgtggccgaggaggggtggctccttttggcggcggactactcccagatcgagcttcgggtcctggcccacctctcgggggacgagaacctgaagcgggtcttccgggaggggaaggacatccataccgaaaccgccgcctggatgttcggcttagaccccgctctagtggatccaaagatgcgccgggcggccaagacggtcaacttcggcgtcctctacgggatgtccgcccacaggctctcccaggagctcggcatagactacaaggaggcggaggcctttattgagcgctacttccagagcttccccaaggtgcgggcctggatagaaaggaccctggaggagggccggacgcggggctacgtggagaccctgttcggcaggagggtctatgtgcccgacctggcctcccgggtccgctcggtgcgggaggcggcggagcggatggccttcaacatgcccgtgcagggcaccgccgccgacctgatgaagatcgccatggtcaagctcttccccaggctaaagcccctgggggcccacctcctcctccaggtgcacgacgagctggtcctggaggtgcccgaggaccgggccgaggaggccaaggccctggtcaaggaggtcatggagaacacctaccccttggacgtgcccctcgaggtggaggtgggcgtgggtcgggactggctggaggcgaagggggattgaagcggtcgac

SEQ ID NO: 2746 - DNA, 2605 bp, Artificial Sequence
  Description of Artificial Sequence: Synthetic DNA sequence of Thermus Rt41A DNA Polymerase Y760A
atgaaatacctgctgccgaccgctgctgctggtctgctgctcctcgctgcccagccggcgatggccatggatatcggaattaattcggatccgaattccccactttttgacctggaggaaccccccaagcgggtgcttctggtggacggccaccacctggcctaccgcaccttctacgccctgagcctcaccacctcccggggggagccggtgcagatggtctacggcttcgcccggagcctcctcaaggccttgaaggaggacgggcaggcggtggtcgtggtctttgacgccaaggccccctccttccgccacgaggcctacgaggcctacaaggcgggccgggcccccaccccggaggacttcccccgccagctcgccttggtcaagcggctggtggaccttctgggcctggtccgcctcgaggccccgggttacgaggcggacgacgtcctgggcaccctggccaagaaggccgaaagggaggggatggaggtgcgcatcctcacgggagaccgggacttcttccagctcctctccgagaaggtctcggtcctcctgccggacgggaccctggtcaccccaaaggacgtccaggagaagtacggggtgccgccggagcgctgggtggacttccgcgccctcacgggggaccgctcggacaacatccccggggtggcggggataggggagaagaccgcccttcgactcctcgcggagtgggggagcgtggagaacctcctgaagaacctggaccgggtgaagccggactcggtccggcgcaagatagaggcgcaccttgaggacctccgcctctccttggacctggcccgcatccgcaccgacctccccttggaggtggactttaaggccctgcgccgcaggacccccgacctggagggcctgagggcctttttggaggagctggagttcggaagcctccttcatgagttcggcctcctgggaggggagaagccccgggaggaggccccctggcccccgcccgaaggggccttcgtaggcttcctcctctcccgcaaggagcccatgtgggcggagcttctggccctggcggccgccgcagagggccgggtccaccgggcaacaagcccggttgaggccctggccgacctcaaggaggcccgggggttcctggccaaggacctggccgttttggccctgcgggagggggtggccctggaccccacggacgaccccctcctggtggcctacctcctggacccggccaacaccaaccccgagggggtggcccggcgctacgggggcgagttcacggaggacgcagcggagagggccctcctctccgagaggctcttccagaacctctttccccggctttccgagaagctcctctggctctaccaggaggtggagcggcccctctcccgggtcttggcccacatggaggcccggggggtgaggctggacgtcccccttctggaggccctctcctttgagctggagaaggagatggagcgcctggagggggaggtcttccgcttggccggccaccccttcaacctcaactcccgcgaccagctggaaagggtcctctttgacgagctgggccttaccccggtgggtcggacggagaagacgggcaagcgctccaccgcccagggggccctggaggccctccggggggcccaccccatcgtggagctcatcctccagtaccgggagctttccaagctcaaaagcacctacctggaccccctgccccggctcgtccacccgcggacgggccggcttcacacccgcttcaaccagacggccacggccacgggaaggctttccagctccgaccccaacctgcagaacatccccgtgcgcacccccttggggcagcgcatccgcaaggccttcgtggccgaggaggggtggctccttttggcggcggactactcccagatcgagcttcgggtcctggcccacctctcgggggacgagaacctgaagcgggtcttccgggaggggaaggacatccataccgaaaccgccgcctggatgttcggcttagaccccgctctagtggatccaaagatgcgccgggcggccaagacggtcaacttcggcgtcctctacgggatgtccgcccacaggctctcccaggagctcggcatagactacaaggaggcggaggcctttattgagcgctacttccagagcttccccaaggtgcgggcctggatagaaaggaccctggaggagggccggacgcggggctacgtggagaccctgttcggcaggaggcgcgctgtgcccgacctggcctcccgggtccgctcggtgcgggaggcggcggagcggatggccttcaacatgcccgtgcagggcaccgccgccgacctgatgaagatcgccatggtcaagctcttccccaggctaaagcccctgggggcccacctcctcctccaggtgcacgacgagctggtcctggaggtgcccgaggaccgggccgaggaggccaaggccctggtcaaggaggtcatggagaacacctaccccttggacgtgcccctcgaggtggaggtgggcgtgggtcgggactggctggaggcgaagggggattgaagcggtcgac

SEQ ID NO: 2747 - DNA, 2605 bp, Artificial Sequence
  Description of Artificial Sequence: Synthetic DNA sequence of Thermus Rt41A DNA Polymerase Y760R
atgaaatacctgctgccgaccgctgctgctggtctgctgctcctcgctgcccagccggcgatggccatggatatcggaattaattcggatccgaattccccactttttgacctggaggaaccccccaagcgggtgcttctggtggacggccaccacctggcctaccgcaccttctacgccctgagcctcaccacctcccggggggagccggtgcagatggtctacggcttcgcccggagcctcctcaaggccttgaaggaggacgggcaggcggtggtcgtggtctttgacgccaaggccccctccttccgccacgaggcctacgaggcctacaaggcgggccgggcccccaccccggaggacttcccccgccagctcgccttggtcaagcggctggtggaccttctgggcctggtccgcctcgaggccccgggttacgaggcggacgacgtcctgggcaccctggccaagaaggccgaaagggaggggatggaggtgcgcatcctcacgggagaccgggacttcttccagctcctctccgagaaggtctcggtcctcctgccggacgggaccctggtcaccccaaaggacgtccaggagaagtacggggtgccgccggagcgctgggtggacttccgcgccctcacgggggaccgctcggacaacatccccggggtggcggggataggggagaagaccgcccttcgactcctcgcggagtgggggagcgtggagaacctcctgaagaacctggaccgggtgaagccggactcggtccggcgcaagatagaggcgcaccttgaggacctccgcctctccttggacctggcccgcatccgcaccgacctccccttggaggtggactttaaggccctgcgccgcaggacccccgacctggagggcctgagggcctttttggaggagctggagttcggaagcctccttcatgagttcggcctcctgggaggggagaagccccgggaggaggccccctggcccccgcccgaaggggccttcgtaggcttcctcctctcccgcaaggagcccatgtgggcggagcttctggccctggcggccgccgcagagggccgggtccaccgggcaacaagcccggttgaggccctggccgacctcaaggaggcccgggggttcctggccaaggacctggccgttttggccctgcgggagggggtggccctggaccccacggacgaccccctcctggtggcctacctcctggacccggccaacaccaaccccgagggggtggcccggcgctacgggggcgagttcacggaggacgcagcggagagggccctcctctccgagaggctcttccagaacctctttccccggctttccgagaagctcctctggctctaccaggaggtggagcggcccctctcccgggtcttggcccacatggaggcccggggggtgaggctggacgtcccccttctggaggccctctcctttgagctggagaaggagatggagcgcctggagggggaggtcttccgcttggccggccaccccttcaacctcaactcccgcgaccagctggaaagggtcctctttgacgagctgggccttaccccggtgggtcggacggagaagacgggcaagcgctccaccgcccagggggccctggaggccctccggggggcccaccccatcgtggagctcatcctccagtaccgggagctttccaagctcaaaagcacctacctggaccccctgccccggctcgtccacccgcggacgggccggcttcacacccgcttcaaccagacggccacggccacgggaaggctttccagctccgaccccaacctgcagaacatccccgtgcgcacccccttggggcagcgcatccgcaaggccttcgtggccgaggaggggtggctccttttggcggcggactactcccagatcgagcttcgggtcctggcccacctctcgggggacgagaacctgaagcgggtcttccgggaggggaaggacatccataccgaaaccgccgcctggatgttcggcttagaccccgctctagtggatccaaagatgcgccgggcggccaagacggtcaacttcggcgtcctctacgggatgtccgcccacaggctctcccaggagctcggcatagactacaaggaggcggaggcctttattgagcgctacttccagagcttccccaaggtgcgggcctggatagaaaggaccctggaggagggccggacgcggggctacgtggagaccctgttcggcaggaggcgccgagtgcccgacctggcctcccgggtccgctcggtgcgggaggcggcggagcggatggccttcaacatgcccgtgcagggcaccgccgccgacctgatgaagatcgccatggtcaagctcttccccaggctaaagcccctgggggcccacctcctcctccaggtgcacgacgagctggtcctggaggtgcccgaggaccgggccgaggaggccaaggccctggtcaaggaggtcatggagaacacctaccccttggacgtgcccctcgaggtggaggtgggcgtgggtcgggactggctggaggcgaagggggattgaagcggtcgac

SEQ ID NO: 2748 - DNA, 2605 bp, Artificial Sequence
  Description of Artificial Sequence: Synthetic DNA sequence of Thermus Rt41A DNA Polymerase Y760C
atgaaatacctgctgccgaccgctgctgctggtctgctgctcctcgctgcccagccggcgatggccatggatatcggaattaattcggatccgaattccccactttttgacctggaggaaccccccaagcgggtgcttctggtggacggccaccacctggcctaccgcaccttctacgccctgagcctcaccacctcccggggggagccggtgcagatggtctacggcttcgcccggagcctcctcaaggccttgaaggaggacgggcaggcggtggtcgtggtctttgacgccaaggccccctccttccgccacgaggcctacgaggcctacaaggcgggccgggcccccaccccggaggacttcccccgccagctcgccttggtcaagcggctggtggaccttctgggcctggtccgcctcgaggccccgggttacgaggcggacgacgtcctgggcaccctggccaagaaggccgaaagggaggggatggaggtgcgcatcctcacgggagaccgggacttcttccagctcctctccgagaaggtctcggtcctcctgccggacgggaccctggtcaccccaaaggacgtccaggagaagtacggggtgccgccggagcgctgggtggacttccgcgccctcacgggggaccgctcggacaacatccccggggtggcggggataggggagaagaccgcccttcgactcctcgcggagtgggggagcgtggagaacctcctgaagaacctggaccgggtgaagccggactcggtccggcgcaagatagaggcgcaccttgaggacctccgcctctccttggacctggcccgcatccgcaccgacctccccttggaggtggactttaaggccctgcgccgcaggacccccgacctggagggcctgagggcctttttggaggagctggagttcggaagcctccttcatgagttcggcctcctgggaggggagaagccccgggaggaggccccctggcccccgcccgaaggggccttcgtaggcttcctcctctcccgcaaggagcccatgtgggcggagcttctggccctggcggccgccgcagagggccgggtccaccgggcaacaagcccggttgaggccctggccgacctcaaggaggcccgggggttcctggccaaggacctggccgttttggccctgcgggagggggtggccctggaccccacggacgaccccctcctggtggcctacctcctggacccggccaacaccaaccccgagggggtggcccggcgctacgggggcgagttcacggaggacgcagcggagagggccctcctctccgagaggctcttccagaacctctttccccggctttccgagaagctcctctggctctaccaggaggtggagcggcccctctcccgggtcttggcccacatggaggcccggggggtgaggctggacgtcccccttctggaggccctctcctttgagctggagaaggagatggagcgcctggagggggaggtcttccgcttggccggccaccccttcaacctcaactcccgcgaccagctggaaagggtcctctttgacgagctgggccttaccccggtgggtcggacggagaagacgggcaagcgctccaccgcccagggggccctggaggccctccggggggcccaccccatcgtggagctcatcctccagtaccgggagctttccaagctcaaaagcacctacctggaccccctgccccggctcgtccacccgcggacgggccggcttcacacccgcttcaaccagacggccacggccacgggaaggctttccagctccgaccccaacctgcagaacatccccgtgcgcacccccttggggcagcgcatccgcaaggccttcgtggccgaggaggggtggctccttttggcggcggactactcccagatcgagcttcgggtcctggcccacctctcgggggacgagaacctgaagcgggtcttccgggaggggaaggacatccataccgaaaccgccgcctggatgttcggcttagaccccgctctagtggatccaaagatgcgccgggcggccaagacggtcaacttcggcgtcctctacgggatgtccgcccacaggctctcccaggagctcggcatagactacaaggaggcggaggcctttattgagcgctacttccagagcttccccaaggtgcgggcctggatagaaaggaccctggaggagggccggacgcggggctacgtggagaccctgttcggcaggaggcgctgtgtgcccgacctggcctcccgggtccgctcggtgcgggaggcggcggagcggatggccttcaacatgcccgtgcagggcaccgccgccgacctgatgaagatcgccatggtcaagctcttccccaggctaaagcccctgggggcccacctcctcctccaggtgcacgacgagctggtcctggaggtgcccgaggaccgggccgaggaggccaaggccctggtcaaggaggtcatggagaacacctaccccttggacgtgcccctcgaggtggaggtgggcgtgggtcgggactggctggaggcgaagggggattgaagcggtcgac

SEQ ID NO: 2749 - DNA, 2605 bp, Artificial Sequence
  Description of Artificial Sequence: Synthetic DNA sequence of Thermus Rt41A DNA Polymerase Y760G
atgaaatacctgctgccgaccgctgctgctggtctgctgctcctcgctgcccagccggcgatggccatggatatcggaattaattcggatccgaattccccactttttgacctggaggaaccccccaagcgggtgcttctggtggacggccaccacctggcctaccgcaccttctacgccctgagcctcaccacctcccggggggagccggtgcagatggtctacggcttcgcccggagcctcctcaaggccttgaaggaggacgggcaggcggtggtcgtggtctttgacgccaaggccccctccttccgccacgaggcctacgaggcctacaaggcgggccgggcccccaccccggaggacttcccccgccagctcgccttggtcaagcggctggtggaccttctgggcctggtccgcctcgaggccccgggttacgaggcggacgacgtcctgggcaccctggccaagaaggccgaaagggaggggatggaggtgcgcatcctcacgggagaccgggacttcttccagctcctctccgagaaggtctcggtcctcctgccggacgggaccctggtcaccccaaaggacgtccaggagaagtacggggtgccgccggagcgctgggtggacttccgcgccctcacgggggaccgctcggacaacatccccggggtggcggggataggggagaagaccgcccttcgactcctcgcggagtgggggagcgtggagaacctcctgaagaacctggaccgggtgaagccggactcggtccggcgcaagatagaggcgcaccttgaggacctccgcctctccttggacctggcccgcatccgcaccgacctccccttggaggtggactttaaggccctgcgccgcaggacccccgacctggagggcctgagggcctttttggaggagctggagttcggaagcctccttcatgagttcggcctcctgggaggggagaagccccgggaggaggccccctggcccccgcccgaaggggccttcgtaggcttcctcctctcccgcaaggagcccatgtgggcggagcttctggccctggcggccgccgcagagggccgggtccaccgggcaacaagcccggttgaggccctggccgacctcaaggaggcccgggggttcctggccaaggacctggccgttttggccctgcgggagggggtggccctggaccccacggacgaccccctcctggtggcctacctcctggacccggccaacaccaaccccgagggggtggcccggcgctacgggggcgagttcacggaggacgcagcggagagggccctcctctccgagaggctcttccagaacctctttccccggctttccgagaagctcctctggctctaccaggaggtggagcggcccctctcccgggtcttggcccacatggaggcccggggggtgaggctggacgtcccccttctggaggccctctcctttgagctggagaaggagatggagcgcctggagggggaggtcttccgcttggccggccaccccttcaacctcaactcccgcgaccagctggaaagggtcctctttgacgagctgggccttaccccggtgggtcggacggagaagacgggcaagcgctccaccgcccagggggccctggaggccctccggggggcccaccccatcgtggagctcatcctccagtaccgggagctttccaagctcaaaagcacctacctggaccccctgccccggctcgtccacccgcggacgggccggcttcacacccgcttcaaccagacggccacggccacgggaaggctttccagctccgaccccaacctgcagaacatccccgtgcgcacccccttggggcagcgcatccgcaaggccttcgtggccgaggaggggtggctccttttggcggcggactactcccagatcgagcttcgggtcctggcccacctctcgggggacgagaacctgaagcgggtcttccgggaggggaaggacatccataccgaaaccgccgcctggatgttcggcttagaccccgctctagtggatccaaagatgcgccgggcggccaagacggtcaacttcggcgtcctctacgggatgtccgcccacaggctctcccaggagctcggcatagactacaaggaggcggaggcctttattgagcgctacttccagagcttccccaaggtgcgggcctggatagaaaggaccctggaggagggccggacgcggggctacgtggagaccctgttcggcaggaggcgcggtgtgcccgacctggcctcccgggtccgctcggtgcgggaggcggcggagcggatggccttcaacatgcccgtgcagggcaccgccgccgacctgatgaagatcgccatggtcaagctcttccccaggctaaagcccctgggggcccacctcctcctccaggtgcacgacgagctggtcctggaggtgcccgaggaccgggccgaggaggccaaggccctggtcaaggaggtcatggagaacacctaccccttggacgtgcccctcgaggtggaggtgggcgtgggtcgggactggctggaggcgaagggggattgaagcggtcgac

SEQ ID NO: 2750 - DNA, 2605 bp, Artificial Sequence
  Description of Artificial Sequence: Synthetic DNA sequence of Thermus Rt41A DNA Polymerase Y760Q
atgaaatacctgctgccgaccgctgctgctggtctgctgctcctcgctgcccagccggcgatggccatggatatcggaattaattcggatccgaattccccactttttgacctggaggaaccccccaagcgggtgcttctggtggacggccaccacctggcctaccgcaccttctacgccctgagcctcaccacctcccggggggagccggtgcagatggtctacggcttcgcccggagcctcctcaaggccttgaaggaggacgggcaggcggtggtcgtggtctttgacgccaaggccccctccttccgccacgaggcctacgaggcctacaaggcgggccgggcccccaccccggaggacttcccccgccagctcgccttggtcaagcggctggtggaccttctgggcctggtccgcctcgaggccccgggttacgaggcggacgacgtcctgggcaccctggccaagaaggccgaaagggaggggatggaggtgcgcatcctcacgggagaccgggacttcttccagctcctctccgagaaggtctcggtcctcctgccggacgggaccctggtcaccccaaaggacgtccaggagaagtacggggtgccgccggagcgctgggtggacttccgcgccctcacgggggaccgctcggacaacatccccggggtggcggggataggggagaagaccgcccttcgactcctcgcggagtgggggagcgtggagaacctcctgaagaacctggaccgggtgaagccggactcggtccggcgcaagatagaggcgcaccttgaggacctccgcctctccttggacctggcccgcatccgcaccgacctccccttggaggtggactttaaggccctgcgccgcaggacccccgacctggagggcctgagggcctttttggaggagctggagttcggaagcctccttcatgagttcggcctcctgggaggggagaagccccgggaggaggccccctggcccccgcccgaaggggccttcgtaggcttcctcctctcccgcaaggagcccatgtgggcggagcttctggccctggcggccgccgcagagggccgggtccaccgggcaacaagcccggttgaggccctggccgacctcaaggaggcccgggggttcctggccaaggacctggccgttttggccctgcgggagggggtggccctggaccccacggacgaccccctcctggtggcctacctcctggacccggccaacaccaaccccgagggggtggcccggcgctacgggggcgagttcacggaggacgcagcggagagggccctcctctccgagaggctcttccagaacctctttccccggctttccgagaagctcctctggctctaccaggaggtggagcggcccctctcccgggtcttggcccacatggaggcccggggggtgaggctggacgtcccccttctggaggccctctcctttgagctggagaaggagatggagcgcctggagggggaggtcttccgcttggccggccaccccttcaacctcaactcccgcgaccagctggaaagggtcctctttgacgagctgggccttaccccggtgggtcggacggagaagacgggcaagcgctccaccgcccagggggccctggaggccctccggggggcccaccccatcgtggagctcatcctccagtaccgggagctttccaagctcaaaagcacctacctggaccccctgccccggctcgtccacccgcggacgggccggcttcacacccgcttcaaccagacggccacggccacgggaaggctttccagctccgaccccaacctgcagaacatccccgtgcgcacccccttggggcagcgcatccgcaaggccttcgtggccgaggaggggtggctccttttggcggcggactactcccagatcgagcttcgggtcctggcccacctctcgggggacgagaacctgaagcgggtcttccgggaggggaaggacatccataccgaaaccgccgcctggatgttcggcttagaccccgctctagtggatccaaagatgcgccgggcggccaagacggtcaacttcggcgtcctctacgggatgtccgcccacaggctctcccaggagctcggcatagactacaaggaggcggaggcctttattgagcgctacttccagagcttccccaaggtgcgggcctggatagaaaggaccctggaggagggccggacgcggggctacgtggagaccctgttcggcaggaggcgccaagtgcccgacctggcctcccgggtccgctcggtgcgggaggcggcggagcggatggccttcaacatgcccgtgcagggcaccgccgccgacctgatgaagatcgccatggtcaagctcttccccaggctaaagcccctgggggcccacctcctcctccaggtgcacgacgagctggtcctggaggtgcccgaggaccgggccgaggaggccaaggccctggtcaaggaggtcatggagaacacctaccccttggacgtgcccctcgaggtggaggtgggcgtgggtcgggactggctggaggcgaagggggattgaagcggtcgac

SEQ ID NO: 2751 - DNA, 2605 bp, Artificial Sequence
  Description of Artificial Sequence: Synthetic DNA sequence of Thermus Rt41A DNA Polymerase Y760H
atgaaatacctgctgccgaccgctgctgctggtctgctgctcctcgctgcccagccggcgatggccatggatatcggaattaattcggatccgaattccccactttttgacctggaggaaccccccaagcgggtgcttctggtggacggccaccacctggcctaccgcaccttctacgccctgagcctcaccacctcccggggggagccggtgcagatggtctacggcttcgcccggagcctcctcaaggccttgaaggaggacgggcaggcggtggtcgtggtctttgacgccaaggccccctccttccgccacgaggcctacgaggcctacaaggcgggccgggcccccaccccggaggacttcccccgccagctcgccttggtcaagcggctggtggaccttctgggcctggtccgcctcgaggccccgggttacgaggcggacgacgtcctgggcaccctggccaagaaggccgaaagggaggggatggaggtgcgcatcctcacgggagaccgggacttcttccagctcctctccgagaaggtctcggtcctcctgccggacgggaccctggtcaccccaaaggacgtccaggagaagtacggggtgccgccggagcgctgggtggacttccgcgccctcacgggggaccgctcggacaacatccccggggtggcggggataggggagaagaccgcccttcgactcctcgcggagtgggggagcgtggagaacctcctgaagaacctggaccgggtgaagccggactcggtccggcgcaagatagaggcgcaccttgaggacctccgcctctccttggacctggcccgcatccgcaccgacctccccttggaggtggactttaaggccctgcgccgcaggacccccgacctggagggcctgagggcctttttggaggagctggagttcggaagcctccttcatgagttcggcctcctgggaggggagaagccccgggaggaggccccctggcccccgcccgaaggggccttcgtaggcttcctcctctcccgcaaggagcccatgtgggcggagcttctggccctggcggccgccgcagagggccgggtccaccgggcaacaagcccggttgaggccctggccgacctcaaggaggcccgggggttcctggccaaggacctggccgttttggccctgcgggagggggtggccctggaccccacggacgaccccctcctggtggcctacctcctggacccggccaacaccaaccccgagggggtggcccggcgctacgggggcgagttcacggaggacgcagcggagagggccctcctctccgagaggctcttccagaacctctttccccggctttccgagaagctcctctggctctaccaggaggtggagcggcccctctcccgggtcttggcccacatggaggcccggggggtgaggctggacgtcccccttctggaggccctctcctttgagctggagaaggagatggagcgcctggagggggaggtcttccgcttggccggccaccccttcaacctcaactcccgcgaccagctggaaagggtcctctttgacgagctgggccttaccccggtgggtcggacggagaagacgggcaagcgctccaccgcccagggggccctggaggccctccggggggcccaccccatcgtggagctcatcctccagtaccgggagctttccaagctcaaaagcacctacctggaccccctgccccggctcgtccacccgcggacgggccggcttcacacccgcttcaaccagacggccacggccacgggaaggctttccagctccgaccccaacctgcagaacatccccgtgcgcacccccttggggcagcgcatccgcaaggccttcgtggccgaggaggggtggctccttttggcggcggactactcccagatcgagcttcgggtcctggcccacctctcgggggacgagaacctgaagcgggtcttccgggaggggaaggacatccataccgaaaccgccgcctggatgttcggcttagaccccgctctagtggatccaaagatgcgccgggcggccaagacggtcaacttcggcgtcctctacgggatgtccgcccacaggctctcccaggagctcggcatagactacaaggaggcggaggcctttattgagcgctacttccagagcttccccaaggtgcgggcctggatagaaaggaccctggaggagggccggacgcggggctacgtggagaccctgttcggcaggaggcgccatgtgcccgacctggcctcccgggtccgctcggtgcgggaggcggcggagcggatggccttcaacatgcccgtgcagggcaccgccgccgacctgatgaagatcgccatggtcaagctcttccccaggctaaagcccctgggggcccacctcctcctccaggtgcacgacgagctggtcctggaggtgcccgaggaccgggccgaggaggccaaggccctggtcaaggaggtcatggagaacacctaccccttggacgtgcccctcgaggtggaggtgggcgtgggtcgggactggctggaggcgaagggggattgaagcggtcgac

SEQ ID NO: 2752 - DNA, 2605 bp, Artificial Sequence
  Description of Artificial Sequence: Synthetic DNA sequence of Thermus Rt41A DNA Polymerase Y760I
atgaaatacctgctgccgaccgctgctgctggtctgctgctcctcgctgcccagccggcgatggccatggatatcggaattaattcggatccgaattccccactttttgacctggaggaaccccccaagcgggtgcttctggtggacggccaccacctggcctaccgcaccttctacgccctgagcctcaccacctcccggggggagccggtgcagatggtctacggcttcgcccggagcctcctcaaggccttgaaggaggacgggcaggcggtggtcgtggtctttgacgccaaggccccctccttccgccacgaggcctacgaggcctacaaggcgggccgggcccccaccccggaggacttcccccgccagctcgccttggtcaagcggctggtggaccttctgggcctggtccgcctcgaggccccgggttacgaggcggacgacgtcctgggcaccctggccaagaaggccgaaagggaggggatggaggtgcgcatcctcacgggagaccgggacttcttccagctcctctccgagaaggtctcggtcctcctgccggacgggaccctggtcaccccaaaggacgtccaggagaagtacggggtgccgccggagcgctgggtggacttccgcgccctcacgggggaccgctcggacaacatccccggggtggcggggataggggagaagaccgcccttcgactcctcgcggagtgggggagcgtggagaacctcctgaagaacctggaccgggtgaagccggactcggtccggcgcaagatagaggcgcaccttgaggacctccgcctctccttggacctggcccgcatccgcaccgacctccccttggaggtggactttaaggccctgcgccgcaggacccccgacctggagggcctgagggcctttttggaggagctggagttcggaagcctccttcatgagttcggcctcctgggaggggagaagccccgggaggaggccccctggcccccgcccgaaggggccttcgtaggcttcctcctctcccgcaaggagcccatgtgggcggagcttctggccctggcggccgccgcagagggccgggtccaccgggcaacaagcccggttgaggccctggccgacctcaaggaggcccgggggttcctggccaaggacctggccgttttggccctgcgggagggggtggccctggaccccacggacgaccccctcctggtggcctacctcctggacccggccaacaccaaccccgagggggtggcccggcgctacgggggcgagttcacggaggacgcagcggagagggccctcctctccgagaggctcttccagaacctctttccccggctttccgagaagctcctctggctctaccaggaggtggagcggcccctctcccgggtcttggcccacatggaggcccggggggtgaggctggacgtcccccttctggaggccctctcctttgagctggagaaggagatggagcgcctggagggggaggtcttccgcttggccggccaccccttcaacctcaactcccgcgaccagctggaaagggtcctctttgacgagctgggccttaccccggtgggtcggacggagaagacgggcaagcgctccaccgcccagggggccctggaggccctccggggggcccaccccatcgtggagctcatcctccagtaccgggagctttccaagctcaaaagcacctacctggaccccctgccccggctcgtccacccgcggacgggccggcttcacacccgcttcaaccagacggccacggccacgggaaggctttccagctccgaccccaacctgcagaacatccccgtgcgcacccccttggggcagcgcatccgcaaggccttcgtggccgaggaggggtggctccttttggcggcggactactcccagatcgagcttcgggtcctggcccacctctcgggggacgagaacctgaagcgggtcttccgggaggggaaggacatccataccgaaaccgccgcctggatgttcggcttagaccccgctctagtggatccaaagatgcgccgggcggccaagacggtcaacttcggcgtcctctacgggatgtccgcccacaggctctcccaggagctcggcatagactacaaggaggcggaggcctttattgagcgctacttccagagcttccccaaggtgcgggcctggatagaaaggaccctggaggagggccggacgcggggctacgtggagaccctgttcggcaggaggcgcattgtgcccgacctggcctcccgggtccgctcggtgcgggaggcggcggagcggatggccttcaacatgcccgtgcagggcaccgccgccgacctgatgaagatcgccatggtcaagctcttccccaggctaaagcccctgggggcccacctcctcctccaggtgcacgacgagctggtcctggaggtgcccgaggaccgggccgaggaggccaaggccctggtcaaggaggtcatggagaacacctaccccttggacgtgcccctcgaggtggaggtgggcgtgggtcgggactggctggaggcgaagggggattgaagcggtcgac

SEQ ID NO: 2753 - DNA, 2605 bp, Artificial Sequence
  Description of Artificial Sequence: Synthetic DNA sequence of Thermus Rt41A DNA Polymerase Y760L
atgaaatacctgctgccgaccgctgctgctggtctgctgctcctcgctgcccagccggcgatggccatggatatcggaattaattcggatccgaattccccactttttgacctggaggaaccccccaagcgggtgcttctggtggacggccaccacctggcctaccgcaccttctacgccctgagcctcaccacctcccggggggagccggtgcagatggtctacggcttcgcccggagcctcctcaaggccttgaaggaggacgggcaggcggtggtcgtggtctttgacgccaaggccccctccttccgccacgaggcctacgaggcctacaaggcgggccgggcccccaccccggaggacttcccccgccagctcgccttggtcaagcggctggtggaccttctgggcctggtccgcctcgaggccccgggttacgaggcggacgacgtcctgggcaccctggccaagaaggccgaaagggaggggatggaggtgcgcatcctcacgggagaccgggacttcttccagctcctctccgagaaggtctcggtcctcctgccggacgggaccctggtcaccccaaaggacgtccaggagaagtacggggtgccgccggagcgctgggtggacttccgcgccctcacgggggaccgctcggacaacatccccggggtggcggggataggggagaagaccgcccttcgactcctcgcggagtgggggagcgtggagaacctcctgaagaacctggaccgggtgaagccggactcggtccggcgcaagatagaggcgcaccttgaggacctccgcctctccttggacctggcccgcatccgcaccgacctccccttggaggtggactttaaggccctgcgccgcaggacccccgacctggagggcctgagggcctttttggaggagctggagttcggaagcctccttcatgagttcggcctcctgggaggggagaagccccgggaggaggccccctggcccccgcccgaaggggccttcgtaggcttcctcctctcccgcaaggagcccatgtgggcggagcttctggccctggcggccgccgcagagggccgggtccaccgggcaacaagcccggttgaggccctggccgacctcaaggaggcccgggggttcctggccaaggacctggccgttttggccctgcgggagggggtggccctggaccccacggacgaccccctcctggtggcctacctcctggacccggccaacaccaaccccgagggggtggcccggcgctacgggggcgagttcacggaggacgcagcggagagggccctcctctccgagaggctcttccagaacctctttccccggctttccgagaagctcctctggctctaccaggaggtggagcggcccctctcccgggtcttggcccacatggaggcccggggggtgaggctggacgtcccccttctggaggccctctcctttgagctggagaaggagatggagcgcctggagggggaggtcttccgcttggccggccaccccttcaacctcaactcccgcgaccagctggaaagggtcctctttgacgagctgggccttaccccggtgggtcggacggagaagacgggcaagcgctccaccgcccagggggccctggaggccctccggggggcccaccccatcgtggagctcatcctccagtaccgggagctttccaagctcaaaagcacctacctggaccccctgccccggctcgtccacccgcggacgggccggcttcacacccgcttcaaccagacggccacggccacgggaaggctttccagctccgaccccaacctgcagaacatccccgtgcgcacccccttggggcagcgcatccgcaaggccttcgtggccgaggaggggtggctccttttggcggcggactactcccagatcgagcttcgggtcctggcccacctctcgggggacgagaacctgaagcgggtcttccgggaggggaaggacatccataccgaaaccgccgcctggatgttcggcttagaccccgctctagtggatccaaagatgcgccgggcggccaagacggtcaacttcggcgtcctctacgggatgtccgcccacaggctctcccaggagctcggcatagactacaaggaggcggaggcctttattgagcgctacttccagagcttccccaaggtgcgggcctggatagaaaggaccctggaggagggccggacgcggggctacgtggagaccctgttcggcaggaggcgcttagtgcccgacctggcctcccgggtccgctcggtgcgggaggcggcggagcggatggccttcaacatgcccgtgcagggcaccgccgccgacctgatgaagatcgccatggtcaagctcttccccaggctaaagcccctgggggcccacctcctcctccaggtgcacgacgagctggtcctggaggtgcccgaggaccgggccgaggaggccaaggccctggtcaaggaggtcatggagaacacctaccccttggacgtgcccctcgaggtggaggtgggcgtgggtcgggactggctggaggcgaagggggattgaagcggtcgac

SEQ ID NO: 2754 - DNA, 2605 bp, Artificial Sequence
  Description of Artificial Sequence: Synthetic DNA sequence of Thermus Rt41A DNA Polymerase Y760K
atgaaatacctgctgccgaccgctgctgctggtctgctgctcctcgctgcccagccggcgatggccatggatatcggaattaattcggatccgaattccccactttttgacctggaggaaccccccaagcgggtgcttctggtggacggccaccacctggcctaccgcaccttctacgccctgagcctcaccacctcccggggggagccggtgcagatggtctacggcttcgcccggagcctcctcaaggccttgaaggaggacgggcaggcggtggtcgtggtctttgacgccaaggccccctccttccgccacgaggcctacgaggcctacaaggcgggccgggcccccaccccggaggacttcccccgccagctcgccttggtcaagcggctggtggaccttctgggcctggtccgcctcgaggccccgggttacgaggcggacgacgtcctgggcaccctggccaagaaggccgaaagggaggggatggaggtgcgcatcctcacgggagaccgggacttcttccagctcctctccgagaaggtctcggtcctcctgccggacgggaccctggtcaccccaaaggacgtccaggagaagtacggggtgccgccggagcgctgggtggacttccgcgccctcacgggggaccgctcggacaacatccccggggtggcggggataggggagaagaccgcccttcgactcctcgcggagtgggggagcgtggagaacctcctgaagaacctggaccgggtgaagccggactcggtccggcgcaagatagaggcgcaccttgaggacctccgcctctccttggacctggcccgcatccgcaccgacctccccttggaggtggactttaaggccctgcgccgcaggacccccgacctggagggcctgagggcctttttggaggagctggagttcggaagcctccttcatgagttcggcctcctgggaggggagaagccccgggaggaggccccctggcccccgcccgaaggggccttcgtaggcttcctcctctcccgcaaggagcccatgtgggcggagcttctggccctggcggccgccgcagagggccgggtccaccgggcaacaagcccggttgaggccctggccgacctcaaggaggcccgggggttcctggccaaggacctggccgttttggccctgcgggagggggtggccctggaccccacggacgaccccctcctggtggcctacctcctggacccggccaacaccaaccccgagggggtggcccggcgctacgggggcgagttcacggaggacgcagcggagagggccctcctctccgagaggctcttccagaacctctttccccggctttccgagaagctcctctggctctaccaggaggtggagcggcccctctcccgggtcttggcccacatggaggcccggggggtgaggctggacgtcccccttctggaggccctctcctttgagctggagaaggagatggagcgcctggagggggaggtcttccgcttggccggccaccccttcaacctcaactcccgcgaccagctggaaagggtcctctttgacgagctgggccttaccccggtgggtcggacggagaagacgggcaagcgctccaccgcccagggggccctggaggccctccggggggcccaccccatcgtggagctcatcctccagtaccgggagctttccaagctcaaaagcacctacctggaccccctgccccggctcgtccacccgcggacgggccggcttcacacccgcttcaaccagacggccacggccacgggaaggctttccagctccgaccccaacctgcagaacatccccgtgcgcacccccttggggcagcgcatccgcaaggccttcgtggccgaggaggggtggctccttttggcggcggactactcccagatcgagcttcgggtcctggcccacctctcgggggacgagaacctgaagcgggtcttccgggaggggaaggacatccataccgaaaccgccgcctggatgttcggcttagaccccgctctagtggatccaaagatgcgccgggcggccaagacggtcaacttcggcgtcctctacgggatgtccgcccacaggctctcccaggagctcggcatagactacaaggaggcggaggcctttattgagcgctacttccagagcttccccaaggtgcgggcctggatagaaaggaccctggaggagggccggacgcggggctacgtggagaccctgttcggcaggaggcgcaaagtgcccgacctggcctcccgggtccgctcggtgcgggaggcggcggagcggatggccttcaacatgcccgtgcagggcaccgccgccgacctgatgaagatcgccatggtcaagctcttccccaggctaaagcccctgggggcccacctcctcctccaggtgcacgacgagctggtcctggaggtgcccgaggaccgggccgaggaggccaaggccctggtcaaggaggtcatggagaacacctaccccttggacgtgcccctcgaggtggaggtgggcgtgggtcgggactggctggaggcgaagggggattgaagcggtcgac

SEQ ID NO: 2755 - DNA, 2605 bp, Artificial Sequence
  Description of Artificial Sequence: Synthetic DNA sequence of Thermus Rt41A DNA Polymerase Y760E
atgaaatacctgctgccgaccgctgctgctggtctgctgctcctcgctgcccagccggcgatggccatggatatcggaattaattcggatccgaattccccactttttgacctggaggaaccccccaagcgggtgcttctggtggacggccaccacctggcctaccgcaccttctacgccctgagcctcaccacctcccggggggagccggtgcagatggtctacggcttcgcccggagcctcctcaaggccttgaaggaggacgggcaggcggtggtcgtggtctttgacgccaaggccccctccttccgccacgaggcctacgaggcctacaaggcgggccgggcccccaccccggaggacttcccccgccagctcgccttggtcaagcggctggtggaccttctgggcctggtccgcctcgaggccccgggttacgaggcggacgacgtcctgggcaccctggccaagaaggccgaaagggaggggatggaggtgcgcatcctcacgggagaccgggacttcttccagctcctctccgagaaggtctcggtcctcctgccggacgggaccctggtcaccccaaaggacgtccaggagaagtacggggtgccgccggagcgctgggtggacttccgcgccctcacgggggaccgctcggacaacatccccggggtggcggggataggggagaagaccgcccttcgactcctcgcggagtgggggagcgtggagaacctcctgaagaacctggaccgggtgaagccggactcggtccggcgcaagatagaggcgcaccttgaggacctccgcctctccttggacctggcccgcatccgcaccgacctccccttggaggtggactttaaggccctgcgccgcaggacccccgacctggagggcctgagggcctttttggaggagctggagttcggaagcctccttcatgagttcggcctcctgggaggggagaagccccgggaggaggccccctggcccccgcccgaaggggccttcgtaggcttcctcctctcccgcaaggagcccatgtgggcggagcttctggccctggcggccgccgcagagggccgggtccaccgggcaacaagcccggttgaggccctggccgacctcaaggaggcccgggggttcctggccaaggacctggccgttttggccctgcgggagggggtggccctggaccccacggacgaccccctcctggtggcctacctcctggacccggccaacaccaaccccgagggggtggcccggcgctacgggggcgagttcacggaggacgcagcggagagggccctcctctccgagaggctcttccagaacctctttccccggctttccgagaagctcctctggctctaccaggaggtggagcggcccctctcccgggtcttggcccacatggaggcccggggggtgaggctggacgtcccccttctggaggccctctcctttgagctggagaaggagatggagcgcctggagggggaggtcttccgcttggccggccaccccttcaacctcaactcccgcgaccagctggaaagggtcctctttgacgagctgggccttaccccggtgggtcggacggagaagacgggcaagcgctccaccgcccagggggccctggaggccctccggggggcccaccccatcgtggagctcatcctccagtaccgggagctttccaagctcaaaagcacctacctggaccccctgccccggctcgtccacccgcggacgggccggcttcacacccgcttcaaccagacggccacggccacgggaaggctttccagctccgaccccaacctgcagaacatccccgtgcgcacccccttggggcagcgcatccgcaaggccttcgtggccgaggaggggtggctccttttggcggcggactactcccagatcgagcttcgggtcctggcccacctctcgggggacgagaacctgaagcgggtcttccgggaggggaaggacatccataccgaaaccgccgcctggatgttcggcttagaccccgctctagtggatccaaagatgcgccgggcggccaagacggtcaacttcggcgtcctctacgggatgtccgcccacaggctctcccaggagctcggcatagactacaaggaggcggaggcctttattgagcgctacttccagagcttccccaaggtgcgggcctggatagaaaggaccctggaggagggccggacgcggggctacgtggagaccctgttcggcaggaggcgcgaagtgcccgacctggcctcccgggtccgctcggtgcgggaggcggcggagcggatggccttcaacatgcccgtgcagggcaccgccgccgacctgatgaagatcgccatggtcaagctcttccccaggctaaagcccctgggggcccacctcctcctccaggtgcacgacgagctggtcctggaggtgcccgaggaccgggccgaggaggccaaggccctggtcaaggaggtcatggagaacacctaccccttggacgtgcccctcgaggtggaggtgggcgtgggtcgggactggctggaggcgaagggggattgaagcggtcgac

SEQ ID NO: 2756 - DNA, 2605 bp, Artificial Sequence
  Description of Artificial Sequence: Synthetic DNA sequence of Thermus Rt41A DNA Polymerase Y760D
atgaaatacctgctgccgaccgctgctgctggtctgctgctcctcgctgcccagccggcgatggccatggatatcggaattaattcggatccgaattccccactttttgacctggaggaaccccccaagcgggtgcttctggtggacggccaccacctggcctaccgcaccttctacgccctgagcctcaccacctcccggggggagccggtgcagatggtctacggcttcgcccggagcctcctcaaggccttgaaggaggacgggcaggcggtggtcgtggtctttgacgccaaggccccctccttccgccacgaggcctacgaggcctacaaggcgggccgggcccccaccccggaggacttcccccgccagctcgccttggtcaagcggctggtggaccttctgggcctggtccgcctcgaggccccgggttacgaggcggacgacgtcctgggcaccctggccaagaaggccgaaagggaggggatggaggtgcgcatcctcacgggagaccgggacttcttccagctcctctccgagaaggtctcggtcctcctgccggacgggaccctggtcaccccaaaggacgtccaggagaagtacggggtgccgccggagcgctgggtggacttccgcgccctcacgggggaccgctcggacaacatccccggggtggcggggataggggagaagaccgcccttcgactcctcgcggagtgggggagcgtggagaacctcctgaagaacctggaccgggtgaagccggactcggtccggcgcaagatagaggcgcaccttgaggacctccgcctctccttggacctggcccgcatccgcaccgacctccccttggaggtggactttaaggccctgcgccgcaggacccccgacctggagggcctgagggcctttttggaggagctggagttcggaagcctccttcatgagttcggcctcctgggaggggagaagccccgggaggaggccccctggcccccgcccgaaggggccttcgtaggcttcctcctctcccgcaaggagcccatgtgggcggagcttctggccctggcggccgccgcagagggccgggtccaccgggcaacaagcccggttgaggccctggccgacctcaaggaggcccgggggttcctggccaaggacctggccgttttggccctgcgggagggggtggccctggaccccacggacgaccccctcctggtggcctacctcctggacccggccaacaccaaccccgagggggtggcccggcgctacgggggcgagttcacggaggacgcagcggagagggccctcctctccgagaggctcttccagaacctctttccccggctttccgagaagctcctctggctctaccaggaggtggagcggcccctctcccgggtcttggcccacatggaggcccggggggtgaggctggacgtcccccttctggaggccctctcctttgagctggagaaggagatggagcgcctggagggggaggtcttccgcttggccggccaccccttcaacctcaactcccgcgaccagctggaaagggtcctctttgacgagctgggccttaccccggtgggtcggacggagaagacgggcaagcgctccaccgcccagggggccctggaggccctccggggggcccaccccatcgtggagctcatcctccagtaccgggagctttccaagctcaaaagcacctacctggaccccctgccccggctcgtccacccgcggacgggccggcttcacacccgcttcaaccagacggccacggccacgggaaggctttccagctccgaccccaacctgcagaacatccccgtgcgcacccccttggggcagcgcatccgcaaggccttcgtggccgaggaggggtggctccttttggcggcggactactcccagatcgagcttcgggtcctggcccacctctcgggggacgagaacctgaagcgggtcttccgggaggggaaggacatccataccgaaaccgccgcctggatgttcggcttagaccccgctctagtggatccaaagatgcgccgggcggccaagacggtcaacttcggcgtcctctacgggatgtccgcccacaggctctcccaggagctcggcatagactacaaggaggcggaggcctttattgagcgctacttccagagcttccccaaggtgcgggcctggatagaaaggaccctggaggagggccggacgcggggctacgtggagaccctgttcggcaggaggcgcgatgtgcccgacctggcctcccgggtccgctcggtgcgggaggcggcggagcggatggccttcaacatgcccgtgcagggcaccgccgccgacctgatgaagatcgccatggtcaagctcttccccaggctaaagcccctgggggcccacctcctcctccaggtgcacgacgagctggtcctggaggtgcccgaggaccgggccgaggaggccaaggccctggtcaaggaggtcatggagaacacctaccccttggacgtgcccctcgaggtggaggtgggcgtgggtcgggactggctggaggcgaagggggattgaagcggtcgac

SEQ ID NO: 2757 - DNA, 2605 bp, Artificial Sequence
  Description of Artificial Sequence: Synthetic DNA sequence of Thermus Rt41A DNA Polymerase Y760F
atgaaatacctgctgccgaccgctgctgctggtctgctgctcctcgctgcccagccggcgatggccatggatatcggaattaattcggatccgaattccccactttttgacctggaggaaccccccaagcgggtgcttctggtggacggccaccacctggcctaccgcaccttctacgccctgagcctcaccacctcccggggggagccggtgcagatggtctacggcttcgcccggagcctcctcaaggccttgaaggaggacgggcaggcggtggtcgtggtctttgacgccaaggccccctccttccgccacgaggcctacgaggcctacaaggcgggccgggcccccaccccggaggacttcccccgccagctcgccttggtcaagcggctggtggaccttctgggcctggtccgcctcgaggccccgggttacgaggcggacgacgtcctgggcaccctggccaagaaggccgaaagggaggggatggaggtgcgcatcctcacgggagaccgggacttcttccagctcctctccgagaaggtctcggtcctcctgccggacgggaccctggtcaccccaaaggacgtccaggagaagtacggggtgccgccggagcgctgggtggacttccgcgccctcacgggggaccgctcggacaacatccccggggtggcggggataggggagaagaccgcccttcgactcctcgcggagtgggggagcgtggagaacctcctgaagaacctggaccgggtgaagccggactcggtccggcgcaagatagaggcgcaccttgaggacctccgcctctccttggacctggcccgcatccgcaccgacctccccttggaggtggactttaaggccctgcgccgcaggacccccgacctggagggcctgagggcctttttggaggagctggagttcggaagcctccttcatgagttcggcctcctgggaggggagaagccccgggaggaggccccctggcccccgcccgaaggggccttcgtaggcttcctcctctcccgcaaggagcccatgtgggcggagcttctggccctggcggccgccgcagagggccgggtccaccgggcaacaagcccggttgaggccctggccgacctcaaggaggcccgggggttcctggccaaggacctggccgttttggccctgcgggagggggtggccctggaccccacggacgaccccctcctggtggcctacctcctggacccggccaacaccaaccccgagggggtggcccggcgctacgggggcgagttcacggaggacgcagcggagagggccctcctctccgagaggctcttccagaacctctttccccggctttccgagaagctcctctggctctaccaggaggtggagcggcccctctcccgggtcttggcccacatggaggcccggggggtgaggctggacgtcccccttctggaggccctctcctttgagctggagaaggagatggagcgcctggagggggaggtcttccgcttggccggccaccccttcaacctcaactcccgcgaccagctggaaagggtcctctttgacgagctgggccttaccccggtgggtcggacggagaagacgggcaagcgctccaccgcccagggggccctggaggccctccggggggcccaccccatcgtggagctcatcctccagtaccgggagctttccaagctcaaaagcacctacctggaccccctgccccggctcgtccacccgcggacgggccggcttcacacccgcttcaaccagacggccacggccacgggaaggctttccagctccgaccccaacctgcagaacatccccgtgcgcacccccttggggcagcgcatccgcaaggccttcgtggccgaggaggggtggctccttttggcggcggactactcccagatcgagcttcgggtcctggcccacctctcgggggacgagaacctgaagcgggtcttccgggaggggaaggacatccataccgaaaccgccgcctggatgttcggcttagaccccgctctagtggatccaaagatgcgccgggcggccaagacggtcaacttcggcgtcctctacgggatgtccgcccacaggctctcccaggagctcggcatagactacaaggaggcggaggcctttattgagcgctacttccagagcttccccaaggtgcgggcctggatagaaaggaccctggaggagggccggacgcggggctacgtggagaccctgttcggcaggaggcgctttgtgcccgacctggcctcccgggtccgctcggtgcgggaggcggcggagcggatggccttcaacatgcccgtgcagggcaccgccgccgacctgatgaagatcgccatggtcaagctcttccccaggctaaagcccctgggggcccacctcctcctccaggtgcacgacgagctggtcctggaggtgcccgaggaccgggccgaggaggccaaggccctggtcaaggaggtcatggagaacacctaccccttggacgtgcccctcgaggtggaggtgggcgtgggtcgggactggctggaggcgaagggggattgaagcggtcgac

SEQ ID NO: 2758 - DNA, 2605 bp, Artificial Sequence
  Description of Artificial Sequence: Synthetic DNA sequence of Thermus Rt41A DNA Polymerase Y760S
atgaaatacctgctgccgaccgctgctgctggtctgctgctcctcgctgcccagccggcgatggccatggatatcggaattaattcggatccgaattccccactttttgacctggaggaaccccccaagcgggtgcttctggtggacggccaccacctggcctaccgcaccttctacgccctgagcctcaccacctcccggggggagccggtgcagatggtctacggcttcgcccggagcctcctcaaggccttgaaggaggacgggcaggcggtggtcgtggtctttgacgccaaggccccctccttccgccacgaggcctacgaggcctacaaggcgggccgggcccccaccccggaggacttcccccgccagctcgccttggtcaagcggctggtggaccttctgggcctggtccgcctcgaggccccgggttacgaggcggacgacgtcctgggcaccctggccaagaaggccgaaagggaggggatggaggtgcgcatcctcacgggagaccgggacttcttccagctcctctccgagaaggtctcggtcctcctgccggacgggaccctggtcaccccaaaggacgtccaggagaagtacggggtgccgccggagcgctgggtggacttccgcgccctcacgggggaccgctcggacaacatccccggggtggcggggataggggagaagaccgcccttcgactcctcgcggagtgggggagcgtggagaacctcctgaagaacctggaccgggtgaagccggactcggtccggcgcaagatagaggcgcaccttgaggacctccgcctctccttggacctggcccgcatccgcaccgacctccccttggaggtggactttaaggccctgcgccgcaggacccccgacctggagggcctgagggcctttttggaggagctggagttcggaagcctccttcatgagttcggcctcctgggaggggagaagccccgggaggaggccccctggcccccgcccgaaggggccttcgtaggcttcctcctctcccgcaaggagcccatgtgggcggagcttctggccctggcggccgccgcagagggccgggtccaccgggcaacaagcccggttgaggccctggccgacctcaaggaggcccgggggttcctggccaaggacctggccgttttggccctgcgggagggggtggccctggaccccacggacgaccccctcctggtggcctacctcctggacccggccaacaccaaccccgagggggtggcccggcgctacgggggcgagttcacggaggacgcagcggagagggccctcctctccgagaggctcttccagaacctctttccccggctttccgagaagctcctctggctctaccaggaggtggagcggcccctctcccgggtcttggcccacatggaggcccggggggtgaggctggacgtcccccttctggaggccctctcctttgagctggagaaggagatggagcgcctggagggggaggtcttccgcttggccggccaccccttcaacctcaactcccgcgaccagctggaaagggtcctctttgacgagctgggccttaccccggtgggtcggacggagaagacgggcaagcgctccaccgcccagggggccctggaggccctccggggggcccaccccatcgtggagctcatcctccagtaccgggagctttccaagctcaaaagcacctacctggaccccctgccccggctcgtccacccgcggacgggccggcttcacacccgcttcaaccagacggccacggccacgggaaggctttccagctccgaccccaacctgcagaacatccccgtgcgcacccccttggggcagcgcatccgcaaggccttcgtggccgaggaggggtggctccttttggcggcggactactcccagatcgagcttcgggtcctggcccacctctcgggggacgagaacctgaagcgggtcttccgggaggggaaggacatccataccgaaaccgccgcctggatgttcggcttagaccccgctctagtggatccaaagatgcgccgggcggccaagacggtcaacttcggcgtcctctacgggatgtccgcccacaggctctcccaggagctcggcatagactacaaggaggcggaggcctttattgagcgctacttccagagcttccccaaggtgcgggcctggatagaaaggaccctggaggagggccggacgcggggctacgtggagaccctgttcggcaggaggcgctctgtgcccgacctggcctcccgggtccgctcggtgcgggaggcggcggagcggatggccttcaacatgcccgtgcagggcaccgccgccgacctgatgaagatcgccatggtcaagctcttccccaggctaaagcccctgggggcccacctcctcctccaggtgcacgacgagctggtcctggaggtgcccgaggaccgggccgaggaggccaaggccctggtcaaggaggtcatggagaacacctaccccttggacgtgcccctcgaggtggaggtgggcgtgggtcgggactggctggaggcgaagggggattgaagcggtcgac

SEQ ID NO: 2759 - DNA, 2605 bp, Artificial Sequence
  Description of Artificial Sequence: Synthetic DNA sequence of Thermus Rt41A DNA Polymerase Y760W
atgaaatacctgctgccgaccgctgctgctggtctgctgctcctcgctgcccagccggcgatggccatggatatcggaattaattcggatccgaattccccactttttgacctggaggaaccccccaagcgggtgcttctggtggacggccaccacctggcctaccgcaccttctacgccctgagcctcaccacctcccggggggagccggtgcagatggtctacggcttcgcccggagcctcctcaaggccttgaaggaggacgggcaggcggtggtcgtggtctttgacgccaaggccccctccttccgccacgaggcctacgaggcctacaaggcgggccgggcccccaccccggaggacttcccccgccagctcgccttggtcaagcggctggtggaccttctgggcctggtccgcctcgaggccccgggttacgaggcggacgacgtcctgggcaccctggccaagaaggccgaaagggaggggatggaggtgcgcatcctcacgggagaccgggacttcttccagctcctctccgagaaggtctcggtcctcctgccggacgggaccctggtcaccccaaaggacgtccaggagaagtacggggtgccgccggagcgctgggtggacttccgcgccctcacgggggaccgctcggacaacatccccggggtggcggggataggggagaagaccgcccttcgactcctcgcggagtgggggagcgtggagaacctcctgaagaacctggaccgggtgaagccggactcggtccggcgcaagatagaggcgcaccttgaggacctccgcctctccttggacctggcccgcatccgcaccgacctccccttggaggtggactttaaggccctgcgccgcaggacccccgacctggagggcctgagggcctttttggaggagctggagttcggaagcctccttcatgagttcggcctcctgggaggggagaagccccgggaggaggccccctggcccccgcccgaaggggccttcgtaggcttcctcctctcccgcaaggagcccatgtgggcggagcttctggccctggcggccgccgcagagggccgggtccaccgggcaacaagcccggttgaggccctggccgacctcaaggaggcccgggggttcctggccaaggacctggccgttttggccctgcgggagggggtggccctggaccccacggacgaccccctcctggtggcctacctcctggacccggccaacaccaaccccgagggggtggcccggcgctacgggggcgagttcacggaggacgcagcggagagggccctcctctccgagaggctcttccagaacctctttccccggctttccgagaagctcctctggctctaccaggaggtggagcggcccctctcccgggtcttggcccacatggaggcccggggggtgaggctggacgtcccccttctggaggccctctcctttgagctggagaaggagatggagcgcctggagggggaggtcttccgcttggccggccaccccttcaacctcaactcccgcgaccagctggaaagggtcctctttgacgagctgggccttaccccggtgggtcggacggagaagacgggcaagcgctccaccgcccagggggccctggaggccctccggggggcccaccccatcgtggagctcatcctccagtaccgggagctttccaagctcaaaagcacctacctggaccccctgccccggctcgtccacccgcggacgggccggcttcacacccgcttcaaccagacggccacggccacgggaaggctttccagctccgaccccaacctgcagaacatccccgtgcgcacccccttggggcagcgcatccgcaaggccttcgtggccgaggaggggtggctccttttggcggcggactactcccagatcgagcttcgggtcctggcccacctctcgggggacgagaacctgaagcgggtcttccgggaggggaaggacatccataccgaaaccgccgcctggatgttcggcttagaccccgctctagtggatccaaagatgcgccgggcggccaagacggtcaacttcggcgtcctctacgggatgtccgcccacaggctctcccaggagctcggcatagactacaaggaggcggaggcctttattgagcgctacttccagagcttccccaaggtgcgggcctggatagaaaggaccctggaggagggccggacgcggggctacgtggagaccctgttcggcaggaggcgctgggtgcccgacctggcctcccgggtccgctcggtgcgggaggcggcggagcggatggccttcaacatgcccgtgcagggcaccgccgccgacctgatgaagatcgccatggtcaagctcttccccaggctaaagcccctgggggcccacctcctcctccaggtgcacgacgagctggtcctggaggtgcccgaggaccgggccgaggaggccaaggccctggtcaaggaggtcatggagaacacctaccccttggacgtgcccctcgaggtggaggtgggcgtgggtcgggactggctggaggcgaagggggattgaagcggtcgac

SEQ ID NO: 2760 - DNA, 2605 bp, Artificial Sequence
  Description of Artificial Sequence: Synthetic DNA sequence of Thermus Rt41A DNA Polymerase Y760P
atgaaatacctgctgccgaccgctgctgctggtctgctgctcctcgctgcccagccggcgatggccatggatatcggaattaattcggatccgaattccccactttttgacctggaggaaccccccaagcgggtgcttctggtggacggccaccacctggcctaccgcaccttctacgccctgagcctcaccacctcccggggggagccggtgcagatggtctacggcttcgcccggagcctcctcaaggccttgaaggaggacgggcaggcggtggtcgtggtctttgacgccaaggccccctccttccgccacgaggcctacgaggcctacaaggcgggccgggcccccaccccggaggacttcccccgccagctcgccttggtcaagcggctggtggaccttctgggcctggtccgcctcgaggccccgggttacgaggcggacgacgtcctgggcaccctggccaagaaggccgaaagggaggggatggaggtgcgcatcctcacgggagaccgggacttcttccagctcctctccgagaaggtctcggtcctcctgccggacgggaccctggtcaccccaaaggacgtccaggagaagtacggggtgccgccggagcgctgggtggacttccgcgccctcacgggggaccgctcggacaacatccccggggtggcggggataggggagaagaccgcccttcgactcctcgcggagtgggggagcgtggagaacctcctgaagaacctggaccgggtgaagccggactcggtccggcgcaagatagaggcgcaccttgaggacctccgcctctccttggacctggcccgcatccgcaccgacctccccttggaggtggactttaaggccctgcgccgcaggacccccgacctggagggcctgagggcctttttggaggagctggagttcggaagcctccttcatgagttcggcctcctgggaggggagaagccccgggaggaggccccctggcccccgcccgaaggggccttcgtaggcttcctcctctcccgcaaggagcccatgtgggcggagcttctggccctggcggccgccgcagagggccgggtccaccgggcaacaagcccggttgaggccctggccgacctcaaggaggcccgggggttcctggccaaggacctggccgttttggccctgcgggagggggtggccctggaccccacggacgaccccctcctggtggcctacctcctggacccggccaacaccaaccccgagggggtggcccggcgctacgggggcgagttcacggaggacgcagcggagagggccctcctctccgagaggctcttccagaacctctttccccggctttccgagaagctcctctggctctaccaggaggtggagcggcccctctcccgggtcttggcccacatggaggcccggggggtgaggctggacgtcccccttctggaggccctctcctttgagctggagaaggagatggagcgcctggagggggaggtcttccgcttggccggccaccccttcaacctcaactcccgcgaccagctggaaagggtcctctttgacgagctgggccttaccccggtgggtcggacggagaagacgggcaagcgctccaccgcccagggggccctggaggccctccggggggcccaccccatcgtggagctcatcctccagtaccgggagctttccaagctcaaaagcacctacctggaccccctgccccggctcgtccacccgcggacgggccggcttcacacccgcttcaaccagacggccacggccacgggaaggctttccagctccgaccccaacctgcagaacatccccgtgcgcacccccttggggcagcgcatccgcaaggccttcgtggccgaggaggggtggctccttttggcggcggactactcccagatcgagcttcgggtcctggcccacctctcgggggacgagaacctgaagcgggtcttccgggaggggaaggacatccataccgaaaccgccgcctggatgttcggcttagaccccgctctagtggatccaaagatgcgccgggcggccaagacggtcaacttcggcgtcctctacgggatgtccgcccacaggctctcccaggagctcggcatagactacaaggaggcggaggcctttattgagcgctacttccagagcttccccaaggtgcgggcctggatagaaaggaccctggaggagggccggacgcggggctacgtggagaccctgttcggcaggaggcgccctgtgcccgacctggcctcccgggtccgctcggtgcgggaggcggcggagcggatggccttcaacatgcccgtgcagggcaccgccgccgacctgatgaagatcgccatggtcaagctcttccccaggctaaagcccctgggggcccacctcctcctccaggtgcacgacgagctggtcctggaggtgcccgaggaccgggccgaggaggccaaggccctggtcaaggaggtcatggagaacacctaccccttggacgtgcccctcgaggtggaggtgggcgtgggtcgggactggctggaggcgaagggggattgaagcggtcgac

SEQ ID NO: 2761 - DNA, 2605 bp, Artificial Sequence
  Description of Artificial Sequence: Synthetic DNA sequence of Thermus Rt41A DNA Polymerase Y760M
atgaaatacctgctgccgaccgctgctgctggtctgctgctcctcgctgcccagccggcgatggccatggatatcggaattaattcggatccgaattccccactttttgacctggaggaaccccccaagcgggtgcttctggtggacggccaccacctggcctaccgcaccttctacgccctgagcctcaccacctcccggggggagccggtgcagatggtctacggcttcgcccggagcctcctcaaggccttgaaggaggacgggcaggcggtggtcgtggtctttgacgccaaggccccctccttccgccacgaggcctacgaggcctacaaggcgggccgggcccccaccccggaggacttcccccgccagctcgccttggtcaagcggctggtggaccttctgggcctggtccgcctcgaggccccgggttacgaggcggacgacgtcctgggcaccctggccaagaaggccgaaagggaggggatggaggtgcgcatcctcacgggagaccgggacttcttccagctcctctccgagaaggtctcggtcctcctgccggacgggaccctggtcaccccaaaggacgtccaggagaagtacggggtgccgccggagcgctgggtggacttccgcgccctcacgggggaccgctcggacaacatccccggggtggcggggataggggagaagaccgcccttcgactcctcgcggagtgggggagcgtggagaacctcctgaagaacctggaccgggtgaagccggactcggtccggcgcaagatagaggcgcaccttgaggacctccgcctctccttggacctggcccgcatccgcaccgacctccccttggaggtggactttaaggccctgcgccgcaggacccccgacctggagggcctgagggcctttttggaggagctggagttcggaagcctccttcatgagttcggcctcctgggaggggagaagccccgggaggaggccccctggcccccgcccgaaggggccttcgtaggcttcctcctctcccgcaaggagcccatgtgggcggagcttctggccctggcggccgccgcagagggccgggtccaccgggcaacaagcccggttgaggccctggccgacctcaaggaggcccgggggttcctggccaaggacctggccgttttggccctgcgggagggggtggccctggaccccacggacgaccccctcctggtggcctacctcctggacccggccaacaccaaccccgagggggtggcccggcgctacgggggcgagttcacggaggacgcagcggagagggccctcctctccgagaggctcttccagaacctctttccccggctttccgagaagctcctctggctctaccaggaggtggagcggcccctctcccgggtcttggcccacatggaggcccggggggtgaggctggacgtcccccttctggaggccctctcctttgagctggagaaggagatggagcgcctggagggggaggtcttccgcttggccggccaccccttcaacctcaactcccgcgaccagctggaaagggtcctctttgacgagctgggccttaccccggtgggtcggacggagaagacgggcaagcgctccaccgcccagggggccctggaggccctccggggggcccaccccatcgtggagctcatcctccagtaccgggagctttccaagctcaaaagcacctacctggaccccctgccccggctcgtccacccgcggacgggccggcttcacacccgcttcaaccagacggccacggccacgggaaggctttccagctccgaccccaacctgcagaacatccccgtgcgcacccccttggggcagcgcatccgcaaggccttcgtggccgaggaggggtggctccttttggcggcggactactcccagatcgagcttcgggtcctggcccacctctcgggggacgagaacctgaagcgggtcttccgggaggggaaggacatccataccgaaaccgccgcctggatgttcggcttagaccccgctctagtggatccaaagatgcgccgggcggccaagacggtcaacttcggcgtcctctacgggatgtccgcccacaggctctcccaggagctcggcatagactacaaggaggcggaggcctttattgagcgctacttccagagcttccccaaggtgcgggcctggatagaaaggaccctggaggagggccggacgcggggctacgtggagaccctgttcggcaggaggcgcatggtgcccgacctggcctcccgggtccgctcggtgcgggaggcggcggagcggatggccttcaacatgcccgtgcagggcaccgccgccgacctgatgaagatcgccatggtcaagctcttccccaggctaaagcccctgggggcccacctcctcctccaggtgcacgacgagctggtcctggaggtgcccgaggaccgggccgaggaggccaaggccctggtcaaggaggtcatggagaacacctaccccttggacgtgcccctcgaggtggaggtgggcgtgggtcgggactggctggaggcgaagggggattgaagcggtcgac

SEQ ID NO: 2762 - DNA, 2605 bp, Artificial Sequence
  Description of Artificial Sequence: Synthetic DNA sequence of Thermus Rt41A DNA Polymerase Y760T
atgaaatacctgctgccgaccgctgctgctggtctgctgctcctcgctgcccagccggcgatggccatggatatcggaattaattcggatccgaattccccactttttgacctggaggaaccccccaagcgggtgcttctggtggacggccaccacctggcctaccgcaccttctacgccctgagcctcaccacctcccggggggagccggtgcagatggtctacggcttcgcccggagcctcctcaaggccttgaaggaggacgggcaggcggtggtcgtggtctttgacgccaaggccccctccttccgccacgaggcctacgaggcctacaaggcgggccgggcccccaccccggaggacttcccccgccagctcgccttggtcaagcggctggtggaccttctgggcctggtccgcctcgaggccccgggttacgaggcggacgacgtcctgggcaccctggccaagaaggccgaaagggaggggatggaggtgcgcatcctcacgggagaccgggacttcttccagctcctctccgagaaggtctcggtcctcctgccggacgggaccctggtcaccccaaaggacgtccaggagaagtacggggtgccgccggagcgctgggtggacttccgcgccctcacgggggaccgctcggacaacatccccggggtggcggggataggggagaagaccgcccttcgactcctcgcggagtgggggagcgtggagaacctcctgaagaacctggaccgggtgaagccggactcggtccggcgcaagatagaggcgcaccttgaggacctccgcctctccttggacctggcccgcatccgcaccgacctccccttggaggtggactttaaggccctgcgccgcaggacccccgacctggagggcctgagggcctttttggaggagctggagttcggaagcctccttcatgagttcggcctcctgggaggggagaagccccgggaggaggccccctggcccccgcccgaaggggccttcgtaggcttcctcctctcccgcaaggagcccatgtgggcggagcttctggccctggcggccgccgcagagggccgggtccaccgggcaacaagcccggttgaggccctggccgacctcaaggaggcccgggggttcctggccaaggacctggccgttttggccctgcgggagggggtggccctggaccccacggacgaccccctcctggtggcctacctcctggacccggccaacaccaaccccgagggggtggcccggcgctacgggggcgagttcacggaggacgcagcggagagggccctcctctccgagaggctcttccagaacctctttccccggctttccgagaagctcctctggctctaccaggaggtggagcggcccctctcccgggtcttggcccacatggaggcccggggggtgaggctggacgtcccccttctggaggccctctcctttgagctggagaaggagatggagcgcctggagggggaggtcttccgcttggccggccaccccttcaacctcaactcccgcgaccagctggaaagggtcctctttgacgagctgggccttaccccggtgggtcggacggagaagacgggcaagcgctccaccgcccagggggccctggaggccctccggggggcccaccccatcgtggagctcatcctccagtaccgggagctttccaagctcaaaagcacctacctggaccccctgccccggctcgtccacccgcggacgggccggcttcacacccgcttcaaccagacggccacggccacgggaaggctttccagctccgaccccaacctgcagaacatccccgtgcgcacccccttggggcagcgcatccgcaaggccttcgtggccgaggaggggtggctccttttggcggcggactactcccagatcgagcttcgggtcctggcccacctctcgggggacgagaacctgaagcgggtcttccgggaggggaaggacatccataccgaaaccgccgcctggatgttcggcttagaccccgctctagtggatccaaagatgcgccgggcggccaagacggtcaacttcggcgtcctctacgggatgtccgcccacaggctctcccaggagctcggcatagactacaaggaggcggaggcctttattgagcgctacttccagagcttccccaaggtgcgggcctggatagaaaggaccctggaggagggccggacgcggggctacgtggagaccctgttcggcaggaggcgcactgtgcccgacctggcctcccgggtccgctcggtgcgggaggcggcggagcggatggccttcaacatgcccgtgcagggcaccgccgccgacctgatgaagatcgccatggtcaagctcttccccaggctaaagcccctgggggcccacctcctcctccaggtgcacgacgagctggtcctggaggtgcccgaggaccgggccgaggaggccaaggccctggtcaaggaggtcatggagaacacctaccccttggacgtgcccctcgaggtggaggtgggcgtgggtcgggactggctggaggcgaagggggattgaagcggtcgac

SEQ ID NO: 2763 - DNA, 2605 bp, Artificial Sequence
  Description of Artificial Sequence: Synthetic DNA sequence of Thermus Rt41A DNA Polymerase Y760N
atgaaatacctgctgccgaccgctgctgctggtctgctgctcctcgctgcccagccggcgatggccatggatatcggaattaattcggatccgaattccccactttttgacctggaggaaccccccaagcgggtgcttctggtggacggccaccacctggcctaccgcaccttctacgccctgagcctcaccacctcccggggggagccggtgcagatggtctacggcttcgcccggagcctcctcaaggccttgaaggaggacgggcaggcggtggtcgtggtctttgacgccaaggccccctccttccgccacgaggcctacgaggcctacaaggcgggccgggcccccaccccggaggacttcccccgccagctcgccttggtcaagcggctggtggaccttctgggcctggtccgcctcgaggccccgggttacgaggcggacgacgtcctgggcaccctggccaagaaggccgaaagggaggggatggaggtgcgcatcctcacgggagaccgggacttcttccagctcctctccgagaaggtctcggtcctcctgccggacgggaccctggtcaccccaaaggacgtccaggagaagtacggggtgccgccggagcgctgggtggacttccgcgccctcacgggggaccgctcggacaacatccccggggtggcggggataggggagaagaccgcccttcgactcctcgcggagtgggggagcgtggagaacctcctgaagaacctggaccgggtgaagccggactcggtccggcgcaagatagaggcgcaccttgaggacctccgcctctccttggacctggcccgcatccgcaccgacctccccttggaggtggactttaaggccctgcgccgcaggacccccgacctggagggcctgagggcctttttggaggagctggagttcggaagcctccttcatgagttcggcctcctgggaggggagaagccccgggaggaggccccctggcccccgcccgaaggggccttcgtaggcttcctcctctcccgcaaggagcccatgtgggcggagcttctggccctggcggccgccgcagagggccgggtccaccgggcaacaagcccggttgaggccctggccgacctcaaggaggcccgggggttcctggccaaggacctggccgttttggccctgcgggagggggtggccctggaccccacggacgaccccctcctggtggcctacctcctggacccggccaacaccaaccccgagggggtggcccggcgctacgggggcgagttcacggaggacgcagcggagagggccctcctctccgagaggctcttccagaacctctttccccggctttccgagaagctcctctggctctaccaggaggtggagcggcccctctcccgggtcttggcccacatggaggcccggggggtgaggctggacgtcccccttctggaggccctctcctttgagctggagaaggagatggagcgcctggagggggaggtcttccgcttggccggccaccccttcaacctcaactcccgcgaccagctggaaagggtcctctttgacgagctgggccttaccccggtgggtcggacggagaagacgggcaagcgctccaccgcccagggggccctggaggccctccggggggcccaccccatcgtggagctcatcctccagtaccgggagctttccaagctcaaaagcacctacctggaccccctgccccggctcgtccacccgcggacgggccggcttcacacccgcttcaaccagacggccacggccacgggaaggctttccagctccgaccccaacctgcagaacatccccgtgcgcacccccttggggcagcgcatccgcaaggccttcgtggccgaggaggggtggctccttttggcggcggactactcccagatcgagcttcgggtcctggcccacctctcgggggacgagaacctgaagcgggtcttccgggaggggaaggacatccataccgaaaccgccgcctggatgttcggcttagaccccgctctagtggatccaaagatgcgccgggcggccaagacggtcaacttcggcgtcctctacgggatgtccgcccacaggctctcccaggagctcggcatagactacaaggaggcggaggcctttattgagcgctacttccagagcttccccaaggtgcgggcctggatagaaaggaccctggaggagggccggacgcggggctacgtggagaccctgttcggcaggaggcgcaatgtgcccgacctggcctcccgggtccgctcggtgcgggaggcggcggagcggatggccttcaacatgcccgtgcagggcaccgccgccgacctgatgaagatcgccatggtcaagctcttccccaggctaaagcccctgggggcccacctcctcctccaggtgcacgacgagctggtcctggaggtgcccgaggaccgggccgaggaggccaaggccctggtcaaggaggtcatggagaacacctaccccttggacgtgcccctcgaggtggaggtgggcgtgggtcgggactggctggaggcgaagggggattgaagcggtcgac

SEQ ID NO: 2764 - DNA, 2605 bp, Artificial Sequence
  Description of Artificial Sequence: Synthetic DNA sequence of Thermus Rt41A DNA Polymerase Y760V
atgaaatacctgctgccgaccgctgctgctggtctgctgctcctcgctgcccagccggcgatggccatggatatcggaattaattcggatccgaattccccactttttgacctggaggaaccccccaagcgggtgcttctggtggacggccaccacctggcctaccgcaccttctacgccctgagcctcaccacctcccggggggagccggtgcagatggtctacggcttcgcccggagcctcctcaaggccttgaaggaggacgggcaggcggtggtcgtggtctttgacgccaaggccccctccttccgccacgaggcctacgaggcctacaaggcgggccgggcccccaccccggaggacttcccccgccagctcgccttggtcaagcggctggtggaccttctgggcctggtccgcctcgaggccccgggttacgaggcggacgacgtcctgggcaccctggccaagaaggccgaaagggaggggatggaggtgcgcatcctcacgggagaccgggacttcttccagctcctctccgagaaggtctcggtcctcctgccggacgggaccctggtcaccccaaaggacgtccaggagaagtacggggtgccgccggagcgctgggtggacttccgcgccctcacgggggaccgctcggacaacatccccggggtggcggggataggggagaagaccgcccttcgactcctcgcggagtgggggagcgtggagaacctcctgaagaacctggaccgggtgaagccggactcggtccggcgcaagatagaggcgcaccttgaggacctccgcctctccttggacctggcccgcatccgcaccgacctccccttggaggtggactttaaggccctgcgccgcaggacccccgacctggagggcctgagggcctttttggaggagctggagttcggaagcctccttcatgagttcggcctcctgggaggggagaagccccgggaggaggccccctggcccccgcccgaaggggccttcgtaggcttcctcctctcccgcaaggagcccatgtgggcggagcttctggccctggcggccgccgcagagggccgggtccaccgggcaacaagcccggttgaggccctggccgacctcaaggaggcccgggggttcctggccaaggacctggccgttttggccctgcgggagggggtggccctggaccccacggacgaccccctcctggtggcctacctcctggacccggccaacaccaaccccgagggggtggcccggcgctacgggggcgagttcacggaggacgcagcggagagggccctcctctccgagaggctcttccagaacctctttccccggctttccgagaagctcctctggctctaccaggaggtggagcggcccctctcccgggtcttggcccacatggaggcccggggggtgaggctggacgtcccccttctggaggccctctcctttgagctggagaaggagatggagcgcctggagggggaggtcttccgcttggccggccaccccttcaacctcaactcccgcgaccagctggaaagggtcctctttgacgagctgggccttaccccggtgggtcggacggagaagacgggcaagcgctccaccgcccagggggccctggaggccctccggggggcccaccccatcgtggagctcatcctccagtaccgggagctttccaagctcaaaagcacctacctggaccccctgccccggctcgtccacccgcggacgggccggcttcacacccgcttcaaccagacggccacggccacgggaaggctttccagctccgaccccaacctgcagaacatccccgtgcgcacccccttggggcagcgcatccgcaaggccttcgtggccgaggaggggtggctccttttggcggcggactactcccagatcgagcttcgggtcctggcccacctctcgggggacgagaacctgaagcgggtcttccgggaggggaaggacatccataccgaaaccgccgcctggatgttcggcttagaccccgctctagtggatccaaagatgcgccgggcggccaagacggtcaacttcggcgtcctctacgggatgtccgcccacaggctctcccaggagctcggcatagactacaaggaggcggaggcctttattgagcgctacttccagagcttccccaaggtgcgggcctggatagaaaggaccctggaggagggccggacgcggggctacgtggagaccctgttcggcaggaggcgcgtcgtgcccgacctggcctcccgggtccgctcggtgcgggaggcggcggagcggatggccttcaacatgcccgtgcagggcaccgccgccgacctgatgaagatcgccatggtcaagctcttccccaggctaaagcccctgggggcccacctcctcctccaggtgcacgacgagctggtcctggaggtgcccgaggaccgggccgaggaggccaaggccctggtcaaggaggtcatggagaacacctaccccttggacgtgcccctcgaggtggaggtgggcgtgggtcgggactggctggaggcgaagggggattgaagcggtcgac

SEQ ID NO: 2765 - DNA, 2605 bp, Artificial Sequence
  Description of Artificial Sequence: Synthetic DNA sequence of Thermus Rt41A DNA Polymerase V761A
atgaaatacctgctgccgaccgctgctgctggtctgctgctcctcgctgcccagccggcgatggccatggatatcggaattaattcggatccgaattccccactttttgacctggaggaaccccccaagcgggtgcttctggtggacggccaccacctggcctaccgcaccttctacgccctgagcctcaccacctcccggggggagccggtgcagatggtctacggcttcgcccggagcctcctcaaggccttgaaggaggacgggcaggcggtggtcgtggtctttgacgccaaggccccctccttccgccacgaggcctacgaggcctacaaggcgggccgggcccccaccccggaggacttcccccgccagctcgccttggtcaagcggctggtggaccttctgggcctggtccgcctcgaggccccgggttacgaggcggacgacgtcctgggcaccctggccaagaaggccgaaagggaggggatggaggtgcgcatcctcacgggagaccgggacttcttccagctcctctccgagaaggtctcggtcctcctgccggacgggaccctggtcaccccaaaggacgtccaggagaagtacggggtgccgccggagcgctgggtggacttccgcgccctcacgggggaccgctcggacaacatccccggggtggcggggataggggagaagaccgcccttcgactcctcgcggagtgggggagcgtggagaacctcctgaagaacctggaccgggtgaagccggactcggtccggcgcaagatagaggcgcaccttgaggacctccgcctctccttggacctggcccgcatccgcaccgacctccccttggaggtggactttaaggccctgcgccgcaggacccccgacctggagggcctgagggcctttttggaggagctggagttcggaagcctccttcatgagttcggcctcctgggaggggagaagccccgggaggaggccccctggcccccgcccgaaggggccttcgtaggcttcctcctctcccgcaaggagcccatgtgggcggagcttctggccctggcggccgccgcagagggccgggtccaccgggcaacaagcccggttgaggccctggccgacctcaaggaggcccgggggttcctggccaaggacctggccgttttggccctgcgggagggggtggccctggaccccacggacgaccccctcctggtggcctacctcctggacccggccaacaccaaccccgagggggtggcccggcgctacgggggcgagttcacggaggacgcagcggagagggccctcctctccgagaggctcttccagaacctctttccccggctttccgagaagctcctctggctctaccaggaggtggagcggcccctctcccgggtcttggcccacatggaggcccggggggtgaggctggacgtcccccttctggaggccctctcctttgagctggagaaggagatggagcgcctggagggggaggtcttccgcttggccggccaccccttcaacctcaactcccgcgaccagctggaaagggtcctctttgacgagctgggccttaccccggtgggtcggacggagaagacgggcaagcgctccaccgcccagggggccctggaggccctccggggggcccaccccatcgtggagctcatcctccagtaccgggagctttccaagctcaaaagcacctacctggaccccctgccccggctcgtccacccgcggacgggccggcttcacacccgcttcaaccagacggccacggccacgggaaggctttccagctccgaccccaacctgcagaacatccccgtgcgcacccccttggggcagcgcatccgcaaggccttcgtggccgaggaggggtggctccttttggcggcggactactcccagatcgagcttcgggtcctggcccacctctcgggggacgagaacctgaagcgggtcttccgggaggggaaggacatccataccgaaaccgccgcctggatgttcggcttagaccccgctctagtggatccaaagatgcgccgggcggccaagacggtcaacttcggcgtcctctacgggatgtccgcccacaggctctcccaggagctcggcatagactacaaggaggcggaggcctttattgagcgctacttccagagcttccccaaggtgcgggcctggatagaaaggaccctggaggagggccggacgcggggctacgtggagaccctgttcggcaggaggcgctatgctcccgacctggcctcccgggtccgctcggtgcgggaggcggcggagcggatggccttcaacatgcccgtgcagggcaccgccgccgacctgatgaagatcgccatggtcaagctcttccccaggctaaagcccctgggggcccacctcctcctccaggtgcacgacgagctggtcctggaggtgcccgaggaccgggccgaggaggccaaggccctggtcaaggaggtcatggagaacacctaccccttggacgtgcccctcgaggtggaggtgggcgtgggtcgggactggctggaggcgaagggggattgaagcggtcgac

SEQ ID NO: 2766 - DNA, 2605 bp, Artificial Sequence
  Description of Artificial Sequence: Synthetic DNA sequence of Thermus Rt41A DNA Polymerase V761R
atgaaatacctgctgccgaccgctgctgctggtctgctgctcctcgctgcccagccggcgatggccatggatatcggaattaattcggatccgaattccccactttttgacctggaggaaccccccaagcgggtgcttctggtggacggccaccacctggcctaccgcaccttctacgccctgagcctcaccacctcccggggggagccggtgcagatggtctacggcttcgcccggagcctcctcaaggccttgaaggaggacgggcaggcggtggtcgtggtctttgacgccaaggccccctccttccgccacgaggcctacgaggcctacaaggcgggccgggcccccaccccggaggacttcccccgccagctcgccttggtcaagcggctggtggaccttctgggcctggtccgcctcgaggccccgggttacgaggcggacgacgtcctgggcaccctggccaagaaggccgaaagggaggggatggaggtgcgcatcctcacgggagaccgggacttcttccagctcctctccgagaaggtctcggtcctcctgccggacgggaccctggtcaccccaaaggacgtccaggagaagtacggggtgccgccggagcgctgggtggacttccgcgccctcacgggggaccgctcggacaacatccccggggtggcggggataggggagaagaccgcccttcgactcctcgcggagtgggggagcgtggagaacctcctgaagaacctggaccgggtgaagccggactcggtccggcgcaagatagaggcgcaccttgaggacctccgcctctccttggacctggcccgcatccgcaccgacctccccttggaggtggactttaaggccctgcgccgcaggacccccgacctggagggcctgagggcctttttggaggagctggagttcggaagcctccttcatgagttcggcctcctgggaggggagaagccccgggaggaggccccctggcccccgcccgaaggggccttcgtaggcttcctcctctcccgcaaggagcccatgtgggcggagcttctggccctggcggccgccgcagagggccgggtccaccgggcaacaagcccggttgaggccctggccgacctcaaggaggcccgggggttcctggccaaggacctggccgttttggccctgcgggagggggtggccctggaccccacggacgaccccctcctggtggcctacctcctggacccggccaacaccaaccccgagggggtggcccggcgctacgggggcgagttcacggaggacgcagcggagagggccctcctctccgagaggctcttccagaacctctttccccggctttccgagaagctcctctggctctaccaggaggtggagcggcccctctcccgggtcttggcccacatggaggcccggggggtgaggctggacgtcccccttctggaggccctctcctttgagctggagaaggagatggagcgcctggagggggaggtcttccgcttggccggccaccccttcaacctcaactcccgcgaccagctggaaagggtcctctttgacgagctgggccttaccccggtgggtcggacggagaagacgggcaagcgctccaccgcccagggggccctggaggccctccggggggcccaccccatcgtggagctcatcctccagtaccgggagctttccaagctcaaaagcacctacctggaccccctgccccggctcgtccacccgcggacgggccggcttcacacccgcttcaaccagacggccacggccacgggaaggctttccagctccgaccccaacctgcagaacatccccgtgcgcacccccttggggcagcgcatccgcaaggccttcgtggccgaggaggggtggctccttttggcggcggactactcccagatcgagcttcgggtcctggcccacctctcgggggacgagaacctgaagcgggtcttccgggaggggaaggacatccataccgaaaccgccgcctggatgttcggcttagaccccgctctagtggatccaaagatgcgccgggcggccaagacggtcaacttcggcgtcctctacgggatgtccgcccacaggctctcccaggagctcggcatagactacaaggaggcggaggcctttattgagcgctacttccagagcttccccaaggtgcgggcctggatagaaaggaccctggaggagggccggacgcggggctacgtggagaccctgttcggcaggaggcgctatcgacccgacctggcctcccgggtccgctcggtgcgggaggcggcggagcggatggccttcaacatgcccgtgcagggcaccgccgccgacctgatgaagatcgccatggtcaagctcttccccaggctaaagcccctgggggcccacctcctcctccaggtgcacgacgagctggtcctggaggtgcccgaggaccgggccgaggaggccaaggccctggtcaaggaggtcatggagaacacctaccccttggacgtgcccctcgaggtggaggtgggcgtgggtcgggactggctggaggcgaagggggattgaagcggtcgac

SEQ ID NO: 2767 - DNA, 2605 bp, Artificial Sequence
  Description of Artificial Sequence: Synthetic DNA sequence of Thermus Rt41A DNA Polymerase V761C
atgaaatacctgctgccgaccgctgctgctggtctgctgctcctcgctgcccagccggcgatggccatggatatcggaattaattcggatccgaattccccactttttgacctggaggaaccccccaagcgggtgcttctggtggacggccaccacctggcctaccgcaccttctacgccctgagcctcaccacctcccggggggagccggtgcagatggtctacggcttcgcccggagcctcctcaaggccttgaaggaggacgggcaggcggtggtcgtggtctttgacgccaaggccccctccttccgccacgaggcctacgaggcctacaaggcgggccgggcccccaccccggaggacttcccccgccagctcgccttggtcaagcggctggtggaccttctgggcctggtccgcctcgaggccccgggttacgaggcggacgacgtcctgggcaccctggccaagaaggccgaaagggaggggatggaggtgcgcatcctcacgggagaccgggacttcttccagctcctctccgagaaggtctcggtcctcctgccggacgggaccctggtcaccccaaaggacgtccaggagaagtacggggtgccgccggagcgctgggtggacttccgcgccctcacgggggaccgctcggacaacatccccggggtggcggggataggggagaagaccgcccttcgactcctcgcggagtgggggagcgtggagaacctcctgaagaacctggaccgggtgaagccggactcggtccggcgcaagatagaggcgcaccttgaggacctccgcctctccttggacctggcccgcatccgcaccgacctccccttggaggtggactttaaggccctgcgccgcaggacccccgacctggagggcctgagggcctttttggaggagctggagttcggaagcctccttcatgagttcggcctcctgggaggggagaagccccgggaggaggccccctggcccccgcccgaaggggccttcgtaggcttcctcctctcccgcaaggagcccatgtgggcggagcttctggccctggcggccgccgcagagggccgggtccaccgggcaacaagcccggttgaggccctggccgacctcaaggaggcccgggggttcctggccaaggacctggccgttttggccctgcgggagggggtggccctggaccccacggacgaccccctcctggtggcctacctcctggacccggccaacaccaaccccgagggggtggcccggcgctacgggggcgagttcacggaggacgcagcggagagggccctcctctccgagaggctcttccagaacctctttccccggctttccgagaagctcctctggctctaccaggaggtggagcggcccctctcccgggtcttggcccacatggaggcccggggggtgaggctggacgtcccccttctggaggccctctcctttgagctggagaaggagatggagcgcctggagggggaggtcttccgcttggccggccaccccttcaacctcaactcccgcgaccagctggaaagggtcctctttgacgagctgggccttaccccggtgggtcggacggagaagacgggcaagcgctccaccgcccagggggccctggaggccctccggggggcccaccccatcgtggagctcatcctccagtaccgggagctttccaagctcaaaagcacctacctggaccccctgccccggctcgtccacccgcggacgggccggcttcacacccgcttcaaccagacggccacggccacgggaaggctttccagctccgaccccaacctgcagaacatccccgtgcgcacccccttggggcagcgcatccgcaaggccttcgtggccgaggaggggtggctccttttggcggcggactactcccagatcgagcttcgggtcctggcccacctctcgggggacgagaacctgaagcgggtcttccgggaggggaaggacatccataccgaaaccgccgcctggatgttcggcttagaccccgctctagtggatccaaagatgcgccgggcggccaagacggtcaacttcggcgtcctctacgggatgtccgcccacaggctctcccaggagctcggcatagactacaaggaggcggaggcctttattgagcgctacttccagagcttccccaaggtgcgggcctggatagaaaggaccctggaggagggccggacgcggggctacgtggagaccctgttcggcaggaggcgctattgtcccgacctggcctcccgggtccgctcggtgcgggaggcggcggagcggatggccttcaacatgcccgtgcagggcaccgccgccgacctgatgaagatcgccatggtcaagctcttccccaggctaaagcccctgggggcccacctcctcctccaggtgcacgacgagctggtcctggaggtgcccgaggaccgggccgaggaggccaaggccctggtcaaggaggtcatggagaacacctaccccttggacgtgcccctcgaggtggaggtgggcgtgggtcgggactggctggaggcgaagggggattgaagcggtcgac

SEQ ID NO: 2768 - DNA, 2605 bp, Artificial Sequence
  Description of Artificial Sequence: Synthetic DNA sequence of Thermus Rt41A DNA Polymerase V761G
atgaaatacctgctgccgaccgctgctgctggtctgctgctcctcgctgcccagccggcgatggccatggatatcggaattaattcggatccgaattccccactttttgacctggaggaaccccccaagcgggtgcttctggtggacggccaccacctggcctaccgcaccttctacgccctgagcctcaccacctcccggggggagccggtgcagatggtctacggcttcgcccggagcctcctcaaggccttgaaggaggacgggcaggcggtggtcgtggtctttgacgccaaggccccctccttccgccacgaggcctacgaggcctacaaggcgggccgggcccccaccccggaggacttcccccgccagctcgccttggtcaagcggctggtggaccttctgggcctggtccgcctcgaggccccgggttacgaggcggacgacgtcctgggcaccctggccaagaaggccgaaagggaggggatggaggtgcgcatcctcacgggagaccgggacttcttccagctcctctccgagaaggtctcggtcctcctgccggacgggaccctggtcaccccaaaggacgtccaggagaagtacggggtgccgccggagcgctgggtggacttccgcgccctcacgggggaccgctcggacaacatccccggggtggcggggataggggagaagaccgcccttcgactcctcgcggagtgggggagcgtggagaacctcctgaagaacctggaccgggtgaagccggactcggtccggcgcaagatagaggcgcaccttgaggacctccgcctctccttggacctggcccgcatccgcaccgacctccccttggaggtggactttaaggccctgcgccgcaggacccccgacctggagggcctgagggcctttttggaggagctggagttcggaagcctccttcatgagttcggcctcctgggaggggagaagccccgggaggaggccccctggcccccgcccgaaggggccttcgtaggcttcctcctctcccgcaaggagcccatgtgggcggagcttctggccctggcggccgccgcagagggccgggtccaccgggcaacaagcccggttgaggccctggccgacctcaaggaggcccgggggttcctggccaaggacctggccgttttggccctgcgggagggggtggccctggaccccacggacgaccccctcctggtggcctacctcctggacccggccaacaccaaccccgagggggtggcccggcgctacgggggcgagttcacggaggacgcagcggagagggccctcctctccgagaggctcttccagaacctctttccccggctttccgagaagctcctctggctctaccaggaggtggagcggcccctctcccgggtcttggcccacatggaggcccggggggtgaggctggacgtcccccttctggaggccctctcctttgagctggagaaggagatggagcgcctggagggggaggtcttccgcttggccggccaccccttcaacctcaactcccgcgaccagctggaaagggtcctctttgacgagctgggccttaccccggtgggtcggacggagaagacgggcaagcgctccaccgcccagggggccctggaggccctccggggggcccaccccatcgtggagctcatcctccagtaccgggagctttccaagctcaaaagcacctacctggaccccctgccccggctcgtccacccgcggacgggccggcttcacacccgcttcaaccagacggccacggccacgggaaggctttccagctccgaccccaacctgcagaacatccccgtgcgcacccccttggggcagcgcatccgcaaggccttcgtggccgaggaggggtggctccttttggcggcggactactcccagatcgagcttcgggtcctggcccacctctcgggggacgagaacctgaagcgggtcttccgggaggggaaggacatccataccgaaaccgccgcctggatgttcggcttagaccccgctctagtggatccaaagatgcgccgggcggccaagacggtcaacttcggcgtcctctacgggatgtccgcccacaggctctcccaggagctcggcatagactacaaggaggcggaggcctttattgagcgctacttccagagcttccccaaggtgcgggcctggatagaaaggaccctggaggagggccggacgcggggctacgtggagaccctgttcggcaggaggcgctatggtcccgacctggcctcccgggtccgctcggtgcgggaggcggcggagcggatggccttcaacatgcccgtgcagggcaccgccgccgacctgatgaagatcgccatggtcaagctcttccccaggctaaagcccctgggggcccacctcctcctccaggtgcacgacgagctggtcctggaggtgcccgaggaccgggccgaggaggccaaggccctggtcaaggaggtcatggagaacacctaccccttggacgtgcccctcgaggtggaggtgggcgtgggtcgggactggctggaggcgaagggggattgaagcggtcgac

SEQ ID NO: 2769 - DNA, 2605 bp, Artificial Sequence
  Description of Artificial Sequence: Synthetic DNA sequence of Thermus Rt41A DNA Polymerase V761Q
atgaaatacctgctgccgaccgctgctgctggtctgctgctcctcgctgcccagccggcgatggccatggatatcggaattaattcggatccgaattccccactttttgacctggaggaaccccccaagcgggtgcttctggtggacggccaccacctggcctaccgcaccttctacgccctgagcctcaccacctcccggggggagccggtgcagatggtctacggcttcgcccggagcctcctcaaggccttgaaggaggacgggcaggcggtggtcgtggtctttgacgccaaggccccctccttccgccacgaggcctacgaggcctacaaggcgggccgggcccccaccccggaggacttcccccgccagctcgccttggtcaagcggctggtggaccttctgggcctggtccgcctcgaggccccgggttacgaggcggacgacgtcctgggcaccctggccaagaaggccgaaagggaggggatggaggtgcgcatcctcacgggagaccgggacttcttccagctcctctccgagaaggtctcggtcctcctgccggacgggaccctggtcaccccaaaggacgtccaggagaagtacggggtgccgccggagcgctgggtggacttccgcgccctcacgggggaccgctcggacaacatccccggggtggcggggataggggagaagaccgcccttcgactcctcgcggagtgggggagcgtggagaacctcctgaagaacctggaccgggtgaagccggactcggtccggcgcaagatagaggcgcaccttgaggacctccgcctctccttggacctggcccgcatccgcaccgacctccccttggaggtggactttaaggccctgcgccgcaggacccccgacctggagggcctgagggcctttttggaggagctggagttcggaagcctccttcatgagttcggcctcctgggaggggagaagccccgggaggaggccccctggcccccgcccgaaggggccttcgtaggcttcctcctctcccgcaaggagcccatgtgggcggagcttctggccctggcggccgccgcagagggccgggtccaccgggcaacaagcccggttgaggccctggccgacctcaaggaggcccgggggttcctggccaaggacctggccgttttggccctgcgggagggggtggccctggaccccacggacgaccccctcctggtggcctacctcctggacccggccaacaccaaccccgagggggtggcccggcgctacgggggcgagttcacggaggacgcagcggagagggccctcctctccgagaggctcttccagaacctctttccccggctttccgagaagctcctctggctctaccaggaggtggagcggcccctctcccgggtcttggcccacatggaggcccggggggtgaggctggacgtcccccttctggaggccctctcctttgagctggagaaggagatggagcgcctggagggggaggtcttccgcttggccggccaccccttcaacctcaactcccgcgaccagctggaaagggtcctctttgacgagctgggccttaccccggtgggtcggacggagaagacgggcaagcgctccaccgcccagggggccctggaggccctccggggggcccaccccatcgtggagctcatcctccagtaccgggagctttccaagctcaaaagcacctacctggaccccctgccccggctcgtccacccgcggacgggccggcttcacacccgcttcaaccagacggccacggccacgggaaggctttccagctccgaccccaacctgcagaacatccccgtgcgcacccccttggggcagcgcatccgcaaggccttcgtggccgaggaggggtggctccttttggcggcggactactcccagatcgagcttcgggtcctggcccacctctcgggggacgagaacctgaagcgggtcttccgggaggggaaggacatccataccgaaaccgccgcctggatgttcggcttagaccccgctctagtggatccaaagatgcgccgggcggccaagacggtcaacttcggcgtcctctacgggatgtccgcccacaggctctcccaggagctcggcatagactacaaggaggcggaggcctttattgagcgctacttccagagcttccccaaggtgcgggcctggatagaaaggaccctggaggagggccggacgcggggctacgtggagaccctgttcggcaggaggcgctatcaacccgacctggcctcccgggtccgctcggtgcgggaggcggcggagcggatggccttcaacatgcccgtgcagggcaccgccgccgacctgatgaagatcgccatggtcaagctcttccccaggctaaagcccctgggggcccacctcctcctccaggtgcacgacgagctggtcctggaggtgcccgaggaccgggccgaggaggccaaggccctggtcaaggaggtcatggagaacacctaccccttggacgtgcccctcgaggtggaggtgggcgtgggtcgggactggctggaggcgaagggggattgaagcggtcgac

SEQ ID NO: 2770 - DNA, 2605 bp, Artificial Sequence
  Description of Artificial Sequence: Synthetic DNA sequence of Thermus Rt41A DNA Polymerase V761H
atgaaatacctgctgccgaccgctgctgctggtctgctgctcctcgctgcccagccggcgatggccatggatatcggaattaattcggatccgaattccccactttttgacctggaggaaccccccaagcgggtgcttctggtggacggccaccacctggcctaccgcaccttctacgccctgagcctcaccacctcccggggggagccggtgcagatggtctacggcttcgcccggagcctcctcaaggccttgaaggaggacgggcaggcggtggtcgtggtctttgacgccaaggccccctccttccgccacgaggcctacgaggcctacaaggcgggccgggcccccaccccggaggacttcccccgccagctcgccttggtcaagcggctggtggaccttctgggcctggtccgcctcgaggccccgggttacgaggcggacgacgtcctgggcaccctggccaagaaggccgaaagggaggggatggaggtgcgcatcctcacgggagaccgggacttcttccagctcctctccgagaaggtctcggtcctcctgccggacgggaccctggtcaccccaaaggacgtccaggagaagtacggggtgccgccggagcgctgggtggacttccgcgccctcacgggggaccgctcggacaacatccccggggtggcggggataggggagaagaccgcccttcgactcctcgcggagtgggggagcgtggagaacctcctgaagaacctggaccgggtgaagccggactcggtccggcgcaagatagaggcgcaccttgaggacctccgcctctccttggacctggcccgcatccgcaccgacctccccttggaggtggactttaaggccctgcgccgcaggacccccgacctggagggcctgagggcctttttggaggagctggagttcggaagcctccttcatgagttcggcctcctgggaggggagaagccccgggaggaggccccctggcccccgcccgaaggggccttcgtaggcttcctcctctcccgcaaggagcccatgtgggcggagcttctggccctggcggccgccgcagagggccgggtccaccgggcaacaagcccggttgaggccctggccgacctcaaggaggcccgggggttcctggccaaggacctggccgttttggccctgcgggagggggtggccctggaccccacggacgaccccctcctggtggcctacctcctggacccggccaacaccaaccccgagggggtggcccggcgctacgggggcgagttcacggaggacgcagcggagagggccctcctctccgagaggctcttccagaacctctttccccggctttccgagaagctcctctggctctaccaggaggtggagcggcccctctcccgggtcttggcccacatggaggcccggggggtgaggctggacgtcccccttctggaggccctctcctttgagctggagaaggagatggagcgcctggagggggaggtcttccgcttggccggccaccccttcaacctcaactcccgcgaccagctggaaagggtcctctttgacgagctgggccttaccccggtgggtcggacggagaagacgggcaagcgctccaccgcccagggggccctggaggccctccggggggcccaccccatcgtggagctcatcctccagtaccgggagctttccaagctcaaaagcacctacctggaccccctgccccggctcgtccacccgcggacgggccggcttcacacccgcttcaaccagacggccacggccacgggaaggctttccagctccgaccccaacctgcagaacatccccgtgcgcacccccttggggcagcgcatccgcaaggccttcgtggccgaggaggggtggctccttttggcggcggactactcccagatcgagcttcgggtcctggcccacctctcgggggacgagaacctgaagcgggtcttccgggaggggaaggacatccataccgaaaccgccgcctggatgttcggcttagaccccgctctagtggatccaaagatgcgccgggcggccaagacggtcaacttcggcgtcctctacgggatgtccgcccacaggctctcccaggagctcggcatagactacaaggaggcggaggcctttattgagcgctacttccagagcttccccaaggtgcgggcctggatagaaaggaccctggaggagggccggacgcggggctacgtggagaccctgttcggcaggaggcgctatcatcccgacctggcctcccgggtccgctcggtgcgggaggcggcggagcggatggccttcaacatgcccgtgcagggcaccgccgccgacctgatgaagatcgccatggtcaagctcttccccaggctaaagcccctgggggcccacctcctcctccaggtgcacgacgagctggtcctggaggtgcccgaggaccgggccgaggaggccaaggccctggtcaaggaggtcatggagaacacctaccccttggacgtgcccctcgaggtggaggtgggcgtgggtcgggactggctggaggcgaagggggattgaagcggtcgac

SEQ ID NO: 2771 - DNA, 2605 bp, Artificial Sequence
  Description of Artificial Sequence: Synthetic DNA sequence of Thermus Rt41A DNA Polymerase V761I
atgaaatacctgctgccgaccgctgctgctggtctgctgctcctcgctgcccagccggcgatggccatggatatcggaattaattcggatccgaattccccactttttgacctggaggaaccccccaagcgggtgcttctggtggacggccaccacctggcctaccgcaccttctacgccctgagcctcaccacctcccggggggagccggtgcagatggtctacggcttcgcccggagcctcctcaaggccttgaaggaggacgggcaggcggtggtcgtggtctttgacgccaaggccccctccttccgccacgaggcctacgaggcctacaaggcgggccgggcccccaccccggaggacttcccccgccagctcgccttggtcaagcggctggtggaccttctgggcctggtccgcctcgaggccccgggttacgaggcggacgacgtcctgggcaccctggccaagaaggccgaaagggaggggatggaggtgcgcatcctcacgggagaccgggacttcttccagctcctctccgagaaggtctcggtcctcctgccggacgggaccctggtcaccccaaaggacgtccaggagaagtacggggtgccgccggagcgctgggtggacttccgcgccctcacgggggaccgctcggacaacatccccggggtggcggggataggggagaagaccgcccttcgactcctcgcggagtgggggagcgtggagaacctcctgaagaacctggaccgggtgaagccggactcggtccggcgcaagatagaggcgcaccttgaggacctccgcctctccttggacctggcccgcatccgcaccgacctccccttggaggtggactttaaggccctgcgccgcaggacccccgacctggagggcctgagggcctttttggaggagctggagttcggaagcctccttcatgagttcggcctcctgggaggggagaagccccgggaggaggccccctggcccccgcccgaaggggccttcgtaggcttcctcctctcccgcaaggagcccatgtgggcggagcttctggccctggcggccgccgcagagggccgggtccaccgggcaacaagcccggttgaggccctggccgacctcaaggaggcccgggggttcctggccaaggacctggccgttttggccctgcgggagggggtggccctggaccccacggacgaccccctcctggtggcctacctcctggacccggccaacaccaaccccgagggggtggcccggcgctacgggggcgagttcacggaggacgcagcggagagggccctcctctccgagaggctcttccagaacctctttccccggctttccgagaagctcctctggctctaccaggaggtggagcggcccctctcccgggtcttggcccacatggaggcccggggggtgaggctggacgtcccccttctggaggccctctcctttgagctggagaaggagatggagcgcctggagggggaggtcttccgcttggccggccaccccttcaacctcaactcccgcgaccagctggaaagggtcctctttgacgagctgggccttaccccggtgggtcggacggagaagacgggcaagcgctccaccgcccagggggccctggaggccctccggggggcccaccccatcgtggagctcatcctccagtaccgggagctttccaagctcaaaagcacctacctggaccccctgccccggctcgtccacccgcggacgggccggcttcacacccgcttcaaccagacggccacggccacgggaaggctttccagctccgaccccaacctgcagaacatccccgtgcgcacccccttggggcagcgcatccgcaaggccttcgtggccgaggaggggtggctccttttggcggcggactactcccagatcgagcttcgggtcctggcccacctctcgggggacgagaacctgaagcgggtcttccgggaggggaaggacatccataccgaaaccgccgcctggatgttcggcttagaccccgctctagtggatccaaagatgcgccgggcggccaagacggtcaacttcggcgtcctctacgggatgtccgcccacaggctctcccaggagctcggcatagactacaaggaggcggaggcctttattgagcgctacttccagagcttccccaaggtgcgggcctggatagaaaggaccctggaggagggccggacgcggggctacgtggagaccctgttcggcaggaggcgctatattcccgacctggcctcccgggtccgctcggtgcgggaggcggcggagcggatggccttcaacatgcccgtgcagggcaccgccgccgacctgatgaagatcgccatggtcaagctcttccccaggctaaagcccctgggggcccacctcctcctccaggtgcacgacgagctggtcctggaggtgcccgaggaccgggccgaggaggccaaggccctggtcaaggaggtcatggagaacacctaccccttggacgtgcccctcgaggtggaggtgggcgtgggtcgggactggctggaggcgaagggggattgaagcggtcgac

SEQ ID NO: 2772 - DNA, 2605 bp, Artificial Sequence
  Description of Artificial Sequence: Synthetic DNA sequence of Thermus Rt41A DNA Polymerase V761L
atgaaatacctgctgccgaccgctgctgctggtctgctgctcctcgctgcccagccggcgatggccatggatatcggaattaattcggatccgaattccccactttttgacctggaggaaccccccaagcgggtgcttctggtggacggccaccacctggcctaccgcaccttctacgccctgagcctcaccacctcccggggggagccggtgcagatggtctacggcttcgcccggagcctcctcaaggccttgaaggaggacgggcaggcggtggtcgtggtctttgacgccaaggccccctccttccgccacgaggcctacgaggcctacaaggcgggccgggcccccaccccggaggacttcccccgccagctcgccttggtcaagcggctggtggaccttctgggcctggtccgcctcgaggccccgggttacgaggcggacgacgtcctgggcaccctggccaagaaggccgaaagggaggggatggaggtgcgcatcctcacgggagaccgggacttcttccagctcctctccgagaaggtctcggtcctcctgccggacgggaccctggtcaccccaaaggacgtccaggagaagtacggggtgccgccggagcgctgggtggacttccgcgccctcacgggggaccgctcggacaacatccccggggtggcggggataggggagaagaccgcccttcgactcctcgcggagtgggggagcgtggagaacctcctgaagaacctggaccgggtgaagccggactcggtccggcgcaagatagaggcgcaccttgaggacctccgcctctccttggacctggcccgcatccgcaccgacctccccttggaggtggactttaaggccctgcgccgcaggacccccgacctggagggcctgagggcctttttggaggagctggagttcggaagcctccttcatgagttcggcctcctgggaggggagaagccccgggaggaggccccctggcccccgcccgaaggggccttcgtaggcttcctcctctcccgcaaggagcccatgtgggcggagcttctggccctggcggccgccgcagagggccgggtccaccgggcaacaagcccggttgaggccctggccgacctcaaggaggcccgggggttcctggccaaggacctggccgttttggccctgcgggagggggtggccctggaccccacggacgaccccctcctggtggcctacctcctggacccggccaacaccaaccccgagggggtggcccggcgctacgggggcgagttcacggaggacgcagcggagagggccctcctctccgagaggctcttccagaacctctttccccggctttccgagaagctcctctggctctaccaggaggtggagcggcccctctcccgggtcttggcccacatggaggcccggggggtgaggctggacgtcccccttctggaggccctctcctttgagctggagaaggagatggagcgcctggagggggaggtcttccgcttggccggccaccccttcaacctcaactcccgcgaccagctggaaagggtcctctttgacgagctgggccttaccccggtgggtcggacggagaagacgggcaagcgctccaccgcccagggggccctggaggccctccggggggcccaccccatcgtggagctcatcctccagtaccgggagctttccaagctcaaaagcacctacctggaccccctgccccggctcgtccacccgcggacgggccggcttcacacccgcttcaaccagacggccacggccacgggaaggctttccagctccgaccccaacctgcagaacatccccgtgcgcacccccttggggcagcgcatccgcaaggccttcgtggccgaggaggggtggctccttttggcggcggactactcccagatcgagcttcgggtcctggcccacctctcgggggacgagaacctgaagcgggtcttccgggaggggaaggacatccataccgaaaccgccgcctggatgttcggcttagaccccgctctagtggatccaaagatgcgccgggcggccaagacggtcaacttcggcgtcctctacgggatgtccgcccacaggctctcccaggagctcggcatagactacaaggaggcggaggcctttattgagcgctacttccagagcttccccaaggtgcgggcctggatagaaaggaccctggaggagggccggacgcggggctacgtggagaccctgttcggcaggaggcgctatttacccgacctggcctcccgggtccgctcggtgcgggaggcggcggagcggatggccttcaacatgcccgtgcagggcaccgccgccgacctgatgaagatcgccatggtcaagctcttccccaggctaaagcccctgggggcccacctcctcctccaggtgcacgacgagctggtcctggaggtgcccgaggaccgggccgaggaggccaaggccctggtcaaggaggtcatggagaacacctaccccttggacgtgcccctcgaggtggaggtgggcgtgggtcgggactggctggaggcgaagggggattgaagcggtcgac

SEQ ID NO: 2773 - DNA, 2605 bp, Artificial Sequence
  Description of Artificial Sequence: Synthetic DNA sequence of Thermus Rt41A DNA Polymerase V761K
atgaaatacctgctgccgaccgctgctgctggtctgctgctcctcgctgcccagccggcgatggccatggatatcggaattaattcggatccgaattccccactttttgacctggaggaaccccccaagcgggtgcttctggtggacggccaccacctggcctaccgcaccttctacgccctgagcctcaccacctcccggggggagccggtgcagatggtctacggcttcgcccggagcctcctcaaggccttgaaggaggacgggcaggcggtggtcgtggtctttgacgccaaggccccctccttccgccacgaggcctacgaggcctacaaggcgggccgggcccccaccccggaggacttcccccgccagctcgccttggtcaagcggctggtggaccttctgggcctggtccgcctcgaggccccgggttacgaggcggacgacgtcctgggcaccctggccaagaaggccgaaagggaggggatggaggtgcgcatcctcacgggagaccgggacttcttccagctcctctccgagaaggtctcggtcctcctgccggacgggaccctggtcaccccaaaggacgtccaggagaagtacggggtgccgccggagcgctgggtggacttccgcgccctcacgggggaccgctcggacaacatccccggggtggcggggataggggagaagaccgcccttcgactcctcgcggagtgggggagcgtggagaacctcctgaagaacctggaccgggtgaagccggactcggtccggcgcaagatagaggcgcaccttgaggacctccgcctctccttggacctggcccgcatccgcaccgacctccccttggaggtggactttaaggccctgcgccgcaggacccccgacctggagggcctgagggcctttttggaggagctggagttcggaagcctccttcatgagttcggcctcctgggaggggagaagccccgggaggaggccccctggcccccgcccgaaggggccttcgtaggcttcctcctctcccgcaaggagcccatgtgggcggagcttctggccctggcggccgccgcagagggccgggtccaccgggcaacaagcccggttgaggccctggccgacctcaaggaggcccgggggttcctggccaaggacctggccgttttggccctgcgggagggggtggccctggaccccacggacgaccccctcctggtggcctacctcctggacccggccaacaccaaccccgagggggtggcccggcgctacgggggcgagttcacggaggacgcagcggagagggccctcctctccgagaggctcttccagaacctctttccccggctttccgagaagctcctctggctctaccaggaggtggagcggcccctctcccgggtcttggcccacatggaggcccggggggtgaggctggacgtcccccttctggaggccctctcctttgagctggagaaggagatggagcgcctggagggggaggtcttccgcttggccggccaccccttcaacctcaactcccgcgaccagctggaaagggtcctctttgacgagctgggccttaccccggtgggtcggacggagaagacgggcaagcgctccaccgcccagggggccctggaggccctccggggggcccaccccatcgtggagctcatcctccagtaccgggagctttccaagctcaaaagcacctacctggaccccctgccccggctcgtccacccgcggacgggccggcttcacacccgcttcaaccagacggccacggccacgggaaggctttccagctccgaccccaacctgcagaacatccccgtgcgcacccccttggggcagcgcatccgcaaggccttcgtggccgaggaggggtggctccttttggcggcggactactcccagatcgagcttcgggtcctggcccacctctcgggggacgagaacctgaagcgggtcttccgggaggggaaggacatccataccgaaaccgccgcctggatgttcggcttagaccccgctctagtggatccaaagatgcgccgggcggccaagacggtcaacttcggcgtcctctacgggatgtccgcccacaggctctcccaggagctcggcatagactacaaggaggcggaggcctttattgagcgctacttccagagcttccccaaggtgcgggcctggatagaaaggaccctggaggagggccggacgcggggctacgtggagaccctgttcggcaggaggcgctataaacccgacctggcctcccgggtccgctcggtgcgggaggcggcggagcggatggccttcaacatgcccgtgcagggcaccgccgccgacctgatgaagatcgccatggtcaagctcttccccaggctaaagcccctgggggcccacctcctcctccaggtgcacgacgagctggtcctggaggtgcccgaggaccgggccgaggaggccaaggccctggtcaaggaggtcatggagaacacctaccccttggacgtgcccctcgaggtggaggtgggcgtgggtcgggactggctggaggcgaagggggattgaagcggtcgac

SEQ ID NO: 2774 - DNA, 2605 bp, Artificial Sequence
  Description of Artificial Sequence: Synthetic DNA sequence of Thermus Rt41A DNA Polymerase V761E
atgaaatacctgctgccgaccgctgctgctggtctgctgctcctcgctgcccagccggcgatggccatggatatcggaattaattcggatccgaattccccactttttgacctggaggaaccccccaagcgggtgcttctggtggacggccaccacctggcctaccgcaccttctacgccctgagcctcaccacctcccggggggagccggtgcagatggtctacggcttcgcccggagcctcctcaaggccttgaaggaggacgggcaggcggtggtcgtggtctttgacgccaaggccccctccttccgccacgaggcctacgaggcctacaaggcgggccgggcccccaccccggaggacttcccccgccagctcgccttggtcaagcggctggtggaccttctgggcctggtccgcctcgaggccccgggttacgaggcggacgacgtcctgggcaccctggccaagaaggccgaaagggaggggatggaggtgcgcatcctcacgggagaccgggacttcttccagctcctctccgagaaggtctcggtcctcctgccggacgggaccctggtcaccccaaaggacgtccaggagaagtacggggtgccgccggagcgctgggtggacttccgcgccctcacgggggaccgctcggacaacatccccggggtggcggggataggggagaagaccgcccttcgactcctcgcggagtgggggagcgtggagaacctcctgaagaacctggaccgggtgaagccggactcggtccggcgcaagatagaggcgcaccttgaggacctccgcctctccttggacctggcccgcatccgcaccgacctccccttggaggtggactttaaggccctgcgccgcaggacccccgacctggagggcctgagggcctttttggaggagctggagttcggaagcctccttcatgagttcggcctcctgggaggggagaagccccgggaggaggccccctggcccccgcccgaaggggccttcgtaggcttcctcctctcccgcaaggagcccatgtgggcggagcttctggccctggcggccgccgcagagggccgggtccaccgggcaacaagcccggttgaggccctggccgacctcaaggaggcccgggggttcctggccaaggacctggccgttttggccctgcgggagggggtggccctggaccccacggacgaccccctcctggtggcctacctcctggacccggccaacaccaaccccgagggggtggcccggcgctacgggggcgagttcacggaggacgcagcggagagggccctcctctccgagaggctcttccagaacctctttccccggctttccgagaagctcctctggctctaccaggaggtggagcggcccctctcccgggtcttggcccacatggaggcccggggggtgaggctggacgtcccccttctggaggccctctcctttgagctggagaaggagatggagcgcctggagggggaggtcttccgcttggccggccaccccttcaacctcaactcccgcgaccagctggaaagggtcctctttgacgagctgggccttaccccggtgggtcggacggagaagacgggcaagcgctccaccgcccagggggccctggaggccctccggggggcccaccccatcgtggagctcatcctccagtaccgggagctttccaagctcaaaagcacctacctggaccccctgccccggctcgtccacccgcggacgggccggcttcacacccgcttcaaccagacggccacggccacgggaaggctttccagctccgaccccaacctgcagaacatccccgtgcgcacccccttggggcagcgcatccgcaaggccttcgtggccgaggaggggtggctccttttggcggcggactactcccagatcgagcttcgggtcctggcccacctctcgggggacgagaacctgaagcgggtcttccgggaggggaaggacatccataccgaaaccgccgcctggatgttcggcttagaccccgctctagtggatccaaagatgcgccgggcggccaagacggtcaacttcggcgtcctctacgggatgtccgcccacaggctctcccaggagctcggcatagactacaaggaggcggaggcctttattgagcgctacttccagagcttccccaaggtgcgggcctggatagaaaggaccctggaggagggccggacgcggggctacgtggagaccctgttcggcaggaggcgctatgaacccgacctggcctcccgggtccgctcggtgcgggaggcggcggagcggatggccttcaacatgcccgtgcagggcaccgccgccgacctgatgaagatcgccatggtcaagctcttccccaggctaaagcccctgggggcccacctcctcctccaggtgcacgacgagctggtcctggaggtgcccgaggaccgggccgaggaggccaaggccctggtcaaggaggtcatggagaacacctaccccttggacgtgcccctcgaggtggaggtgggcgtgggtcgggactggctggaggcgaagggggattgaagcggtcgac

SEQ ID NO: 2775 - DNA, 2605 bp, Artificial Sequence
  Description of Artificial Sequence: Synthetic DNA sequence of Thermus Rt41A DNA Polymerase V761D
atgaaatacctgctgccgaccgctgctgctggtctgctgctcctcgctgcccagccggcgatggccatggatatcggaattaattcggatccgaattccccactttttgacctggaggaaccccccaagcgggtgcttctggtggacggccaccacctggcctaccgcaccttctacgccctgagcctcaccacctcccggggggagccggtgcagatggtctacggcttcgcccggagcctcctcaaggccttgaaggaggacgggcaggcggtggtcgtggtctttgacgccaaggccccctccttccgccacgaggcctacgaggcctacaaggcgggccgggcccccaccccggaggacttcccccgccagctcgccttggtcaagcggctggtggaccttctgggcctggtccgcctcgaggccccgggttacgaggcggacgacgtcctgggcaccctggccaagaaggccgaaagggaggggatggaggtgcgcatcctcacgggagaccgggacttcttccagctcctctccgagaaggtctcggtcctcctgccggacgggaccctggtcaccccaaaggacgtccaggagaagtacggggtgccgccggagcgctgggtggacttccgcgccctcacgggggaccgctcggacaacatccccggggtggcggggataggggagaagaccgcccttcgactcctcgcggagtgggggagcgtggagaacctcctgaagaacctggaccgggtgaagccggactcggtccggcgcaagatagaggcgcaccttgaggacctccgcctctccttggacctggcccgcatccgcaccgacctccccttggaggtggactttaaggccctgcgccgcaggacccccgacctggagggcctgagggcctttttggaggagctggagttcggaagcctccttcatgagttcggcctcctgggaggggagaagccccgggaggaggccccctggcccccgcccgaaggggccttcgtaggcttcctcctctcccgcaaggagcccatgtgggcggagcttctggccctggcggccgccgcagagggccgggtccaccgggcaacaagcccggttgaggccctggccgacctcaaggaggcccgggggttcctggccaaggacctggccgttttggccctgcgggagggggtggccctggaccccacggacgaccccctcctggtggcctacctcctggacccggccaacaccaaccccgagggggtggcccggcgctacgggggcgagttcacggaggacgcagcggagagggccctcctctccgagaggctcttccagaacctctttccccggctttccgagaagctcctctggctctaccaggaggtggagcggcccctctcccgggtcttggcccacatggaggcccggggggtgaggctggacgtcccccttctggaggccctctcctttgagctggagaaggagatggagcgcctggagggggaggtcttccgcttggccggccaccccttcaacctcaactcccgcgaccagctggaaagggtcctctttgacgagctgggccttaccccggtgggtcggacggagaagacgggcaagcgctccaccgcccagggggccctggaggccctccggggggcccaccccatcgtggagctcatcctccagtaccgggagctttccaagctcaaaagcacctacctggaccccctgccccggctcgtccacccgcggacgggccggcttcacacccgcttcaaccagacggccacggccacgggaaggctttccagctccgaccccaacctgcagaacatccccgtgcgcacccccttggggcagcgcatccgcaaggccttcgtggccgaggaggggtggctccttttggcggcggactactcccagatcgagcttcgggtcctggcccacctctcgggggacgagaacctgaagcgggtcttccgggaggggaaggacatccataccgaaaccgccgcctggatgttcggcttagaccccgctctagtggatccaaagatgcgccgggcggccaagacggtcaacttcggcgtcctctacgggatgtccgcccacaggctctcccaggagctcggcatagactacaaggaggcggaggcctttattgagcgctacttccagagcttccccaaggtgcgggcctggatagaaaggaccctggaggagggccggacgcggggctacgtggagaccctgttcggcaggaggcgctatgatcccgacctggcctcccgggtccgctcggtgcgggaggcggcggagcggatggccttcaacatgcccgtgcagggcaccgccgccgacctgatgaagatcgccatggtcaagctcttccccaggctaaagcccctgggggcccacctcctcctccaggtgcacgacgagctggtcctggaggtgcccgaggaccgggccgaggaggccaaggccctggtcaaggaggtcatggagaacacctaccccttggacgtgcccctcgaggtggaggtgggcgtgggtcgggactggctggaggcgaagggggattgaagcggtcgac

SEQ ID NO: 2776 - DNA, 2605 bp, Artificial Sequence
  Description of Artificial Sequence: Synthetic DNA sequence of Thermus Rt41A DNA Polymerase V761F
atgaaatacctgctgccgaccgctgctgctggtctgctgctcctcgctgcccagccggcgatggccatggatatcggaattaattcggatccgaattccccactttttgacctggaggaaccccccaagcgggtgcttctggtggacggccaccacctggcctaccgcaccttctacgccctgagcctcaccacctcccggggggagccggtgcagatggtctacggcttcgcccggagcctcctcaaggccttgaaggaggacgggcaggcggtggtcgtggtctttgacgccaaggccccctccttccgccacgaggcctacgaggcctacaaggcgggccgggcccccaccccggaggacttcccccgccagctcgccttggtcaagcggctggtggaccttctgggcctggtccgcctcgaggccccgggttacgaggcggacgacgtcctgggcaccctggccaagaaggccgaaagggaggggatggaggtgcgcatcctcacgggagaccgggacttcttccagctcctctccgagaaggtctcggtcctcctgccggacgggaccctggtcaccccaaaggacgtccaggagaagtacggggtgccgccggagcgctgggtggacttccgcgccctcacgggggaccgctcggacaacatccccggggtggcggggataggggagaagaccgcccttcgactcctcgcggagtgggggagcgtggagaacctcctgaagaacctggaccgggtgaagccggactcggtccggcgcaagatagaggcgcaccttgaggacctccgcctctccttggacctggcccgcatccgcaccgacctccccttggaggtggactttaaggccctgcgccgcaggacccccgacctggagggcctgagggcctttttggaggagctggagttcggaagcctccttcatgagttcggcctcctgggaggggagaagccccgggaggaggccccctggcccccgcccgaaggggccttcgtaggcttcctcctctcccgcaaggagcccatgtgggcggagcttctggccctggcggccgccgcagagggccgggtccaccgggcaacaagcccggttgaggccctggccgacctcaaggaggcccgggggttcctggccaaggacctggccgttttggccctgcgggagggggtggccctggaccccacggacgaccccctcctggtggcctacctcctggacccggccaacaccaaccccgagggggtggcccggcgctacgggggcgagttcacggaggacgcagcggagagggccctcctctccgagaggctcttccagaacctctttccccggctttccgagaagctcctctggctctaccaggaggtggagcggcccctctcccgggtcttggcccacatggaggcccggggggtgaggctggacgtcccccttctggaggccctctcctttgagctggagaaggagatggagcgcctggagggggaggtcttccgcttggccggccaccccttcaacctcaactcccgcgaccagctggaaagggtcctctttgacgagctgggccttaccccggtgggtcggacggagaagacgggcaagcgctccaccgcccagggggccctggaggccctccggggggcccaccccatcgtggagctcatcctccagtaccgggagctttccaagctcaaaagcacctacctggaccccctgccccggctcgtccacccgcggacgggccggcttcacacccgcttcaaccagacggccacggccacgggaaggctttccagctccgaccccaacctgcagaacatccccgtgcgcacccccttggggcagcgcatccgcaaggccttcgtggccgaggaggggtggctccttttggcggcggactactcccagatcgagcttcgggtcctggcccacctctcgggggacgagaacctgaagcgggtcttccgggaggggaaggacatccataccgaaaccgccgcctggatgttcggcttagaccccgctctagtggatccaaagatgcgccgggcggccaagacggtcaacttcggcgtcctctacgggatgtccgcccacaggctctcccaggagctcggcatagactacaaggaggcggaggcctttattgagcgctacttccagagcttccccaaggtgcgggcctggatagaaaggaccctggaggagggccggacgcggggctacgtggagaccctgttcggcaggaggcgctattttcccgacctggcctcccgggtccgctcggtgcgggaggcggcggagcggatggccttcaacatgcccgtgcagggcaccgccgccgacctgatgaagatcgccatggtcaagctcttccccaggctaaagcccctgggggcccacctcctcctccaggtgcacgacgagctggtcctggaggtgcccgaggaccgggccgaggaggccaaggccctggtcaaggaggtcatggagaacacctaccccttggacgtgcccctcgaggtggaggtgggcgtgggtcgggactggctggaggcgaagggggattgaagcggtcgac

SEQ ID NO: 2777 - DNA, 2605 bp, Artificial Sequence
  Description of Artificial Sequence: Synthetic DNA sequence of Thermus Rt41A DNA Polymerase V761S
atgaaatacctgctgccgaccgctgctgctggtctgctgctcctcgctgcccagccggcgatggccatggatatcggaattaattcggatccgaattccccactttttgacctggaggaaccccccaagcgggtgcttctggtggacggccaccacctggcctaccgcaccttctacgccctgagcctcaccacctcccggggggagccggtgcagatggtctacggcttcgcccggagcctcctcaaggccttgaaggaggacgggcaggcggtggtcgtggtctttgacgccaaggccccctccttccgccacgaggcctacgaggcctacaaggcgggccgggcccccaccccggaggacttcccccgccagctcgccttggtcaagcggctggtggaccttctgggcctggtccgcctcgaggccccgggttacgaggcggacgacgtcctgggcaccctggccaagaaggccgaaagggaggggatggaggtgcgcatcctcacgggagaccgggacttcttccagctcctctccgagaaggtctcggtcctcctgccggacgggaccctggtcaccccaaaggacgtccaggagaagtacggggtgccgccggagcgctgggtggacttccgcgccctcacgggggaccgctcggacaacatccccggggtggcggggataggggagaagaccgcccttcgactcctcgcggagtgggggagcgtggagaacctcctgaagaacctggaccgggtgaagccggactcggtccggcgcaagatagaggcgcaccttgaggacctccgcctctccttggacctggcccgcatccgcaccgacctccccttggaggtggactttaaggccctgcgccgcaggacccccgacctggagggcctgagggcctttttggaggagctggagttcggaagcctccttcatgagttcggcctcctgggaggggagaagccccgggaggaggccccctggcccccgcccgaaggggccttcgtaggcttcctcctctcccgcaaggagcccatgtgggcggagcttctggccctggcggccgccgcagagggccgggtccaccgggcaacaagcccggttgaggccctggccgacctcaaggaggcccgggggttcctggccaaggacctggccgttttggccctgcgggagggggtggccctggaccccacggacgaccccctcctggtggcctacctcctggacccggccaacaccaaccccgagggggtggcccggcgctacgggggcgagttcacggaggacgcagcggagagggccctcctctccgagaggctcttccagaacctctttccccggctttccgagaagctcctctggctctaccaggaggtggagcggcccctctcccgggtcttggcccacatggaggcccggggggtgaggctggacgtcccccttctggaggccctctcctttgagctggagaaggagatggagcgcctggagggggaggtcttccgcttggccggccaccccttcaacctcaactcccgcgaccagctggaaagggtcctctttgacgagctgggccttaccccggtgggtcggacggagaagacgggcaagcgctccaccgcccagggggccctggaggccctccggggggcccaccccatcgtggagctcatcctccagtaccgggagctttccaagctcaaaagcacctacctggaccccctgccccggctcgtccacccgcggacgggccggcttcacacccgcttcaaccagacggccacggccacgggaaggctttccagctccgaccccaacctgcagaacatccccgtgcgcacccccttggggcagcgcatccgcaaggccttcgtggccgaggaggggtggctccttttggcggcggactactcccagatcgagcttcgggtcctggcccacctctcgggggacgagaacctgaagcgggtcttccgggaggggaaggacatccataccgaaaccgccgcctggatgttcggcttagaccccgctctagtggatccaaagatgcgccgggcggccaagacggtcaacttcggcgtcctctacgggatgtccgcccacaggctctcccaggagctcggcatagactacaaggaggcggaggcctttattgagcgctacttccagagcttccccaaggtgcgggcctggatagaaaggaccctggaggagggccggacgcggggctacgtggagaccctgttcggcaggaggcgctattctcccgacctggcctcccgggtccgctcggtgcgggaggcggcggagcggatggccttcaacatgcccgtgcagggcaccgccgccgacctgatgaagatcgccatggtcaagctcttccccaggctaaagcccctgggggcccacctcctcctccaggtgcacgacgagctggtcctggaggtgcccgaggaccgggccgaggaggccaaggccctggtcaaggaggtcatggagaacacctaccccttggacgtgcccctcgaggtggaggtgggcgtgggtcgggactggctggaggcgaagggggattgaagcggtcgac

SEQ ID NO: 2778 - DNA, 2605 bp, Artificial Sequence
  Description of Artificial Sequence: Synthetic DNA sequence of Thermus Rt41A DNA Polymerase V761Y
atgaaatacctgctgccgaccgctgctgctggtctgctgctcctcgctgcccagccggcgatggccatggatatcggaattaattcggatccgaattccccactttttgacctggaggaaccccccaagcgggtgcttctggtggacggccaccacctggcctaccgcaccttctacgccctgagcctcaccacctcccggggggagccggtgcagatggtctacggcttcgcccggagcctcctcaaggccttgaaggaggacgggcaggcggtggtcgtggtctttgacgccaaggccccctccttccgccacgaggcctacgaggcctacaaggcgggccgggcccccaccccggaggacttcccccgccagctcgccttggtcaagcggctggtggaccttctgggcctggtccgcctcgaggccccgggttacgaggcggacgacgtcctgggcaccctggccaagaaggccgaaagggaggggatggaggtgcgcatcctcacgggagaccgggacttcttccagctcctctccgagaaggtctcggtcctcctgccggacgggaccctggtcaccccaaaggacgtccaggagaagtacggggtgccgccggagcgctgggtggacttccgcgccctcacgggggaccgctcggacaacatccccggggtggcggggataggggagaagaccgcccttcgactcctcgcggagtgggggagcgtggagaacctcctgaagaacctggaccgggtgaagccggactcggtccggcgcaagatagaggcgcaccttgaggacctccgcctctccttggacctggcccgcatccgcaccgacctccccttggaggtggactttaaggccctgcgccgcaggacccccgacctggagggcctgagggcctttttggaggagctggagttcggaagcctccttcatgagttcggcctcctgggaggggagaagccccgggaggaggccccctggcccccgcccgaaggggccttcgtaggcttcctcctctcccgcaaggagcccatgtgggcggagcttctggccctggcggccgccgcagagggccgggtccaccgggcaacaagcccggttgaggccctggccgacctcaaggaggcccgggggttcctggccaaggacctggccgttttggccctgcgggagggggtggccctggaccccacggacgaccccctcctggtggcctacctcctggacccggccaacaccaaccccgagggggtggcccggcgctacgggggcgagttcacggaggacgcagcggagagggccctcctctccgagaggctcttccagaacctctttccccggctttccgagaagctcctctggctctaccaggaggtggagcggcccctctcccgggtcttggcccacatggaggcccggggggtgaggctggacgtcccccttctggaggccctctcctttgagctggagaaggagatggagcgcctggagggggaggtcttccgcttggccggccaccccttcaacctcaactcccgcgaccagctggaaagggtcctctttgacgagctgggccttaccccggtgggtcggacggagaagacgggcaagcgctccaccgcccagggggccctggaggccctccggggggcccaccccatcgtggagctcatcctccagtaccgggagctttccaagctcaaaagcacctacctggaccccctgccccggctcgtccacccgcggacgggccggcttcacacccgcttcaaccagacggccacggccacgggaaggctttccagctccgaccccaacctgcagaacatccccgtgcgcacccccttggggcagcgcatccgcaaggccttcgtggccgaggaggggtggctccttttggcggcggactactcccagatcgagcttcgggtcctggcccacctctcgggggacgagaacctgaagcgggtcttccgggaggggaaggacatccataccgaaaccgccgcctggatgttcggcttagaccccgctctagtggatccaaagatgcgccgggcggccaagacggtcaacttcggcgtcctctacgggatgtccgcccacaggctctcccaggagctcggcatagactacaaggaggcggaggcctttattgagcgctacttccagagcttccccaaggtgcgggcctggatagaaaggaccctggaggagggccggacgcggggctacgtggagaccctgttcggcaggaggcgctattatcccgacctggcctcccgggtccgctcggtgcgggaggcggcggagcggatggccttcaacatgcccgtgcagggcaccgccgccgacctgatgaagatcgccatggtcaagctcttccccaggctaaagcccctgggggcccacctcctcctccaggtgcacgacgagctggtcctggaggtgcccgaggaccgggccgaggaggccaaggccctggtcaaggaggtcatggagaacacctaccccttggacgtgcccctcgaggtggaggtgggcgtgggtcgggactggctggaggcgaagggggattgaagcggtcgac

SEQ ID NO: 2779 - DNA, 2605 bp, Artificial Sequence
  Description of Artificial Sequence: Synthetic DNA sequence of Thermus Rt41A DNA Polymerase V761W
atgaaatacctgctgccgaccgctgctgctggtctgctgctcctcgctgcccagccggcgatggccatggatatcggaattaattcggatccgaattccccactttttgacctggaggaaccccccaagcgggtgcttctggtggacggccaccacctggcctaccgcaccttctacgccctgagcctcaccacctcccggggggagccggtgcagatggtctacggcttcgcccggagcctcctcaaggccttgaaggaggacgggcaggcggtggtcgtggtctttgacgccaaggccccctccttccgccacgaggcctacgaggcctacaaggcgggccgggcccccaccccggaggacttcccccgccagctcgccttggtcaagcggctggtggaccttctgggcctggtccgcctcgaggccccgggttacgaggcggacgacgtcctgggcaccctggccaagaaggccgaaagggaggggatggaggtgcgcatcctcacgggagaccgggacttcttccagctcctctccgagaaggtctcggtcctcctgccggacgggaccctggtcaccccaaaggacgtccaggagaagtacggggtgccgccggagcgctgggtggacttccgcgccctcacgggggaccgctcggacaacatccccggggtggcggggataggggagaagaccgcccttcgactcctcgcggagtgggggagcgtggagaacctcctgaagaacctggaccgggtgaagccggactcggtccggcgcaagatagaggcgcaccttgaggacctccgcctctccttggacctggcccgcatccgcaccgacctccccttggaggtggactttaaggccctgcgccgcaggacccccgacctggagggcctgagggcctttttggaggagctggagttcggaagcctccttcatgagttcggcctcctgggaggggagaagccccgggaggaggccccctggcccccgcccgaaggggccttcgtaggcttcctcctctcccgcaaggagcccatgtgggcggagcttctggccctggcggccgccgcagagggccgggtccaccgggcaacaagcccggttgaggccctggccgacctcaaggaggcccgggggttcctggccaaggacctggccgttttggccctgcgggagggggtggccctggaccccacggacgaccccctcctggtggcctacctcctggacccggccaacaccaaccccgagggggtggcccggcgctacgggggcgagttcacggaggacgcagcggagagggccctcctctccgagaggctcttccagaacctctttccccggctttccgagaagctcctctggctctaccaggaggtggagcggcccctctcccgggtcttggcccacatggaggcccggggggtgaggctggacgtcccccttctggaggccctctcctttgagctggagaaggagatggagcgcctggagggggaggtcttccgcttggccggccaccccttcaacctcaactcccgcgaccagctggaaagggtcctctttgacgagctgggccttaccccggtgggtcggacggagaagacgggcaagcgctccaccgcccagggggccctggaggccctccggggggcccaccccatcgtggagctcatcctccagtaccgggagctttccaagctcaaaagcacctacctggaccccctgccccggctcgtccacccgcggacgggccggcttcacacccgcttcaaccagacggccacggccacgggaaggctttccagctccgaccccaacctgcagaacatccccgtgcgcacccccttggggcagcgcatccgcaaggccttcgtggccgaggaggggtggctccttttggcggcggactactcccagatcgagcttcgggtcctggcccacctctcgggggacgagaacctgaagcgggtcttccgggaggggaaggacatccataccgaaaccgccgcctggatgttcggcttagaccccgctctagtggatccaaagatgcgccgggcggccaagacggtcaacttcggcgtcctctacgggatgtccgcccacaggctctcccaggagctcggcatagactacaaggaggcggaggcctttattgagcgctacttccagagcttccccaaggtgcgggcctggatagaaaggaccctggaggagggccggacgcggggctacgtggagaccctgttcggcaggaggcgctattggcccgacctggcctcccgggtccgctcggtgcgggaggcggcggagcggatggccttcaacatgcccgtgcagggcaccgccgccgacctgatgaagatcgccatggtcaagctcttccccaggctaaagcccctgggggcccacctcctcctccaggtgcacgacgagctggtcctggaggtgcccgaggaccgggccgaggaggccaaggccctggtcaaggaggtcatggagaacacctaccccttggacgtgcccctcgaggtggaggtgggcgtgggtcgggactggctggaggcgaagggggattgaagcggtcgac

SEQ ID NO: 2780 - DNA, 2605 bp, Artificial Sequence
  Description of Artificial Sequence: Synthetic DNA sequence of Thermus Rt41A DNA Polymerase V761P
atgaaatacctgctgccgaccgctgctgctggtctgctgctcctcgctgcccagccggcgatggccatggatatcggaattaattcggatccgaattccccactttttgacctggaggaaccccccaagcgggtgcttctggtggacggccaccacctggcctaccgcaccttctacgccctgagcctcaccacctcccggggggagccggtgcagatggtctacggcttcgcccggagcctcctcaaggccttgaaggaggacgggcaggcggtggtcgtggtctttgacgccaaggccccctccttccgccacgaggcctacgaggcctacaaggcgggccgggcccccaccccggaggacttcccccgccagctcgccttggtcaagcggctggtggaccttctgggcctggtccgcctcgaggccccgggttacgaggcggacgacgtcctgggcaccctggccaagaaggccgaaagggaggggatggaggtgcgcatcctcacgggagaccgggacttcttccagctcctctccgagaaggtctcggtcctcctgccggacgggaccctggtcaccccaaaggacgtccaggagaagtacggggtgccgccggagcgctgggtggacttccgcgccctcacgggggaccgctcggacaacatccccggggtggcggggataggggagaagaccgcccttcgactcctcgcggagtgggggagcgtggagaacctcctgaagaacctggaccgggtgaagccggactcggtccggcgcaagatagaggcgcaccttgaggacctccgcctctccttggacctggcccgcatccgcaccgacctccccttggaggtggactttaaggccctgcgccgcaggacccccgacctggagggcctgagggcctttttggaggagctggagttcggaagcctccttcatgagttcggcctcctgggaggggagaagccccgggaggaggccccctggcccccgcccgaaggggccttcgtaggcttcctcctctcccgcaaggagcccatgtgggcggagcttctggccctggcggccgccgcagagggccgggtccaccgggcaacaagcccggttgaggccctggccgacctcaaggaggcccgggggttcctggccaaggacctggccgttttggccctgcgggagggggtggccctggaccccacggacgaccccctcctggtggcctacctcctggacccggccaacaccaaccccgagggggtggcccggcgctacgggggcgagttcacggaggacgcagcggagagggccctcctctccgagaggctcttccagaacctctttccccggctttccgagaagctcctctggctctaccaggaggtggagcggcccctctcccgggtcttggcccacatggaggcccggggggtgaggctggacgtcccccttctggaggccctctcctttgagctggagaaggagatggagcgcctggagggggaggtcttccgcttggccggccaccccttcaacctcaactcccgcgaccagctggaaagggtcctctttgacgagctgggccttaccccggtgggtcggacggagaagacgggcaagcgctccaccgcccagggggccctggaggccctccggggggcccaccccatcgtggagctcatcctccagtaccgggagctttccaagctcaaaagcacctacctggaccccctgccccggctcgtccacccgcggacgggccggcttcacacccgcttcaaccagacggccacggccacgggaaggctttccagctccgaccccaacctgcagaacatccccgtgcgcacccccttggggcagcgcatccgcaaggccttcgtggccgaggaggggtggctccttttggcggcggactactcccagatcgagcttcgggtcctggcccacctctcgggggacgagaacctgaagcgggtcttccgggaggggaaggacatccataccgaaaccgccgcctggatgttcggcttagaccccgctctagtggatccaaagatgcgccgggcggccaagacggtcaacttcggcgtcctctacgggatgtccgcccacaggctctcccaggagctcggcatagactacaaggaggcggaggcctttattgagcgctacttccagagcttccccaaggtgcgggcctggatagaaaggaccctggaggagggccggacgcggggctacgtggagaccctgttcggcaggaggcgctatcctcccgacctggcctcccgggtccgctcggtgcgggaggcggcggagcggatggccttcaacatgcccgtgcagggcaccgccgccgacctgatgaagatcgccatggtcaagctcttccccaggctaaagcccctgggggcccacctcctcctccaggtgcacgacgagctggtcctggaggtgcccgaggaccgggccgaggaggccaaggccctggtcaaggaggtcatggagaacacctaccccttggacgtgcccctcgaggtggaggtgggcgtgggtcgggactggctggaggcgaagggggattgaagcggtcgac

SEQ ID NO: 2781 - DNA, 2605 bp, Artificial Sequence
  Description of Artificial Sequence: Synthetic DNA sequence of Thermus Rt41A DNA Polymerase V761M
atgaaatacctgctgccgaccgctgctgctggtctgctgctcctcgctgcccagccggcgatggccatggatatcggaattaattcggatccgaattccccactttttgacctggaggaaccccccaagcgggtgcttctggtggacggccaccacctggcctaccgcaccttctacgccctgagcctcaccacctcccggggggagccggtgcagatggtctacggcttcgcccggagcctcctcaaggccttgaaggaggacgggcaggcggtggtcgtggtctttgacgccaaggccccctccttccgccacgaggcctacgaggcctacaaggcgggccgggcccccaccccggaggacttcccccgccagctcgccttggtcaagcggctggtggaccttctgggcctggtccgcctcgaggccccgggttacgaggcggacgacgtcctgggcaccctggccaagaaggccgaaagggaggggatggaggtgcgcatcctcacgggagaccgggacttcttccagctcctctccgagaaggtctcggtcctcctgccggacgggaccctggtcaccccaaaggacgtccaggagaagtacggggtgccgccggagcgctgggtggacttccgcgccctcacgggggaccgctcggacaacatccccggggtggcggggataggggagaagaccgcccttcgactcctcgcggagtgggggagcgtggagaacctcctgaagaacctggaccgggtgaagccggactcggtccggcgcaagatagaggcgcaccttgaggacctccgcctctccttggacctggcccgcatccgcaccgacctccccttggaggtggactttaaggccctgcgccgcaggacccccgacctggagggcctgagggcctttttggaggagctggagttcggaagcctccttcatgagttcggcctcctgggaggggagaagccccgggaggaggccccctggcccccgcccgaaggggccttcgtaggcttcctcctctcccgcaaggagcccatgtgggcggagcttctggccctggcggccgccgcagagggccgggtccaccgggcaacaagcccggttgaggccctggccgacctcaaggaggcccgggggttcctggccaaggacctggccgttttggccctgcgggagggggtggccctggaccccacggacgaccccctcctggtggcctacctcctggacccggccaacaccaaccccgagggggtggcccggcgctacgggggcgagttcacggaggacgcagcggagagggccctcctctccgagaggctcttccagaacctctttccccggctttccgagaagctcctctggctctaccaggaggtggagcggcccctctcccgggtcttggcccacatggaggcccggggggtgaggctggacgtcccccttctggaggccctctcctttgagctggagaaggagatggagcgcctggagggggaggtcttccgcttggccggccaccccttcaacctcaactcccgcgaccagctggaaagggtcctctttgacgagctgggccttaccccggtgggtcggacggagaagacgggcaagcgctccaccgcccagggggccctggaggccctccggggggcccaccccatcgtggagctcatcctccagtaccgggagctttccaagctcaaaagcacctacctggaccccctgccccggctcgtccacccgcggacgggccggcttcacacccgcttcaaccagacggccacggccacgggaaggctttccagctccgaccccaacctgcagaacatccccgtgcgcacccccttggggcagcgcatccgcaaggccttcgtggccgaggaggggtggctccttttggcggcggactactcccagatcgagcttcgggtcctggcccacctctcgggggacgagaacctgaagcgggtcttccgggaggggaaggacatccataccgaaaccgccgcctggatgttcggcttagaccccgctctagtggatccaaagatgcgccgggcggccaagacggtcaacttcggcgtcctctacgggatgtccgcccacaggctctcccaggagctcggcatagactacaaggaggcggaggcctttattgagcgctacttccagagcttccccaaggtgcgggcctggatagaaaggaccctggaggagggccggacgcggggctacgtggagaccctgttcggcaggaggcgctatatgcccgacctggcctcccgggtccgctcggtgcgggaggcggcggagcggatggccttcaacatgcccgtgcagggcaccgccgccgacctgatgaagatcgccatggtcaagctcttccccaggctaaagcccctgggggcccacctcctcctccaggtgcacgacgagctggtcctggaggtgcccgaggaccgggccgaggaggccaaggccctggtcaaggaggtcatggagaacacctaccccttggacgtgcccctcgaggtggaggtgggcgtgggtcgggactggctggaggcgaagggggattgaagcggtcgac

SEQ ID NO: 2782 - DNA, 2605 bp, Artificial Sequence
  Description of Artificial Sequence: Synthetic DNA sequence of Thermus Rt41A DNA Polymerase V761T
atgaaatacctgctgccgaccgctgctgctggtctgctgctcctcgctgcccagccggcgatggccatggatatcggaattaattcggatccgaattccccactttttgacctggaggaaccccccaagcgggtgcttctggtggacggccaccacctggcctaccgcaccttctacgccctgagcctcaccacctcccggggggagccggtgcagatggtctacggcttcgcccggagcctcctcaaggccttgaaggaggacgggcaggcggtggtcgtggtctttgacgccaaggccccctccttccgccacgaggcctacgaggcctacaaggcgggccgggcccccaccccggaggacttcccccgccagctcgccttggtcaagcggctggtggaccttctgggcctggtccgcctcgaggccccgggttacgaggcggacgacgtcctgggcaccctggccaagaaggccgaaagggaggggatggaggtgcgcatcctcacgggagaccgggacttcttccagctcctctccgagaaggtctcggtcctcctgccggacgggaccctggtcaccccaaaggacgtccaggagaagtacggggtgccgccggagcgctgggtggacttccgcgccctcacgggggaccgctcggacaacatccccggggtggcggggataggggagaagaccgcccttcgactcctcgcggagtgggggagcgtggagaacctcctgaagaacctggaccgggtgaagccggactcggtccggcgcaagatagaggcgcaccttgaggacctccgcctctccttggacctggcccgcatccgcaccgacctccccttggaggtggactttaaggccctgcgccgcaggacccccgacctggagggcctgagggcctttttggaggagctggagttcggaagcctccttcatgagttcggcctcctgggaggggagaagccccgggaggaggccccctggcccccgcccgaaggggccttcgtaggcttcctcctctcccgcaaggagcccatgtgggcggagcttctggccctggcggccgccgcagagggccgggtccaccgggcaacaagcccggttgaggccctggccgacctcaaggaggcccgggggttcctggccaaggacctggccgttttggccctgcgggagggggtggccctggaccccacggacgaccccctcctggtggcctacctcctggacccggccaacaccaaccccgagggggtggcccggcgctacgggggcgagttcacggaggacgcagcggagagggccctcctctccgagaggctcttccagaacctctttccccggctttccgagaagctcctctggctctaccaggaggtggagcggcccctctcccgggtcttggcccacatggaggcccggggggtgaggctggacgtcccccttctggaggccctctcctttgagctggagaaggagatggagcgcctggagggggaggtcttccgcttggccggccaccccttcaacctcaactcccgcgaccagctggaaagggtcctctttgacgagctgggccttaccccggtgggtcggacggagaagacgggcaagcgctccaccgcccagggggccctggaggccctccggggggcccaccccatcgtggagctcatcctccagtaccgggagctttccaagctcaaaagcacctacctggaccccctgccccggctcgtccacccgcggacgggccggcttcacacccgcttcaaccagacggccacggccacgggaaggctttccagctccgaccccaacctgcagaacatccccgtgcgcacccccttggggcagcgcatccgcaaggccttcgtggccgaggaggggtggctccttttggcggcggactactcccagatcgagcttcgggtcctggcccacctctcgggggacgagaacctgaagcgggtcttccgggaggggaaggacatccataccgaaaccgccgcctggatgttcggcttagaccccgctctagtggatccaaagatgcgccgggcggccaagacggtcaacttcggcgtcctctacgggatgtccgcccacaggctctcccaggagctcggcatagactacaaggaggcggaggcctttattgagcgctacttccagagcttccccaaggtgcgggcctggatagaaaggaccctggaggagggccggacgcggggctacgtggagaccctgttcggcaggaggcgctatactcccgacctggcctcccgggtccgctcggtgcgggaggcggcggagcggatggccttcaacatgcccgtgcagggcaccgccgccgacctgatgaagatcgccatggtcaagctcttccccaggctaaagcccctgggggcccacctcctcctccaggtgcacgacgagctggtcctggaggtgcccgaggaccgggccgaggaggccaaggccctggtcaaggaggtcatggagaacacctaccccttggacgtgcccctcgaggtggaggtgggcgtgggtcgggactggctggaggcgaagggggattgaagcggtcgac

SEQ ID NO: 2783 - DNA, 2605 bp, Artificial Sequence
  Description of Artificial Sequence: Synthetic DNA sequence of Thermus Rt41A DNA Polymerase V761N
atgaaatacctgctgccgaccgctgctgctggtctgctgctcctcgctgcccagccggcgatggccatggatatcggaattaattcggatccgaattccccactttttgacctggaggaaccccccaagcgggtgcttctggtggacggccaccacctggcctaccgcaccttctacgccctgagcctcaccacctcccggggggagccggtgcagatggtctacggcttcgcccggagcctcctcaaggccttgaaggaggacgggcaggcggtggtcgtggtctttgacgccaaggccccctccttccgccacgaggcctacgaggcctacaaggcgggccgggcccccaccccggaggacttcccccgccagctcgccttggtcaagcggctggtggaccttctgggcctggtccgcctcgaggccccgggttacgaggcggacgacgtcctgggcaccctggccaagaaggccgaaagggaggggatggaggtgcgcatcctcacgggagaccgggacttcttccagctcctctccgagaaggtctcggtcctcctgccggacgggaccctggtcaccccaaaggacgtccaggagaagtacggggtgccgccggagcgctgggtggacttccgcgccctcacgggggaccgctcggacaacatccccggggtggcggggataggggagaagaccgcccttcgactcctcgcggagtgggggagcgtggagaacctcctgaagaacctggaccgggtgaagccggactcggtccggcgcaagatagaggcgcaccttgaggacctccgcctctccttggacctggcccgcatccgcaccgacctccccttggaggtggactttaaggccctgcgccgcaggacccccgacctggagggcctgagggcctttttggaggagctggagttcggaagcctccttcatgagttcggcctcctgggaggggagaagccccgggaggaggccccctggcccccgcccgaaggggccttcgtaggcttcctcctctcccgcaaggagcccatgtgggcggagcttctggccctggcggccgccgcagagggccgggtccaccgggcaacaagcccggttgaggccctggccgacctcaaggaggcccgggggttcctggccaaggacctggccgttttggccctgcgggagggggtggccctggaccccacggacgaccccctcctggtggcctacctcctggacccggccaacaccaaccccgagggggtggcccggcgctacgggggcgagttcacggaggacgcagcggagagggccctcctctccgagaggctcttccagaacctctttccccggctttccgagaagctcctctggctctaccaggaggtggagcggcccctctcccgggtcttggcccacatggaggcccggggggtgaggctggacgtcccccttctggaggccctctcctttgagctggagaaggagatggagcgcctggagggggaggtcttccgcttggccggccaccccttcaacctcaactcccgcgaccagctggaaagggtcctctttgacgagctgggccttaccccggtgggtcggacggagaagacgggcaagcgctccaccgcccagggggccctggaggccctccggggggcccaccccatcgtggagctcatcctccagtaccgggagctttccaagctcaaaagcacctacctggaccccctgccccggctcgtccacccgcggacgggccggcttcacacccgcttcaaccagacggccacggccacgggaaggctttccagctccgaccccaacctgcagaacatccccgtgcgcacccccttggggcagcgcatccgcaaggccttcgtggccgaggaggggtggctccttttggcggcggactactcccagatcgagcttcgggtcctggcccacctctcgggggacgagaacctgaagcgggtcttccgggaggggaaggacatccataccgaaaccgccgcctggatgttcggcttagaccccgctctagtggatccaaagatgcgccgggcggccaagacggtcaacttcggcgtcctctacgggatgtccgcccacaggctctcccaggagctcggcatagactacaaggaggcggaggcctttattgagcgctacttccagagcttccccaaggtgcgggcctggatagaaaggaccctggaggagggccggacgcggggctacgtggagaccctgttcggcaggaggcgctataatcccgacctggcctcccgggtccgctcggtgcgggaggcggcggagcggatggccttcaacatgcccgtgcagggcaccgccgccgacctgatgaagatcgccatggtcaagctcttccccaggctaaagcccctgggggcccacctcctcctccaggtgcacgacgagctggtcctggaggtgcccgaggaccgggccgaggaggccaaggccctggtcaaggaggtcatggagaacacctaccccttggacgtgcccctcgaggtggaggtgggcgtgggtcgggactggctggaggcgaagggggattgaagcggtcgac

SEQ ID NO: 2784 - DNA, 2605 bp, Artificial Sequence
  Description of Artificial Sequence: Synthetic DNA sequence of Thermus Rt41A DNA Polymerase P762A
atgaaatacctgctgccgaccgctgctgctggtctgctgctcctcgctgcccagccggcgatggccatggatatcggaattaattcggatccgaattccccactttttgacctggaggaaccccccaagcgggtgcttctggtggacggccaccacctggcctaccgcaccttctacgccctgagcctcaccacctcccggggggagccggtgcagatggtctacggcttcgcccggagcctcctcaaggccttgaaggaggacgggcaggcggtggtcgtggtctttgacgccaaggccccctccttccgccacgaggcctacgaggcctacaaggcgggccgggcccccaccccggaggacttcccccgccagctcgccttggtcaagcggctggtggaccttctgggcctggtccgcctcgaggccccgggttacgaggcggacgacgtcctgggcaccctggccaagaaggccgaaagggaggggatggaggtgcgcatcctcacgggagaccgggacttcttccagctcctctccgagaaggtctcggtcctcctgccggacgggaccctggtcaccccaaaggacgtccaggagaagtacggggtgccgccggagcgctgggtggacttccgcgccctcacgggggaccgctcggacaacatccccggggtggcggggataggggagaagaccgcccttcgactcctcgcggagtgggggagcgtggagaacctcctgaagaacctggaccgggtgaagccggactcggtccggcgcaagatagaggcgcaccttgaggacctccgcctctccttggacctggcccgcatccgcaccgacctccccttggaggtggactttaaggccctgcgccgcaggacccccgacctggagggcctgagggcctttttggaggagctggagttcggaagcctccttcatgagttcggcctcctgggaggggagaagccccgggaggaggccccctggcccccgcccgaaggggccttcgtaggcttcctcctctcccgcaaggagcccatgtgggcggagcttctggccctggcggccgccgcagagggccgggtccaccgggcaacaagcccggttgaggccctggccgacctcaaggaggcccgggggttcctggccaaggacctggccgttttggccctgcgggagggggtggccctggaccccacggacgaccccctcctggtggcctacctcctggacccggccaacaccaaccccgagggggtggcccggcgctacgggggcgagttcacggaggacgcagcggagagggccctcctctccgagaggctcttccagaacctctttccccggctttccgagaagctcctctggctctaccaggaggtggagcggcccctctcccgggtcttggcccacatggaggcccggggggtgaggctggacgtcccccttctggaggccctctcctttgagctggagaaggagatggagcgcctggagggggaggtcttccgcttggccggccaccccttcaacctcaactcccgcgaccagctggaaagggtcctctttgacgagctgggccttaccccggtgggtcggacggagaagacgggcaagcgctccaccgcccagggggccctggaggccctccggggggcccaccccatcgtggagctcatcctccagtaccgggagctttccaagctcaaaagcacctacctggaccccctgccccggctcgtccacccgcggacgggccggcttcacacccgcttcaaccagacggccacggccacgggaaggctttccagctccgaccccaacctgcagaacatccccgtgcgcacccccttggggcagcgcatccgcaaggccttcgtggccgaggaggggtggctccttttggcggcggactactcccagatcgagcttcgggtcctggcccacctctcgggggacgagaacctgaagcgggtcttccgggaggggaaggacatccataccgaaaccgccgcctggatgttcggcttagaccccgctctagtggatccaaagatgcgccgggcggccaagacggtcaacttcggcgtcctctacgggatgtccgcccacaggctctcccaggagctcggcatagactacaaggaggcggaggcctttattgagcgctacttccagagcttccccaaggtgcgggcctggatagaaaggaccctggaggagggccggacgcggggctacgtggagaccctgttcggcaggaggcgctatgtggctgacctggcctcccgggtccgctcggtgcgggaggcggcggagcggatggccttcaacatgcccgtgcagggcaccgccgccgacctgatgaagatcgccatggtcaagctcttccccaggctaaagcccctgggggcccacctcctcctccaggtgcacgacgagctggtcctggaggtgcccgaggaccgggccgaggaggccaaggccctggtcaaggaggtcatggagaacacctaccccttggacgtgcccctcgaggtggaggtgggcgtgggtcgggactggctggaggcgaagggggattgaagcggtcgac

SEQ ID NO: 2785 - DNA, 2605 bp, Artificial Sequence
  Description of Artificial Sequence: Synthetic DNA sequence of Thermus Rt41A DNA Polymerase P762R
atgaaatacctgctgccgaccgctgctgctggtctgctgctcctcgctgcccagccggcgatggccatggatatcggaattaattcggatccgaattccccactttttgacctggaggaaccccccaagcgggtgcttctggtggacggccaccacctggcctaccgcaccttctacgccctgagcctcaccacctcccggggggagccggtgcagatggtctacggcttcgcccggagcctcctcaaggccttgaaggaggacgggcaggcggtggtcgtggtctttgacgccaaggccccctccttccgccacgaggcctacgaggcctacaaggcgggccgggcccccaccccggaggacttcccccgccagctcgccttggtcaagcggctggtggaccttctgggcctggtccgcctcgaggccccgggttacgaggcggacgacgtcctgggcaccctggccaagaaggccgaaagggaggggatggaggtgcgcatcctcacgggagaccgggacttcttccagctcctctccgagaaggtctcggtcctcctgccggacgggaccctggtcaccccaaaggacgtccaggagaagtacggggtgccgccggagcgctgggtggacttccgcgccctcacgggggaccgctcggacaacatccccggggtggcggggataggggagaagaccgcccttcgactcctcgcggagtgggggagcgtggagaacctcctgaagaacctggaccgggtgaagccggactcggtccggcgcaagatagaggcgcaccttgaggacctccgcctctccttggacctggcccgcatccgcaccgacctccccttggaggtggactttaaggccctgcgccgcaggacccccgacctggagggcctgagggcctttttggaggagctggagttcggaagcctccttcatgagttcggcctcctgggaggggagaagccccgggaggaggccccctggcccccgcccgaaggggccttcgtaggcttcctcctctcccgcaaggagcccatgtgggcggagcttctggccctggcggccgccgcagagggccgggtccaccgggcaacaagcccggttgaggccctggccgacctcaaggaggcccgggggttcctggccaaggacctggccgttttggccctgcgggagggggtggccctggaccccacggacgaccccctcctggtggcctacctcctggacccggccaacaccaaccccgagggggtggcccggcgctacgggggcgagttcacggaggacgcagcggagagggccctcctctccgagaggctcttccagaacctctttccccggctttccgagaagctcctctggctctaccaggaggtggagcggcccctctcccgggtcttggcccacatggaggcccggggggtgaggctggacgtcccccttctggaggccctctcctttgagctggagaaggagatggagcgcctggagggggaggtcttccgcttggccggccaccccttcaacctcaactcccgcgaccagctggaaagggtcctctttgacgagctgggccttaccccggtgggtcggacggagaagacgggcaagcgctccaccgcccagggggccctggaggccctccggggggcccaccccatcgtggagctcatcctccagtaccgggagctttccaagctcaaaagcacctacctggaccccctgccccggctcgtccacccgcggacgggccggcttcacacccgcttcaaccagacggccacggccacgggaaggctttccagctccgaccccaacctgcagaacatccccgtgcgcacccccttggggcagcgcatccgcaaggccttcgtggccgaggaggggtggctccttttggcggcggactactcccagatcgagcttcgggtcctggcccacctctcgggggacgagaacctgaagcgggtcttccgggaggggaaggacatccataccgaaaccgccgcctggatgttcggcttagaccccgctctagtggatccaaagatgcgccgggcggccaagacggtcaacttcggcgtcctctacgggatgtccgcccacaggctctcccaggagctcggcatagactacaaggaggcggaggcctttattgagcgctacttccagagcttccccaaggtgcgggcctggatagaaaggaccctggaggagggccggacgcggggctacgtggagaccctgttcggcaggaggcgctatgtgcgagacctggcctcccgggtccgctcggtgcgggaggcggcggagcggatggccttcaacatgcccgtgcagggcaccgccgccgacctgatgaagatcgccatggtcaagctcttccccaggctaaagcccctgggggcccacctcctcctccaggtgcacgacgagctggtcctggaggtgcccgaggaccgggccgaggaggccaaggccctggtcaaggaggtcatggagaacacctaccccttggacgtgcccctcgaggtggaggtgggcgtgggtcgggactggctggaggcgaagggggattgaagcggtcgac

SEQ ID NO: 2786 - DNA, 2605 bp, Artificial Sequence
  Description of Artificial Sequence: Synthetic DNA sequence of Thermus Rt41A DNA Polymerase P762C
atgaaatacctgctgccgaccgctgctgctggtctgctgctcctcgctgcccagccggcgatggccatggatatcggaattaattcggatccgaattccccactttttgacctggaggaaccccccaagcgggtgcttctggtggacggccaccacctggcctaccgcaccttctacgccctgagcctcaccacctcccggggggagccggtgcagatggtctacggcttcgcccggagcctcctcaaggccttgaaggaggacgggcaggcggtggtcgtggtctttgacgccaaggccccctccttccgccacgaggcctacgaggcctacaaggcgggccgggcccccaccccggaggacttcccccgccagctcgccttggtcaagcggctggtggaccttctgggcctggtccgcctcgaggccccgggttacgaggcggacgacgtcctgggcaccctggccaagaaggccgaaagggaggggatggaggtgcgcatcctcacgggagaccgggacttcttccagctcctctccgagaaggtctcggtcctcctgccggacgggaccctggtcaccccaaaggacgtccaggagaagtacggggtgccgccggagcgctgggtggacttccgcgccctcacgggggaccgctcggacaacatccccggggtggcggggataggggagaagaccgcccttcgactcctcgcggagtgggggagcgtggagaacctcctgaagaacctggaccgggtgaagccggactcggtccggcgcaagatagaggcgcaccttgaggacctccgcctctccttggacctggcccgcatccgcaccgacctccccttggaggtggactttaaggccctgcgccgcaggacccccgacctggagggcctgagggcctttttggaggagctggagttcggaagcctccttcatgagttcggcctcctgggaggggagaagccccgggaggaggccccctggcccccgcccgaaggggccttcgtaggcttcctcctctcccgcaaggagcccatgtgggcggagcttctggccctggcggccgccgcagagggccgggtccaccgggcaacaagcccggttgaggccctggccgacctcaaggaggcccgggggttcctggccaaggacctggccgttttggccctgcgggagggggtggccctggaccccacggacgaccccctcctggtggcctacctcctggacccggccaacaccaaccccgagggggtggcccggcgctacgggggcgagttcacggaggacgcagcggagagggccctcctctccgagaggctcttccagaacctctttccccggctttccgagaagctcctctggctctaccaggaggtggagcggcccctctcccgggtcttggcccacatggaggcccggggggtgaggctggacgtcccccttctggaggccctctcctttgagctggagaaggagatggagcgcctggagggggaggtcttccgcttggccggccaccccttcaacctcaactcccgcgaccagctggaaagggtcctctttgacgagctgggccttaccccggtgggtcggacggagaagacgggcaagcgctccaccgcccagggggccctggaggccctccggggggcccaccccatcgtggagctcatcctccagtaccgggagctttccaagctcaaaagcacctacctggaccccctgccccggctcgtccacccgcggacgggccggcttcacacccgcttcaaccagacggccacggccacgggaaggctttccagctccgaccccaacctgcagaacatccccgtgcgcacccccttggggcagcgcatccgcaaggccttcgtggccgaggaggggtggctccttttggcggcggactactcccagatcgagcttcgggtcctggcccacctctcgggggacgagaacctgaagcgggtcttccgggaggggaaggacatccataccgaaaccgccgcctggatgttcggcttagaccccgctctagtggatccaaagatgcgccgggcggccaagacggtcaacttcggcgtcctctacgggatgtccgcccacaggctctcccaggagctcggcatagactacaaggaggcggaggcctttattgagcgctacttccagagcttccccaaggtgcgggcctggatagaaaggaccctggaggagggccggacgcggggctacgtggagaccctgttcggcaggaggcgctatgtgtgtgacctggcctcccgggtccgctcggtgcgggaggcggcggagcggatggccttcaacatgcccgtgcagggcaccgccgccgacctgatgaagatcgccatggtcaagctcttccccaggctaaagcccctgggggcccacctcctcctccaggtgcacgacgagctggtcctggaggtgcccgaggaccgggccgaggaggccaaggccctggtcaaggaggtcatggagaacacctaccccttggacgtgcccctcgaggtggaggtgggcgtgggtcgggactggctggaggcgaagggggattgaagcggtcgac

SEQ ID NO: 2787 - DNA, 2605 bp, Artificial Sequence
  Description of Artificial Sequence: Synthetic DNA sequence of Thermus Rt41A DNA Polymerase P762G
atgaaatacctgctgccgaccgctgctgctggtctgctgctcctcgctgcccagccggcgatggccatggatatcggaattaattcggatccgaattccccactttttgacctggaggaaccccccaagcgggtgcttctggtggacggccaccacctggcctaccgcaccttctacgccctgagcctcaccacctcccggggggagccggtgcagatggtctacggcttcgcccggagcctcctcaaggccttgaaggaggacgggcaggcggtggtcgtggtctttgacgccaaggccccctccttccgccacgaggcctacgaggcctacaaggcgggccgggcccccaccccggaggacttcccccgccagctcgccttggtcaagcggctggtggaccttctgggcctggtccgcctcgaggccccgggttacgaggcggacgacgtcctgggcaccctggccaagaaggccgaaagggaggggatggaggtgcgcatcctcacgggagaccgggacttcttccagctcctctccgagaaggtctcggtcctcctgccggacgggaccctggtcaccccaaaggacgtccaggagaagtacggggtgccgccggagcgctgggtggacttccgcgccctcacgggggaccgctcggacaacatccccggggtggcggggataggggagaagaccgcccttcgactcctcgcggagtgggggagcgtggagaacctcctgaagaacctggaccgggtgaagccggactcggtccggcgcaagatagaggcgcaccttgaggacctccgcctctccttggacctggcccgcatccgcaccgacctccccttggaggtggactttaaggccctgcgccgcaggacccccgacctggagggcctgagggcctttttggaggagctggagttcggaagcctccttcatgagttcggcctcctgggaggggagaagccccgggaggaggccccctggcccccgcccgaaggggccttcgtaggcttcctcctctcccgcaaggagcccatgtgggcggagcttctggccctggcggccgccgcagagggccgggtccaccgggcaacaagcccggttgaggccctggccgacctcaaggaggcccgggggttcctggccaaggacctggccgttttggccctgcgggagggggtggccctggaccccacggacgaccccctcctggtggcctacctcctggacccggccaacaccaaccccgagggggtggcccggcgctacgggggcgagttcacggaggacgcagcggagagggccctcctctccgagaggctcttccagaacctctttccccggctttccgagaagctcctctggctctaccaggaggtggagcggcccctctcccgggtcttggcccacatggaggcccggggggtgaggctggacgtcccccttctggaggccctctcctttgagctggagaaggagatggagcgcctggagggggaggtcttccgcttggccggccaccccttcaacctcaactcccgcgaccagctggaaagggtcctctttgacgagctgggccttaccccggtgggtcggacggagaagacgggcaagcgctccaccgcccagggggccctggaggccctccggggggcccaccccatcgtggagctcatcctccagtaccgggagctttccaagctcaaaagcacctacctggaccccctgccccggctcgtccacccgcggacgggccggcttcacacccgcttcaaccagacggccacggccacgggaaggctttccagctccgaccccaacctgcagaacatccccgtgcgcacccccttggggcagcgcatccgcaaggccttcgtggccgaggaggggtggctccttttggcggcggactactcccagatcgagcttcgggtcctggcccacctctcgggggacgagaacctgaagcgggtcttccgggaggggaaggacatccataccgaaaccgccgcctggatgttcggcttagaccccgctctagtggatccaaagatgcgccgggcggccaagacggtcaacttcggcgtcctctacgggatgtccgcccacaggctctcccaggagctcggcatagactacaaggaggcggaggcctttattgagcgctacttccagagcttccccaaggtgcgggcctggatagaaaggaccctggaggagggccggacgcggggctacgtggagaccctgttcggcaggaggcgctatgtgggtgacctggcctcccgggtccgctcggtgcgggaggcggcggagcggatggccttcaacatgcccgtgcagggcaccgccgccgacctgatgaagatcgccatggtcaagctcttccccaggctaaagcccctgggggcccacctcctcctccaggtgcacgacgagctggtcctggaggtgcccgaggaccgggccgaggaggccaaggccctggtcaaggaggtcatggagaacacctaccccttggacgtgcccctcgaggtggaggtgggcgtgggtcgggactggctggaggcgaagggggattgaagcggtcgac

SEQ ID NO: 2788 - DNA, 2605 bp, Artificial Sequence
  Description of Artificial Sequence: Synthetic DNA sequence of Thermus Rt41A DNA Polymerase P762Q
atgaaatacctgctgccgaccgctgctgctggtctgctgctcctcgctgcccagccggcgatggccatggatatcggaattaattcggatccgaattccccactttttgacctggaggaaccccccaagcgggtgcttctggtggacggccaccacctggcctaccgcaccttctacgccctgagcctcaccacctcccggggggagccggtgcagatggtctacggcttcgcccggagcctcctcaaggccttgaaggaggacgggcaggcggtggtcgtggtctttgacgccaaggccccctccttccgccacgaggcctacgaggcctacaaggcgggccgggcccccaccccggaggacttcccccgccagctcgccttggtcaagcggctggtggaccttctgggcctggtccgcctcgaggccccgggttacgaggcggacgacgtcctgggcaccctggccaagaaggccgaaagggaggggatggaggtgcgcatcctcacgggagaccgggacttcttccagctcctctccgagaaggtctcggtcctcctgccggacgggaccctggtcaccccaaaggacgtccaggagaagtacggggtgccgccggagcgctgggtggacttccgcgccctcacgggggaccgctcggacaacatccccggggtggcggggataggggagaagaccgcccttcgactcctcgcggagtgggggagcgtggagaacctcctgaagaacctggaccgggtgaagccggactcggtccggcgcaagatagaggcgcaccttgaggacctccgcctctccttggacctggcccgcatccgcaccgacctccccttggaggtggactttaaggccctgcgccgcaggacccccgacctggagggcctgagggcctttttggaggagctggagttcggaagcctccttcatgagttcggcctcctgggaggggagaagccccgggaggaggccccctggcccccgcccgaaggggccttcgtaggcttcctcctctcccgcaaggagcccatgtgggcggagcttctggccctggcggccgccgcagagggccgggtccaccgggcaacaagcccggttgaggccctggccgacctcaaggaggcccgggggttcctggccaaggacctggccgttttggccctgcgggagggggtggccctggaccccacggacgaccccctcctggtggcctacctcctggacccggccaacaccaaccccgagggggtggcccggcgctacgggggcgagttcacggaggacgcagcggagagggccctcctctccgagaggctcttccagaacctctttccccggctttccgagaagctcctctggctctaccaggaggtggagcggcccctctcccgggtcttggcccacatggaggcccggggggtgaggctggacgtcccccttctggaggccctctcctttgagctggagaaggagatggagcgcctggagggggaggtcttccgcttggccggccaccccttcaacctcaactcccgcgaccagctggaaagggtcctctttgacgagctgggccttaccccggtgggtcggacggagaagacgggcaagcgctccaccgcccagggggccctggaggccctccggggggcccaccccatcgtggagctcatcctccagtaccgggagctttccaagctcaaaagcacctacctggaccccctgccccggctcgtccacccgcggacgggccggcttcacacccgcttcaaccagacggccacggccacgggaaggctttccagctccgaccccaacctgcagaacatccccgtgcgcacccccttggggcagcgcatccgcaaggccttcgtggccgaggaggggtggctccttttggcggcggactactcccagatcgagcttcgggtcctggcccacctctcgggggacgagaacctgaagcgggtcttccgggaggggaaggacatccataccgaaaccgccgcctggatgttcggcttagaccccgctctagtggatccaaagatgcgccgggcggccaagacggtcaacttcggcgtcctctacgggatgtccgcccacaggctctcccaggagctcggcatagactacaaggaggcggaggcctttattgagcgctacttccagagcttccccaaggtgcgggcctggatagaaaggaccctggaggagggccggacgcggggctacgtggagaccctgttcggcaggaggcgctatgtgcaagacctggcctcccgggtccgctcggtgcgggaggcggcggagcggatggccttcaacatgcccgtgcagggcaccgccgccgacctgatgaagatcgccatggtcaagctcttccccaggctaaagcccctgggggcccacctcctcctccaggtgcacgacgagctggtcctggaggtgcccgaggaccgggccgaggaggccaaggccctggtcaaggaggtcatggagaacacctaccccttggacgtgcccctcgaggtggaggtgggcgtgggtcgggactggctggaggcgaagggggattgaagcggtcgac

SEQ ID NO: 2789 - DNA, 2605 bp, Artificial Sequence
  Description of Artificial Sequence: Synthetic DNA sequence of Thermus Rt41A DNA Polymerase P762H
atgaaatacctgctgccgaccgctgctgctggtctgctgctcctcgctgcccagccggcgatggccatggatatcggaattaattcggatccgaattccccactttttgacctggaggaaccccccaagcgggtgcttctggtggacggccaccacctggcctaccgcaccttctacgccctgagcctcaccacctcccggggggagccggtgcagatggtctacggcttcgcccggagcctcctcaaggccttgaaggaggacgggcaggcggtggtcgtggtctttgacgccaaggccccctccttccgccacgaggcctacgaggcctacaaggcgggccgggcccccaccccggaggacttcccccgccagctcgccttggtcaagcggctggtggaccttctgggcctggtccgcctcgaggccccgggttacgaggcggacgacgtcctgggcaccctggccaagaaggccgaaagggaggggatggaggtgcgcatcctcacgggagaccgggacttcttccagctcctctccgagaaggtctcggtcctcctgccggacgggaccctggtcaccccaaaggacgtccaggagaagtacggggtgccgccggagcgctgggtggacttccgcgccctcacgggggaccgctcggacaacatccccggggtggcggggataggggagaagaccgcccttcgactcctcgcggagtgggggagcgtggagaacctcctgaagaacctggaccgggtgaagccggactcggtccggcgcaagatagaggcgcaccttgaggacctccgcctctccttggacctggcccgcatccgcaccgacctccccttggaggtggactttaaggccctgcgccgcaggacccccgacctggagggcctgagggcctttttggaggagctggagttcggaagcctccttcatgagttcggcctcctgggaggggagaagccccgggaggaggccccctggcccccgcccgaaggggccttcgtaggcttcctcctctcccgcaaggagcccatgtgggcggagcttctggccctggcggccgccgcagagggccgggtccaccgggcaacaagcccggttgaggccctggccgacctcaaggaggcccgggggttcctggccaaggacctggccgttttggccctgcgggagggggtggccctggaccccacggacgaccccctcctggtggcctacctcctggacccggccaacaccaaccccgagggggtggcccggcgctacgggggcgagttcacggaggacgcagcggagagggccctcctctccgagaggctcttccagaacctctttccccggctttccgagaagctcctctggctctaccaggaggtggagcggcccctctcccgggtcttggcccacatggaggcccggggggtgaggctggacgtcccccttctggaggccctctcctttgagctggagaaggagatggagcgcctggagggggaggtcttccgcttggccggccaccccttcaacctcaactcccgcgaccagctggaaagggtcctctttgacgagctgggccttaccccggtgggtcggacggagaagacgggcaagcgctccaccgcccagggggccctggaggccctccggggggcccaccccatcgtggagctcatcctccagtaccgggagctttccaagctcaaaagcacctacctggaccccctgccccggctcgtccacccgcggacgggccggcttcacacccgcttcaaccagacggccacggccacgggaaggctttccagctccgaccccaacctgcagaacatccccgtgcgcacccccttggggcagcgcatccgcaaggccttcgtggccgaggaggggtggctccttttggcggcggactactcccagatcgagcttcgggtcctggcccacctctcgggggacgagaacctgaagcgggtcttccgggaggggaaggacatccataccgaaaccgccgcctggatgttcggcttagaccccgctctagtggatccaaagatgcgccgggcggccaagacggtcaacttcggcgtcctctacgggatgtccgcccacaggctctcccaggagctcggcatagactacaaggaggcggaggcctttattgagcgctacttccagagcttccccaaggtgcgggcctggatagaaaggaccctggaggagggccggacgcggggctacgtggagaccctgttcggcaggaggcgctatgtgcatgacctggcctcccgggtccgctcggtgcgggaggcggcggagcggatggccttcaacatgcccgtgcagggcaccgccgccgacctgatgaagatcgccatggtcaagctcttccccaggctaaagcccctgggggcccacctcctcctccaggtgcacgacgagctggtcctggaggtgcccgaggaccgggccgaggaggccaaggccctggtcaaggaggtcatggagaacacctaccccttggacgtgcccctcgaggtggaggtgggcgtgggtcgggactggctggaggcgaagggggattgaagcggtcgac

SEQ ID NO: 2790 - DNA, 2605 bp, Artificial Sequence
  Description of Artificial Sequence: Synthetic DNA sequence of Thermus Rt41A DNA Polymerase P762I
atgaaatacctgctgccgaccgctgctgctggtctgctgctcctcgctgcccagccggcgatggccatggatatcggaattaattcggatccgaattccccactttttgacctggaggaaccccccaagcgggtgcttctggtggacggccaccacctggcctaccgcaccttctacgccctgagcctcaccacctcccggggggagccggtgcagatggtctacggcttcgcccggagcctcctcaaggccttgaaggaggacgggcaggcggtggtcgtggtctttgacgccaaggccccctccttccgccacgaggcctacgaggcctacaaggcgggccgggcccccaccccggaggacttcccccgccagctcgccttggtcaagcggctggtggaccttctgggcctggtccgcctcgaggccccgggttacgaggcggacgacgtcctgggcaccctggccaagaaggccgaaagggaggggatggaggtgcgcatcctcacgggagaccgggacttcttccagctcctctccgagaaggtctcggtcctcctgccggacgggaccctggtcaccccaaaggacgtccaggagaagtacggggtgccgccggagcgctgggtggacttccgcgccctcacgggggaccgctcggacaacatccccggggtggcggggataggggagaagaccgcccttcgactcctcgcggagtgggggagcgtggagaacctcctgaagaacctggaccgggtgaagccggactcggtccggcgcaagatagaggcgcaccttgaggacctccgcctctccttggacctggcccgcatccgcaccgacctccccttggaggtggactttaaggccctgcgccgcaggacccccgacctggagggcctgagggcctttttggaggagctggagttcggaagcctccttcatgagttcggcctcctgggaggggagaagccccgggaggaggccccctggcccccgcccgaaggggccttcgtaggcttcctcctctcccgcaaggagcccatgtgggcggagcttctggccctggcggccgccgcagagggccgggtccaccgggcaacaagcccggttgaggccctggccgacctcaaggaggcccgggggttcctggccaaggacctggccgttttggccctgcgggagggggtggccctggaccccacggacgaccccctcctggtggcctacctcctggacccggccaacaccaaccccgagggggtggcccggcgctacgggggcgagttcacggaggacgcagcggagagggccctcctctccgagaggctcttccagaacctctttccccggctttccgagaagctcctctggctctaccaggaggtggagcggcccctctcccgggtcttggcccacatggaggcccggggggtgaggctggacgtcccccttctggaggccctctcctttgagctggagaaggagatggagcgcctggagggggaggtcttccgcttggccggccaccccttcaacctcaactcccgcgaccagctggaaagggtcctctttgacgagctgggccttaccccggtgggtcggacggagaagacgggcaagcgctccaccgcccagggggccctggaggccctccggggggcccaccccatcgtggagctcatcctccagtaccgggagctttccaagctcaaaagcacctacctggaccccctgccccggctcgtccacccgcggacgggccggcttcacacccgcttcaaccagacggccacggccacgggaaggctttccagctccgaccccaacctgcagaacatccccgtgcgcacccccttggggcagcgcatccgcaaggccttcgtggccgaggaggggtggctccttttggcggcggactactcccagatcgagcttcgggtcctggcccacctctcgggggacgagaacctgaagcgggtcttccgggaggggaaggacatccataccgaaaccgccgcctggatgttcggcttagaccccgctctagtggatccaaagatgcgccgggcggccaagacggtcaacttcggcgtcctctacgggatgtccgcccacaggctctcccaggagctcggcatagactacaaggaggcggaggcctttattgagcgctacttccagagcttccccaaggtgcgggcctggatagaaaggaccctggaggagggccggacgcggggctacgtggagaccctgttcggcaggaggcgctatgtgattgacctggcctcccgggtccgctcggtgcgggaggcggcggagcggatggccttcaacatgcccgtgcagggcaccgccgccgacctgatgaagatcgccatggtcaagctcttccccaggctaaagcccctgggggcccacctcctcctccaggtgcacgacgagctggtcctggaggtgcccgaggaccgggccgaggaggccaaggccctggtcaaggaggtcatggagaacacctaccccttggacgtgcccctcgaggtggaggtgggcgtgggtcgggactggctggaggcgaagggggattgaagcggtcgac

SEQ ID NO: 2791 - DNA, 2605 bp, Artificial Sequence
  Description of Artificial Sequence: Synthetic DNA sequence of Thermus Rt41A DNA Polymerase P762L
atgaaatacctgctgccgaccgctgctgctggtctgctgctcctcgctgcccagccggcgatggccatggatatcggaattaattcggatccgaattccccactttttgacctggaggaaccccccaagcgggtgcttctggtggacggccaccacctggcctaccgcaccttctacgccctgagcctcaccacctcccggggggagccggtgcagatggtctacggcttcgcccggagcctcctcaaggccttgaaggaggacgggcaggcggtggtcgtggtctttgacgccaaggccccctccttccgccacgaggcctacgaggcctacaaggcgggccgggcccccaccccggaggacttcccccgccagctcgccttggtcaagcggctggtggaccttctgggcctggtccgcctcgaggccccgggttacgaggcggacgacgtcctgggcaccctggccaagaaggccgaaagggaggggatggaggtgcgcatcctcacgggagaccgggacttcttccagctcctctccgagaaggtctcggtcctcctgccggacgggaccctggtcaccccaaaggacgtccaggagaagtacggggtgccgccggagcgctgggtggacttccgcgccctcacgggggaccgctcggacaacatccccggggtggcggggataggggagaagaccgcccttcgactcctcgcggagtgggggagcgtggagaacctcctgaagaacctggaccgggtgaagccggactcggtccggcgcaagatagaggcgcaccttgaggacctccgcctctccttggacctggcccgcatccgcaccgacctccccttggaggtggactttaaggccctgcgccgcaggacccccgacctggagggcctgagggcctttttggaggagctggagttcggaagcctccttcatgagttcggcctcctgggaggggagaagccccgggaggaggccccctggcccccgcccgaaggggccttcgtaggcttcctcctctcccgcaaggagcccatgtgggcggagcttctggccctggcggccgccgcagagggccgggtccaccgggcaacaagcccggttgaggccctggccgacctcaaggaggcccgggggttcctggccaaggacctggccgttttggccctgcgggagggggtggccctggaccccacggacgaccccctcctggtggcctacctcctggacccggccaacaccaaccccgagggggtggcccggcgctacgggggcgagttcacggaggacgcagcggagagggccctcctctccgagaggctcttccagaacctctttccccggctttccgagaagctcctctggctctaccaggaggtggagcggcccctctcccgggtcttggcccacatggaggcccggggggtgaggctggacgtcccccttctggaggccctctcctttgagctggagaaggagatggagcgcctggagggggaggtcttccgcttggccggccaccccttcaacctcaactcccgcgaccagctggaaagggtcctctttgacgagctgggccttaccccggtgggtcggacggagaagacgggcaagcgctccaccgcccagggggccctggaggccctccggggggcccaccccatcgtggagctcatcctccagtaccgggagctttccaagctcaaaagcacctacctggaccccctgccccggctcgtccacccgcggacgggccggcttcacacccgcttcaaccagacggccacggccacgggaaggctttccagctccgaccccaacctgcagaacatccccgtgcgcacccccttggggcagcgcatccgcaaggccttcgtggccgaggaggggtggctccttttggcggcggactactcccagatcgagcttcgggtcctggcccacctctcgggggacgagaacctgaagcgggtcttccgggaggggaaggacatccataccgaaaccgccgcctggatgttcggcttagaccccgctctagtggatccaaagatgcgccgggcggccaagacggtcaacttcggcgtcctctacgggatgtccgcccacaggctctcccaggagctcggcatagactacaaggaggcggaggcctttattgagcgctacttccagagcttccccaaggtgcgggcctggatagaaaggaccctggaggagggccggacgcggggctacgtggagaccctgttcggcaggaggcgctatgtgttagacctggcctcccgggtccgctcggtgcgggaggcggcggagcggatggccttcaacatgcccgtgcagggcaccgccgccgacctgatgaagatcgccatggtcaagctcttccccaggctaaagcccctgggggcccacctcctcctccaggtgcacgacgagctggtcctggaggtgcccgaggaccgggccgaggaggccaaggccctggtcaaggaggtcatggagaacacctaccccttggacgtgcccctcgaggtggaggtgggcgtgggtcgggactggctggaggcgaagggggattgaagcggtcgac

SEQ ID NO: 2792 - DNA, 2605 bp, Artificial Sequence
  Description of Artificial Sequence: Synthetic DNA sequence of Thermus Rt41A DNA Polymerase P762K
atgaaatacctgctgccgaccgctgctgctggtctgctgctcctcgctgcccagccggcgatggccatggatatcggaattaattcggatccgaattccccactttttgacctggaggaaccccccaagcgggtgcttctggtggacggccaccacctggcctaccgcaccttctacgccctgagcctcaccacctcccggggggagccggtgcagatggtctacggcttcgcccggagcctcctcaaggccttgaaggaggacgggcaggcggtggtcgtggtctttgacgccaaggccccctccttccgccacgaggcctacgaggcctacaaggcgggccgggcccccaccccggaggacttcccccgccagctcgccttggtcaagcggctggtggaccttctgggcctggtccgcctcgaggccccgggttacgaggcggacgacgtcctgggcaccctggccaagaaggccgaaagggaggggatggaggtgcgcatcctcacgggagaccgggacttcttccagctcctctccgagaaggtctcggtcctcctgccggacgggaccctggtcaccccaaaggacgtccaggagaagtacggggtgccgccggagcgctgggtggacttccgcgccctcacgggggaccgctcggacaacatccccggggtggcggggataggggagaagaccgcccttcgactcctcgcggagtgggggagcgtggagaacctcctgaagaacctggaccgggtgaagccggactcggtccggcgcaagatagaggcgcaccttgaggacctccgcctctccttggacctggcccgcatccgcaccgacctccccttggaggtggactttaaggccctgcgccgcaggacccccgacctggagggcctgagggcctttttggaggagctggagttcggaagcctccttcatgagttcggcctcctgggaggggagaagccccgggaggaggccccctggcccccgcccgaaggggccttcgtaggcttcctcctctcccgcaaggagcccatgtgggcggagcttctggccctggcggccgccgcagagggccgggtccaccgggcaacaagcccggttgaggccctggccgacctcaaggaggcccgggggttcctggccaaggacctggccgttttggccctgcgggagggggtggccctggaccccacggacgaccccctcctggtggcctacctcctggacccggccaacaccaaccccgagggggtggcccggcgctacgggggcgagttcacggaggacgcagcggagagggccctcctctccgagaggctcttccagaacctctttccccggctttccgagaagctcctctggctctaccaggaggtggagcggcccctctcccgggtcttggcccacatggaggcccggggggtgaggctggacgtcccccttctggaggccctctcctttgagctggagaaggagatggagcgcctggagggggaggtcttccgcttggccggccaccccttcaacctcaactcccgcgaccagctggaaagggtcctctttgacgagctgggccttaccccggtgggtcggacggagaagacgggcaagcgctccaccgcccagggggccctggaggccctccggggggcccaccccatcgtggagctcatcctccagtaccgggagctttccaagctcaaaagcacctacctggaccccctgccccggctcgtccacccgcggacgggccggcttcacacccgcttcaaccagacggccacggccacgggaaggctttccagctccgaccccaacctgcagaacatccccgtgcgcacccccttggggcagcgcatccgcaaggccttcgtggccgaggaggggtggctccttttggcggcggactactcccagatcgagcttcgggtcctggcccacctctcgggggacgagaacctgaagcgggtcttccgggaggggaaggacatccataccgaaaccgccgcctggatgttcggcttagaccccgctctagtggatccaaagatgcgccgggcggccaagacggtcaacttcggcgtcctctacgggatgtccgcccacaggctctcccaggagctcggcatagactacaaggaggcggaggcctttattgagcgctacttccagagcttccccaaggtgcgggcctggatagaaaggaccctggaggagggccggacgcggggctacgtggagaccctgttcggcaggaggcgctatgtgaaagacctggcctcccgggtccgctcggtgcgggaggcggcggagcggatggccttcaacatgcccgtgcagggcaccgccgccgacctgatgaagatcgccatggtcaagctcttccccaggctaaagcccctgggggcccacctcctcctccaggtgcacgacgagctggtcctggaggtgcccgaggaccgggccgaggaggccaaggccctggtcaaggaggtcatggagaacacctaccccttggacgtgcccctcgaggtggaggtgggcgtgggtcgggactggctggaggcgaagggggattgaagcggtcgac

SEQ ID NO: 2793 - DNA, 2605 bp, Artificial Sequence
  Description of Artificial Sequence: Synthetic DNA sequence of Thermus Rt41A DNA Polymerase P762E
atgaaatacctgctgccgaccgctgctgctggtctgctgctcctcgctgcccagccggcgatggccatggatatcggaattaattcggatccgaattccccactttttgacctggaggaaccccccaagcgggtgcttctggtggacggccaccacctggcctaccgcaccttctacgccctgagcctcaccacctcccggggggagccggtgcagatggtctacggcttcgcccggagcctcctcaaggccttgaaggaggacgggcaggcggtggtcgtggtctttgacgccaaggccccctccttccgccacgaggcctacgaggcctacaaggcgggccgggcccccaccccggaggacttcccccgccagctcgccttggtcaagcggctggtggaccttctgggcctggtccgcctcgaggccccgggttacgaggcggacgacgtcctgggcaccctggccaagaaggccgaaagggaggggatggaggtgcgcatcctcacgggagaccgggacttcttccagctcctctccgagaaggtctcggtcctcctgccggacgggaccctggtcaccccaaaggacgtccaggagaagtacggggtgccgccggagcgctgggtggacttccgcgccctcacgggggaccgctcggacaacatccccggggtggcggggataggggagaagaccgcccttcgactcctcgcggagtgggggagcgtggagaacctcctgaagaacctggaccgggtgaagccggactcggtccggcgcaagatagaggcgcaccttgaggacctccgcctctccttggacctggcccgcatccgcaccgacctccccttggaggtggactttaaggccctgcgccgcaggacccccgacctggagggcctgagggcctttttggaggagctggagttcggaagcctccttcatgagttcggcctcctgggaggggagaagccccgggaggaggccccctggcccccgcccgaaggggccttcgtaggcttcctcctctcccgcaaggagcccatgtgggcggagcttctggccctggcggccgccgcagagggccgggtccaccgggcaacaagcccggttgaggccctggccgacctcaaggaggcccgggggttcctggccaaggacctggccgttttggccctgcgggagggggtggccctggaccccacggacgaccccctcctggtggcctacctcctggacccggccaacaccaaccccgagggggtggcccggcgctacgggggcgagttcacggaggacgcagcggagagggccctcctctccgagaggctcttccagaacctctttccccggctttccgagaagctcctctggctctaccaggaggtggagcggcccctctcccgggtcttggcccacatggaggcccggggggtgaggctggacgtcccccttctggaggccctctcctttgagctggagaaggagatggagcgcctggagggggaggtcttccgcttggccggccaccccttcaacctcaactcccgcgaccagctggaaagggtcctctttgacgagctgggccttaccccggtgggtcggacggagaagacgggcaagcgctccaccgcccagggggccctggaggccctccggggggcccaccccatcgtggagctcatcctccagtaccgggagctttccaagctcaaaagcacctacctggaccccctgccccggctcgtccacccgcggacgggccggcttcacacccgcttcaaccagacggccacggccacgggaaggctttccagctccgaccccaacctgcagaacatccccgtgcgcacccccttggggcagcgcatccgcaaggccttcgtggccgaggaggggtggctccttttggcggcggactactcccagatcgagcttcgggtcctggcccacctctcgggggacgagaacctgaagcgggtcttccgggaggggaaggacatccataccgaaaccgccgcctggatgttcggcttagaccccgctctagtggatccaaagatgcgccgggcggccaagacggtcaacttcggcgtcctctacgggatgtccgcccacaggctctcccaggagctcggcatagactacaaggaggcggaggcctttattgagcgctacttccagagcttccccaaggtgcgggcctggatagaaaggaccctggaggagggccggacgcggggctacgtggagaccctgttcggcaggaggcgctatgtggaagacctggcctcccgggtccgctcggtgcgggaggcggcggagcggatggccttcaacatgcccgtgcagggcaccgccgccgacctgatgaagatcgccatggtcaagctcttccccaggctaaagcccctgggggcccacctcctcctccaggtgcacgacgagctggtcctggaggtgcccgaggaccgggccgaggaggccaaggccctggtcaaggaggtcatggagaacacctaccccttggacgtgcccctcgaggtggaggtgggcgtgggtcgggactggctggaggcgaagggggattgaagcggtcgac

SEQ ID NO: 2794 - DNA, 2605 bp, Artificial Sequence
  Description of Artificial Sequence: Synthetic DNA sequence of Thermus Rt41A DNA Polymerase P762D
atgaaatacctgctgccgaccgctgctgctggtctgctgctcctcgctgcccagccggcgatggccatggatatcggaattaattcggatccgaattccccactttttgacctggaggaaccccccaagcgggtgcttctggtggacggccaccacctggcctaccgcaccttctacgccctgagcctcaccacctcccggggggagccggtgcagatggtctacggcttcgcccggagcctcctcaaggccttgaaggaggacgggcaggcggtggtcgtggtctttgacgccaaggccccctccttccgccacgaggcctacgaggcctacaaggcgggccgggcccccaccccggaggacttcccccgccagctcgccttggtcaagcggctggtggaccttctgggcctggtccgcctcgaggccccgggttacgaggcggacgacgtcctgggcaccctggccaagaaggccgaaagggaggggatggaggtgcgcatcctcacgggagaccgggacttcttccagctcctctccgagaaggtctcggtcctcctgccggacgggaccctggtcaccccaaaggacgtccaggagaagtacggggtgccgccggagcgctgggtggacttccgcgccctcacgggggaccgctcggacaacatccccggggtggcggggataggggagaagaccgcccttcgactcctcgcggagtgggggagcgtggagaacctcctgaagaacctggaccgggtgaagccggactcggtccggcgcaagatagaggcgcaccttgaggacctccgcctctccttggacctggcccgcatccgcaccgacctccccttggaggtggactttaaggccctgcgccgcaggacccccgacctggagggcctgagggcctttttggaggagctggagttcggaagcctccttcatgagttcggcctcctgggaggggagaagccccgggaggaggccccctggcccccgcccgaaggggccttcgtaggcttcctcctctcccgcaaggagcccatgtgggcggagcttctggccctggcggccgccgcagagggccgggtccaccgggcaacaagcccggttgaggccctggccgacctcaaggaggcccgggggttcctggccaaggacctggccgttttggccctgcgggagggggtggccctggaccccacggacgaccccctcctggtggcctacctcctggacccggccaacaccaaccccgagggggtggcccggcgctacgggggcgagttcacggaggacgcagcggagagggccctcctctccgagaggctcttccagaacctctttccccggctttccgagaagctcctctggctctaccaggaggtggagcggcccctctcccgggtcttggcccacatggaggcccggggggtgaggctggacgtcccccttctggaggccctctcctttgagctggagaaggagatggagcgcctggagggggaggtcttccgcttggccggccaccccttcaacctcaactcccgcgaccagctggaaagggtcctctttgacgagctgggccttaccccggtgggtcggacggagaagacgggcaagcgctccaccgcccagggggccctggaggccctccggggggcccaccccatcgtggagctcatcctccagtaccgggagctttccaagctcaaaagcacctacctggaccccctgccccggctcgtccacccgcggacgggccggcttcacacccgcttcaaccagacggccacggccacgggaaggctttccagctccgaccccaacctgcagaacatccccgtgcgcacccccttggggcagcgcatccgcaaggccttcgtggccgaggaggggtggctccttttggcggcggactactcccagatcgagcttcgggtcctggcccacctctcgggggacgagaacctgaagcgggtcttccgggaggggaaggacatccataccgaaaccgccgcctggatgttcggcttagaccccgctctagtggatccaaagatgcgccgggcggccaagacggtcaacttcggcgtcctctacgggatgtccgcccacaggctctcccaggagctcggcatagactacaaggaggcggaggcctttattgagcgctacttccagagcttccccaaggtgcgggcctggatagaaaggaccctggaggagggccggacgcggggctacgtggagaccctgttcggcaggaggcgctatgtggatgacctggcctcccgggtccgctcggtgcgggaggcggcggagcggatggccttcaacatgcccgtgcagggcaccgccgccgacctgatgaagatcgccatggtcaagctcttccccaggctaaagcccctgggggcccacctcctcctccaggtgcacgacgagctggtcctggaggtgcccgaggaccgggccgaggaggccaaggccctggtcaaggaggtcatggagaacacctaccccttggacgtgcccctcgaggtggaggtgggcgtgggtcgggactggctggaggcgaagggggattgaagcggtcgac

SEQ ID NO: 2795 - DNA, 2605 bp, Artificial Sequence
  Description of Artificial Sequence: Synthetic DNA sequence of Thermus Rt41A DNA Polymerase P762F
atgaaatacctgctgccgaccgctgctgctggtctgctgctcctcgctgcccagccggcgatggccatggatatcggaattaattcggatccgaattccccactttttgacctggaggaaccccccaagcgggtgcttctggtggacggccaccacctggcctaccgcaccttctacgccctgagcctcaccacctcccggggggagccggtgcagatggtctacggcttcgcccggagcctcctcaaggccttgaaggaggacgggcaggcggtggtcgtggtctttgacgccaaggccccctccttccgccacgaggcctacgaggcctacaaggcgggccgggcccccaccccggaggacttcccccgccagctcgccttggtcaagcggctggtggaccttctgggcctggtccgcctcgaggccccgggttacgaggcggacgacgtcctgggcaccctggccaagaaggccgaaagggaggggatggaggtgcgcatcctcacgggagaccgggacttcttccagctcctctccgagaaggtctcggtcctcctgccggacgggaccctggtcaccccaaaggacgtccaggagaagtacggggtgccgccggagcgctgggtggacttccgcgccctcacgggggaccgctcggacaacatccccggggtggcggggataggggagaagaccgcccttcgactcctcgcggagtgggggagcgtggagaacctcctgaagaacctggaccgggtgaagccggactcggtccggcgcaagatagaggcgcaccttgaggacctccgcctctccttggacctggcccgcatccgcaccgacctccccttggaggtggactttaaggccctgcgccgcaggacccccgacctggagggcctgagggcctttttggaggagctggagttcggaagcctccttcatgagttcggcctcctgggaggggagaagccccgggaggaggccccctggcccccgcccgaaggggccttcgtaggcttcctcctctcccgcaaggagcccatgtgggcggagcttctggccctggcggccgccgcagagggccgggtccaccgggcaacaagcccggttgaggccctggccgacctcaaggaggcccgggggttcctggccaaggacctggccgttttggccctgcgggagggggtggccctggaccccacggacgaccccctcctggtggcctacctcctggacccggccaacaccaaccccgagggggtggcccggcgctacgggggcgagttcacggaggacgcagcggagagggccctcctctccgagaggctcttccagaacctctttccccggctttccgagaagctcctctggctctaccaggaggtggagcggcccctctcccgggtcttggcccacatggaggcccggggggtgaggctggacgtcccccttctggaggccctctcctttgagctggagaaggagatggagcgcctggagggggaggtcttccgcttggccggccaccccttcaacctcaactcccgcgaccagctggaaagggtcctctttgacgagctgggccttaccccggtgggtcggacggagaagacgggcaagcgctccaccgcccagggggccctggaggccctccggggggcccaccccatcgtggagctcatcctccagtaccgggagctttccaagctcaaaagcacctacctggaccccctgccccggctcgtccacccgcggacgggccggcttcacacccgcttcaaccagacggccacggccacgggaaggctttccagctccgaccccaacctgcagaacatccccgtgcgcacccccttggggcagcgcatccgcaaggccttcgtggccgaggaggggtggctccttttggcggcggactactcccagatcgagcttcgggtcctggcccacctctcgggggacgagaacctgaagcgggtcttccgggaggggaaggacatccataccgaaaccgccgcctggatgttcggcttagaccccgctctagtggatccaaagatgcgccgggcggccaagacggtcaacttcggcgtcctctacgggatgtccgcccacaggctctcccaggagctcggcatagactacaaggaggcggaggcctttattgagcgctacttccagagcttccccaaggtgcgggcctggatagaaaggaccctggaggagggccggacgcggggctacgtggagaccctgttcggcaggaggcgctatgtgtttgacctggcctcccgggtccgctcggtgcgggaggcggcggagcggatggccttcaacatgcccgtgcagggcaccgccgccgacctgatgaagatcgccatggtcaagctcttccccaggctaaagcccctgggggcccacctcctcctccaggtgcacgacgagctggtcctggaggtgcccgaggaccgggccgaggaggccaaggccctggtcaaggaggtcatggagaacacctaccccttggacgtgcccctcgaggtggaggtgggcgtgggtcgggactggctggaggcgaagggggattgaagcggtcgac

SEQ ID NO: 2796 - DNA, 2605 bp, Artificial Sequence
  Description of Artificial Sequence: Synthetic DNA sequence of Thermus Rt41A DNA Polymerase P762S
atgaaatacctgctgccgaccgctgctgctggtctgctgctcctcgctgcccagccggcgatggccatggatatcggaattaattcggatccgaattccccactttttgacctggaggaaccccccaagcgggtgcttctggtggacggccaccacctggcctaccgcaccttctacgccctgagcctcaccacctcccggggggagccggtgcagatggtctacggcttcgcccggagcctcctcaaggccttgaaggaggacgggcaggcggtggtcgtggtctttgacgccaaggccccctccttccgccacgaggcctacgaggcctacaaggcgggccgggcccccaccccggaggacttcccccgccagctcgccttggtcaagcggctggtggaccttctgggcctggtccgcctcgaggccccgggttacgaggcggacgacgtcctgggcaccctggccaagaaggccgaaagggaggggatggaggtgcgcatcctcacgggagaccgggacttcttccagctcctctccgagaaggtctcggtcctcctgccggacgggaccctggtcaccccaaaggacgtccaggagaagtacggggtgccgccggagcgctgggtggacttccgcgccctcacgggggaccgctcggacaacatccccggggtggcggggataggggagaagaccgcccttcgactcctcgcggagtgggggagcgtggagaacctcctgaagaacctggaccgggtgaagccggactcggtccggcgcaagatagaggcgcaccttgaggacctccgcctctccttggacctggcccgcatccgcaccgacctccccttggaggtggactttaaggccctgcgccgcaggacccccgacctggagggcctgagggcctttttggaggagctggagttcggaagcctccttcatgagttcggcctcctgggaggggagaagccccgggaggaggccccctggcccccgcccgaaggggccttcgtaggcttcctcctctcccgcaaggagcccatgtgggcggagcttctggccctggcggccgccgcagagggccgggtccaccgggcaacaagcccggttgaggccctggccgacctcaaggaggcccgggggttcctggccaaggacctggccgttttggccctgcgggagggggtggccctggaccccacggacgaccccctcctggtggcctacctcctggacccggccaacaccaaccccgagggggtggcccggcgctacgggggcgagttcacggaggacgcagcggagagggccctcctctccgagaggctcttccagaacctctttccccggctttccgagaagctcctctggctctaccaggaggtggagcggcccctctcccgggtcttggcccacatggaggcccggggggtgaggctggacgtcccccttctggaggccctctcctttgagctggagaaggagatggagcgcctggagggggaggtcttccgcttggccggccaccccttcaacctcaactcccgcgaccagctggaaagggtcctctttgacgagctgggccttaccccggtgggtcggacggagaagacgggcaagcgctccaccgcccagggggccctggaggccctccggggggcccaccccatcgtggagctcatcctccagtaccgggagctttccaagctcaaaagcacctacctggaccccctgccccggctcgtccacccgcggacgggccggcttcacacccgcttcaaccagacggccacggccacgggaaggctttccagctccgaccccaacctgcagaacatccccgtgcgcacccccttggggcagcgcatccgcaaggccttcgtggccgaggaggggtggctccttttggcggcggactactcccagatcgagcttcgggtcctggcccacctctcgggggacgagaacctgaagcgggtcttccgggaggggaaggacatccataccgaaaccgccgcctggatgttcggcttagaccccgctctagtggatccaaagatgcgccgggcggccaagacggtcaacttcggcgtcctctacgggatgtccgcccacaggctctcccaggagctcggcatagactacaaggaggcggaggcctttattgagcgctacttccagagcttccccaaggtgcgggcctggatagaaaggaccctggaggagggccggacgcggggctacgtggagaccctgttcggcaggaggcgctatgtgtctgacctggcctcccgggtccgctcggtgcgggaggcggcggagcggatggccttcaacatgcccgtgcagggcaccgccgccgacctgatgaagatcgccatggtcaagctcttccccaggctaaagcccctgggggcccacctcctcctccaggtgcacgacgagctggtcctggaggtgcccgaggaccgggccgaggaggccaaggccctggtcaaggaggtcatggagaacacctaccccttggacgtgcccctcgaggtggaggtgggcgtgggtcgggactggctggaggcgaagggggattgaagcggtcgac

SEQ ID NO: 2797 - DNA, 2605 bp, Artificial Sequence
  Description of Artificial Sequence: Synthetic DNA sequence of Thermus Rt41A DNA Polymerase P762Y
atgaaatacctgctgccgaccgctgctgctggtctgctgctcctcgctgcccagccggcgatggccatggatatcggaattaattcggatccgaattccccactttttgacctggaggaaccccccaagcgggtgcttctggtggacggccaccacctggcctaccgcaccttctacgccctgagcctcaccacctcccggggggagccggtgcagatggtctacggcttcgcccggagcctcctcaaggccttgaaggaggacgggcaggcggtggtcgtggtctttgacgccaaggccccctccttccgccacgaggcctacgaggcctacaaggcgggccgggcccccaccccggaggacttcccccgccagctcgccttggtcaagcggctggtggaccttctgggcctggtccgcctcgaggccccgggttacgaggcggacgacgtcctgggcaccctggccaagaaggccgaaagggaggggatggaggtgcgcatcctcacgggagaccgggacttcttccagctcctctccgagaaggtctcggtcctcctgccggacgggaccctggtcaccccaaaggacgtccaggagaagtacggggtgccgccggagcgctgggtggacttccgcgccctcacgggggaccgctcggacaacatccccggggtggcggggataggggagaagaccgcccttcgactcctcgcggagtgggggagcgtggagaacctcctgaagaacctggaccgggtgaagccggactcggtccggcgcaagatagaggcgcaccttgaggacctccgcctctccttggacctggcccgcatccgcaccgacctccccttggaggtggactttaaggccctgcgccgcaggacccccgacctggagggcctgagggcctttttggaggagctggagttcggaagcctccttcatgagttcggcctcctgggaggggagaagccccgggaggaggccccctggcccccgcccgaaggggccttcgtaggcttcctcctctcccgcaaggagcccatgtgggcggagcttctggccctggcggccgccgcagagggccgggtccaccgggcaacaagcccggttgaggccctggccgacctcaaggaggcccgggggttcctggccaaggacctggccgttttggccctgcgggagggggtggccctggaccccacggacgaccccctcctggtggcctacctcctggacccggccaacaccaaccccgagggggtggcccggcgctacgggggcgagttcacggaggacgcagcggagagggccctcctctccgagaggctcttccagaacctctttccccggctttccgagaagctcctctggctctaccaggaggtggagcggcccctctcccgggtcttggcccacatggaggcccggggggtgaggctggacgtcccccttctggaggccctctcctttgagctggagaaggagatggagcgcctggagggggaggtcttccgcttggccggccaccccttcaacctcaactcccgcgaccagctggaaagggtcctctttgacgagctgggccttaccccggtgggtcggacggagaagacgggcaagcgctccaccgcccagggggccctggaggccctccggggggcccaccccatcgtggagctcatcctccagtaccgggagctttccaagctcaaaagcacctacctggaccccctgccccggctcgtccacccgcggacgggccggcttcacacccgcttcaaccagacggccacggccacgggaaggctttccagctccgaccccaacctgcagaacatccccgtgcgcacccccttggggcagcgcatccgcaaggccttcgtggccgaggaggggtggctccttttggcggcggactactcccagatcgagcttcgggtcctggcccacctctcgggggacgagaacctgaagcgggtcttccgggaggggaaggacatccataccgaaaccgccgcctggatgttcggcttagaccccgctctagtggatccaaagatgcgccgggcggccaagacggtcaacttcggcgtcctctacgggatgtccgcccacaggctctcccaggagctcggcatagactacaaggaggcggaggcctttattgagcgctacttccagagcttccccaaggtgcgggcctggatagaaaggaccctggaggagggccggacgcggggctacgtggagaccctgttcggcaggaggcgctatgtgtatgacctggcctcccgggtccgctcggtgcgggaggcggcggagcggatggccttcaacatgcccgtgcagggcaccgccgccgacctgatgaagatcgccatggtcaagctcttccccaggctaaagcccctgggggcccacctcctcctccaggtgcacgacgagctggtcctggaggtgcccgaggaccgggccgaggaggccaaggccctggtcaaggaggtcatggagaacacctaccccttggacgtgcccctcgaggtggaggtgggcgtgggtcgggactggctggaggcgaagggggattgaagcggtcgac

SEQ ID NO: 2798 - DNA, 2605 bp, Artificial Sequence
  Description of Artificial Sequence: Synthetic DNA sequence of Thermus Rt41A DNA Polymerase P762W
atgaaatacctgctgccgaccgctgctgctggtctgctgctcctcgctgcccagccggcgatggccatggatatcggaattaattcggatccgaattccccactttttgacctggaggaaccccccaagcgggtgcttctggtggacggccaccacctggcctaccgcaccttctacgccctgagcctcaccacctcccggggggagccggtgcagatggtctacggcttcgcccggagcctcctcaaggccttgaaggaggacgggcaggcggtggtcgtggtctttgacgccaaggccccctccttccgccacgaggcctacgaggcctacaaggcgggccgggcccccaccccggaggacttcccccgccagctcgccttggtcaagcggctggtggaccttctgggcctggtccgcctcgaggccccgggttacgaggcggacgacgtcctgggcaccctggccaagaaggccgaaagggaggggatggaggtgcgcatcctcacgggagaccgggacttcttccagctcctctccgagaaggtctcggtcctcctgccggacgggaccctggtcaccccaaaggacgtccaggagaagtacggggtgccgccggagcgctgggtggacttccgcgccctcacgggggaccgctcggacaacatccccggggtggcggggataggggagaagaccgcccttcgactcctcgcggagtgggggagcgtggagaacctcctgaagaacctggaccgggtgaagccggactcggtccggcgcaagatagaggcgcaccttgaggacctccgcctctccttggacctggcccgcatccgcaccgacctccccttggaggtggactttaaggccctgcgccgcaggacccccgacctggagggcctgagggcctttttggaggagctggagttcggaagcctccttcatgagttcggcctcctgggaggggagaagccccgggaggaggccccctggcccccgcccgaaggggccttcgtaggcttcctcctctcccgcaaggagcccatgtgggcggagcttctggccctggcggccgccgcagagggccgggtccaccgggcaacaagcccggttgaggccctggccgacctcaaggaggcccgggggttcctggccaaggacctggccgttttggccctgcgggagggggtggccctggaccccacggacgaccccctcctggtggcctacctcctggacccggccaacaccaaccccgagggggtggcccggcgctacgggggcgagttcacggaggacgcagcggagagggccctcctctccgagaggctcttccagaacctctttccccggctttccgagaagctcctctggctctaccaggaggtggagcggcccctctcccgggtcttggcccacatggaggcccggggggtgaggctggacgtcccccttctggaggccctctcctttgagctggagaaggagatggagcgcctggagggggaggtcttccgcttggccggccaccccttcaacctcaactcccgcgaccagctggaaagggtcctctttgacgagctgggccttaccccggtgggtcggacggagaagacgggcaagcgctccaccgcccagggggccctggaggccctccggggggcccaccccatcgtggagctcatcctccagtaccgggagctttccaagctcaaaagcacctacctggaccccctgccccggctcgtccacccgcggacgggccggcttcacacccgcttcaaccagacggccacggccacgggaaggctttccagctccgaccccaacctgcagaacatccccgtgcgcacccccttggggcagcgcatccgcaaggccttcgtggccgaggaggggtggctccttttggcggcggactactcccagatcgagcttcgggtcctggcccacctctcgggggacgagaacctgaagcgggtcttccgggaggggaaggacatccataccgaaaccgccgcctggatgttcggcttagaccccgctctagtggatccaaagatgcgccgggcggccaagacggtcaacttcggcgtcctctacgggatgtccgcccacaggctctcccaggagctcggcatagactacaaggaggcggaggcctttattgagcgctacttccagagcttccccaaggtgcgggcctggatagaaaggaccctggaggagggccggacgcggggctacgtggagaccctgttcggcaggaggcgctatgtgtgggacctggcctcccgggtccgctcggtgcgggaggcggcggagcggatggccttcaacatgcccgtgcagggcaccgccgccgacctgatgaagatcgccatggtcaagctcttccccaggctaaagcccctgggggcccacctcctcctccaggtgcacgacgagctggtcctggaggtgcccgaggaccgggccgaggaggccaaggccctggtcaaggaggtcatggagaacacctaccccttggacgtgcccctcgaggtggaggtgggcgtgggtcgggactggctggaggcgaagggggattgaagcggtcgac

SEQ ID NO: 2799 - DNA, 2605 bp, Artificial Sequence
  Description of Artificial Sequence: Synthetic DNA sequence of Thermus Rt41A DNA Polymerase P762M
atgaaatacctgctgccgaccgctgctgctggtctgctgctcctcgctgcccagccggcgatggccatggatatcggaattaattcggatccgaattccccactttttgacctggaggaaccccccaagcgggtgcttctggtggacggccaccacctggcctaccgcaccttctacgccctgagcctcaccacctcccggggggagccggtgcagatggtctacggcttcgcccggagcctcctcaaggccttgaaggaggacgggcaggcggtggtcgtggtctttgacgccaaggccccctccttccgccacgaggcctacgaggcctacaaggcgggccgggcccccaccccggaggacttcccccgccagctcgccttggtcaagcggctggtggaccttctgggcctggtccgcctcgaggccccgggttacgaggcggacgacgtcctgggcaccctggccaagaaggccgaaagggaggggatggaggtgcgcatcctcacgggagaccgggacttcttccagctcctctccgagaaggtctcggtcctcctgccggacgggaccctggtcaccccaaaggacgtccaggagaagtacggggtgccgccggagcgctgggtggacttccgcgccctcacgggggaccgctcggacaacatccccggggtggcggggataggggagaagaccgcccttcgactcctcgcggagtgggggagcgtggagaacctcctgaagaacctggaccgggtgaagccggactcggtccggcgcaagatagaggcgcaccttgaggacctccgcctctccttggacctggcccgcatccgcaccgacctccccttggaggtggactttaaggccctgcgccgcaggacccccgacctggagggcctgagggcctttttggaggagctggagttcggaagcctccttcatgagttcggcctcctgggaggggagaagccccgggaggaggccccctggcccccgcccgaaggggccttcgtaggcttcctcctctcccgcaaggagcccatgtgggcggagcttctggccctggcggccgccgcagagggccgggtccaccgggcaacaagcccggttgaggccctggccgacctcaaggaggcccgggggttcctggccaaggacctggccgttttggccctgcgggagggggtggccctggaccccacggacgaccccctcctggtggcctacctcctggacccggccaacaccaaccccgagggggtggcccggcgctacgggggcgagttcacggaggacgcagcggagagggccctcctctccgagaggctcttccagaacctctttccccggctttccgagaagctcctctggctctaccaggaggtggagcggcccctctcccgggtcttggcccacatggaggcccggggggtgaggctggacgtcccccttctggaggccctctcctttgagctggagaaggagatggagcgcctggagggggaggtcttccgcttggccggccaccccttcaacctcaactcccgcgaccagctggaaagggtcctctttgacgagctgggccttaccccggtgggtcggacggagaagacgggcaagcgctccaccgcccagggggccctggaggccctccggggggcccaccccatcgtggagctcatcctccagtaccgggagctttccaagctcaaaagcacctacctggaccccctgccccggctcgtccacccgcggacgggccggcttcacacccgcttcaaccagacggccacggccacgggaaggctttccagctccgaccccaacctgcagaacatccccgtgcgcacccccttggggcagcgcatccgcaaggccttcgtggccgaggaggggtggctccttttggcggcggactactcccagatcgagcttcgggtcctggcccacctctcgggggacgagaacctgaagcgggtcttccgggaggggaaggacatccataccgaaaccgccgcctggatgttcggcttagaccccgctctagtggatccaaagatgcgccgggcggccaagacggtcaacttcggcgtcctctacgggatgtccgcccacaggctctcccaggagctcggcatagactacaaggaggcggaggcctttattgagcgctacttccagagcttccccaaggtgcgggcctggatagaaaggaccctggaggagggccggacgcggggctacgtggagaccctgttcggcaggaggcgctatgtgatggacctggcctcccgggtccgctcggtgcgggaggcggcggagcggatggccttcaacatgcccgtgcagggcaccgccgccgacctgatgaagatcgccatggtcaagctcttccccaggctaaagcccctgggggcccacctcctcctccaggtgcacgacgagctggtcctggaggtgcccgaggaccgggccgaggaggccaaggccctggtcaaggaggtcatggagaacacctaccccttggacgtgcccctcgaggtggaggtgggcgtgggtcgggactggctggaggcgaagggggattgaagcggtcgac

SEQ ID NO: 2800 - DNA, 2605 bp, Artificial Sequence
  Description of Artificial Sequence: Synthetic DNA sequence of Thermus Rt41A DNA Polymerase P762T
atgaaatacctgctgccgaccgctgctgctggtctgctgctcctcgctgcccagccggcgatggccatggatatcggaattaattcggatccgaattccccactttttgacctggaggaaccccccaagcgggtgcttctggtggacggccaccacctggcctaccgcaccttctacgccctgagcctcaccacctcccggggggagccggtgcagatggtctacggcttcgcccggagcctcctcaaggccttgaaggaggacgggcaggcggtggtcgtggtctttgacgccaaggccccctccttccgccacgaggcctacgaggcctacaaggcgggccgggcccccaccccggaggacttcccccgccagctcgccttggtcaagcggctggtggaccttctgggcctggtccgcctcgaggccccgggttacgaggcggacgacgtcctgggcaccctggccaagaaggccgaaagggaggggatggaggtgcgcatcctcacgggagaccgggacttcttccagctcctctccgagaaggtctcggtcctcctgccggacgggaccctggtcaccccaaaggacgtccaggagaagtacggggtgccgccggagcgctgggtggacttccgcgccctcacgggggaccgctcggacaacatccccggggtggcggggataggggagaagaccgcccttcgactcctcgcggagtgggggagcgtggagaacctcctgaagaacctggaccgggtgaagccggactcggtccggcgcaagatagaggcgcaccttgaggacctccgcctctccttggacctggcccgcatccgcaccgacctccccttggaggtggactttaaggccctgcgccgcaggacccccgacctggagggcctgagggcctttttggaggagctggagttcggaagcctccttcatgagttcggcctcctgggaggggagaagccccgggaggaggccccctggcccccgcccgaaggggccttcgtaggcttcctcctctcccgcaaggagcccatgtgggcggagcttctggccctggcggccgccgcagagggccgggtccaccgggcaacaagcccggttgaggccctggccgacctcaaggaggcccgggggttcctggccaaggacctggccgttttggccctgcgggagggggtggccctggaccccacggacgaccccctcctggtggcctacctcctggacccggccaacaccaaccccgagggggtggcccggcgctacgggggcgagttcacggaggacgcagcggagagggccctcctctccgagaggctcttccagaacctctttccccggctttccgagaagctcctctggctctaccaggaggtggagcggcccctctcccgggtcttggcccacatggaggcccggggggtgaggctggacgtcccccttctggaggccctctcctttgagctggagaaggagatggagcgcctggagggggaggtcttccgcttggccggccaccccttcaacctcaactcccgcgaccagctggaaagggtcctctttgacgagctgggccttaccccggtgggtcggacggagaagacgggcaagcgctccaccgcccagggggccctggaggccctccggggggcccaccccatcgtggagctcatcctccagtaccgggagctttccaagctcaaaagcacctacctggaccccctgccccggctcgtccacccgcggacgggccggcttcacacccgcttcaaccagacggccacggccacgggaaggctttccagctccgaccccaacctgcagaacatccccgtgcgcacccccttggggcagcgcatccgcaaggccttcgtggccgaggaggggtggctccttttggcggcggactactcccagatcgagcttcgggtcctggcccacctctcgggggacgagaacctgaagcgggtcttccgggaggggaaggacatccataccgaaaccgccgcctggatgttcggcttagaccccgctctagtggatccaaagatgcgccgggcggccaagacggtcaacttcggcgtcctctacgggatgtccgcccacaggctctcccaggagctcggcatagactacaaggaggcggaggcctttattgagcgctacttccagagcttccccaaggtgcgggcctggatagaaaggaccctggaggagggccggacgcggggctacgtggagaccctgttcggcaggaggcgctatgtgactgacctggcctcccgggtccgctcggtgcgggaggcggcggagcggatggccttcaacatgcccgtgcagggcaccgccgccgacctgatgaagatcgccatggtcaagctcttccccaggctaaagcccctgggggcccacctcctcctccaggtgcacgacgagctggtcctggaggtgcccgaggaccgggccgaggaggccaaggccctggtcaaggaggtcatggagaacacctaccccttggacgtgcccctcgaggtggaggtgggcgtgggtcgggactggctggaggcgaagggggattgaagcggtcgac

SEQ ID NO: 2801 - DNA, 2605 bp, Artificial Sequence
  Description of Artificial Sequence: Synthetic DNA sequence of Thermus Rt41A DNA Polymerase P762N
atgaaatacctgctgccgaccgctgctgctggtctgctgctcctcgctgcccagccggcgatggccatggatatcggaattaattcggatccgaattccccactttttgacctggaggaaccccccaagcgggtgcttctggtggacggccaccacctggcctaccgcaccttctacgccctgagcctcaccacctcccggggggagccggtgcagatggtctacggcttcgcccggagcctcctcaaggccttgaaggaggacgggcaggcggtggtcgtggtctttgacgccaaggccccctccttccgccacgaggcctacgaggcctacaaggcgggccgggcccccaccccggaggacttcccccgccagctcgccttggtcaagcggctggtggaccttctgggcctggtccgcctcgaggccccgggttacgaggcggacgacgtcctgggcaccctggccaagaaggccgaaagggaggggatggaggtgcgcatcctcacgggagaccgggacttcttccagctcctctccgagaaggtctcggtcctcctgccggacgggaccctggtcaccccaaaggacgtccaggagaagtacggggtgccgccggagcgctgggtggacttccgcgccctcacgggggaccgctcggacaacatccccggggtggcggggataggggagaagaccgcccttcgactcctcgcggagtgggggagcgtggagaacctcctgaagaacctggaccgggtgaagccggactcggtccggcgcaagatagaggcgcaccttgaggacctccgcctctccttggacctggcccgcatccgcaccgacctccccttggaggtggactttaaggccctgcgccgcaggacccccgacctggagggcctgagggcctttttggaggagctggagttcggaagcctccttcatgagttcggcctcctgggaggggagaagccccgggaggaggccccctggcccccgcccgaaggggccttcgtaggcttcctcctctcccgcaaggagcccatgtgggcggagcttctggccctggcggccgccgcagagggccgggtccaccgggcaacaagcccggttgaggccctggccgacctcaaggaggcccgggggttcctggccaaggacctggccgttttggccctgcgggagggggtggccctggaccccacggacgaccccctcctggtggcctacctcctggacccggccaacaccaaccccgagggggtggcccggcgctacgggggcgagttcacggaggacgcagcggagagggccctcctctccgagaggctcttccagaacctctttccccggctttccgagaagctcctctggctctaccaggaggtggagcggcccctctcccgggtcttggcccacatggaggcccggggggtgaggctggacgtcccccttctggaggccctctcctttgagctggagaaggagatggagcgcctggagggggaggtcttccgcttggccggccaccccttcaacctcaactcccgcgaccagctggaaagggtcctctttgacgagctgggccttaccccggtgggtcggacggagaagacgggcaagcgctccaccgcccagggggccctggaggccctccggggggcccaccccatcgtggagctcatcctccagtaccgggagctttccaagctcaaaagcacctacctggaccccctgccccggctcgtccacccgcggacgggccggcttcacacccgcttcaaccagacggccacggccacgggaaggctttccagctccgaccccaacctgcagaacatccccgtgcgcacccccttggggcagcgcatccgcaaggccttcgtggccgaggaggggtggctccttttggcggcggactactcccagatcgagcttcgggtcctggcccacctctcgggggacgagaacctgaagcgggtcttccgggaggggaaggacatccataccgaaaccgccgcctggatgttcggcttagaccccgctctagtggatccaaagatgcgccgggcggccaagacggtcaacttcggcgtcctctacgggatgtccgcccacaggctctcccaggagctcggcatagactacaaggaggcggaggcctttattgagcgctacttccagagcttccccaaggtgcgggcctggatagaaaggaccctggaggagggccggacgcggggctacgtggagaccctgttcggcaggaggcgctatgtgaatgacctggcctcccgggtccgctcggtgcgggaggcggcggagcggatggccttcaacatgcccgtgcagggcaccgccgccgacctgatgaagatcgccatggtcaagctcttccccaggctaaagcccctgggggcccacctcctcctccaggtgcacgacgagctggtcctggaggtgcccgaggaccgggccgaggaggccaaggccctggtcaaggaggtcatggagaacacctaccccttggacgtgcccctcgaggtggaggtgggcgtgggtcgggactggctggaggcgaagggggattgaagcggtcgac

SEQ ID NO: 2802 - DNA, 2605 bp, Artificial Sequence
  Description of Artificial Sequence: Synthetic DNA sequence of Thermus Rt41A DNA Polymerase P762V
atgaaatacctgctgccgaccgctgctgctggtctgctgctcctcgctgcccagccggcgatggccatggatatcggaattaattcggatccgaattccccactttttgacctggaggaaccccccaagcgggtgcttctggtggacggccaccacctggcctaccgcaccttctacgccctgagcctcaccacctcccggggggagccggtgcagatggtctacggcttcgcccggagcctcctcaaggccttgaaggaggacgggcaggcggtggtcgtggtctttgacgccaaggccccctccttccgccacgaggcctacgaggcctacaaggcgggccgggcccccaccccggaggacttcccccgccagctcgccttggtcaagcggctggtggaccttctgggcctggtccgcctcgaggccccgggttacgaggcggacgacgtcctgggcaccctggccaagaaggccgaaagggaggggatggaggtgcgcatcctcacgggagaccgggacttcttccagctcctctccgagaaggtctcggtcctcctgccggacgggaccctggtcaccccaaaggacgtccaggagaagtacggggtgccgccggagcgctgggtggacttccgcgccctcacgggggaccgctcggacaacatccccggggtggcggggataggggagaagaccgcccttcgactcctcgcggagtgggggagcgtggagaacctcctgaagaacctggaccgggtgaagccggactcggtccggcgcaagatagaggcgcaccttgaggacctccgcctctccttggacctggcccgcatccgcaccgacctccccttggaggtggactttaaggccctgcgccgcaggacccccgacctggagggcctgagggcctttttggaggagctggagttcggaagcctccttcatgagttcggcctcctgggaggggagaagccccgggaggaggccccctggcccccgcccgaaggggccttcgtaggcttcctcctctcccgcaaggagcccatgtgggcggagcttctggccctggcggccgccgcagagggccgggtccaccgggcaacaagcccggttgaggccctggccgacctcaaggaggcccgggggttcctggccaaggacctggccgttttggccctgcgggagggggtggccctggaccccacggacgaccccctcctggtggcctacctcctggacccggccaacaccaaccccgagggggtggcccggcgctacgggggcgagttcacggaggacgcagcggagagggccctcctctccgagaggctcttccagaacctctttccccggctttccgagaagctcctctggctctaccaggaggtggagcggcccctctcccgggtcttggcccacatggaggcccggggggtgaggctggacgtcccccttctggaggccctctcctttgagctggagaaggagatggagcgcctggagggggaggtcttccgcttggccggccaccccttcaacctcaactcccgcgaccagctggaaagggtcctctttgacgagctgggccttaccccggtgggtcggacggagaagacgggcaagcgctccaccgcccagggggccctggaggccctccggggggcccaccccatcgtggagctcatcctccagtaccgggagctttccaagctcaaaagcacctacctggaccccctgccccggctcgtccacccgcggacgggccggcttcacacccgcttcaaccagacggccacggccacgggaaggctttccagctccgaccccaacctgcagaacatccccgtgcgcacccccttggggcagcgcatccgcaaggccttcgtggccgaggaggggtggctccttttggcggcggactactcccagatcgagcttcgggtcctggcccacctctcgggggacgagaacctgaagcgggtcttccgggaggggaaggacatccataccgaaaccgccgcctggatgttcggcttagaccccgctctagtggatccaaagatgcgccgggcggccaagacggtcaacttcggcgtcctctacgggatgtccgcccacaggctctcccaggagctcggcatagactacaaggaggcggaggcctttattgagcgctacttccagagcttccccaaggtgcgggcctggatagaaaggaccctggaggagggccggacgcggggctacgtggagaccctgttcggcaggaggcgctatgtggtcgacctggcctcccgggtccgctcggtgcgggaggcggcggagcggatggccttcaacatgcccgtgcagggcaccgccgccgacctgatgaagatcgccatggtcaagctcttccccaggctaaagcccctgggggcccacctcctcctccaggtgcacgacgagctggtcctggaggtgcccgaggaccgggccgaggaggccaaggccctggtcaaggaggtcatggagaacacctaccccttggacgtgcccctcgaggtggaggtgggcgtgggtcgggactggctggaggcgaagggggattgaagcggtcgac

SEQ ID NO: 2803 - DNA, 2605 bp, Artificial Sequence
  Description of Artificial Sequence: Synthetic DNA sequence of Thermus Rt41A DNA Polymerase D763A
atgaaatacctgctgccgaccgctgctgctggtctgctgctcctcgctgcccagccggcgatggccatggatatcggaattaattcggatccgaattccccactttttgacctggaggaaccccccaagcgggtgcttctggtggacggccaccacctggcctaccgcaccttctacgccctgagcctcaccacctcccggggggagccggtgcagatggtctacggcttcgcccggagcctcctcaaggccttgaaggaggacgggcaggcggtggtcgtggtctttgacgccaaggccccctccttccgccacgaggcctacgaggcctacaaggcgggccgggcccccaccccggaggacttcccccgccagctcgccttggtcaagcggctggtggaccttctgggcctggtccgcctcgaggccccgggttacgaggcggacgacgtcctgggcaccctggccaagaaggccgaaagggaggggatggaggtgcgcatcctcacgggagaccgggacttcttccagctcctctccgagaaggtctcggtcctcctgccggacgggaccctggtcaccccaaaggacgtccaggagaagtacggggtgccgccggagcgctgggtggacttccgcgccctcacgggggaccgctcggacaacatccccggggtggcggggataggggagaagaccgcccttcgactcctcgcggagtgggggagcgtggagaacctcctgaagaacctggaccgggtgaagccggactcggtccggcgcaagatagaggcgcaccttgaggacctccgcctctccttggacctggcccgcatccgcaccgacctccccttggaggtggactttaaggccctgcgccgcaggacccccgacctggagggcctgagggcctttttggaggagctggagttcggaagcctccttcatgagttcggcctcctgggaggggagaagccccgggaggaggccccctggcccccgcccgaaggggccttcgtaggcttcctcctctcccgcaaggagcccatgtgggcggagcttctggccctggcggccgccgcagagggccgggtccaccgggcaacaagcccggttgaggccctggccgacctcaaggaggcccgggggttcctggccaaggacctggccgttttggccctgcgggagggggtggccctggaccccacggacgaccccctcctggtggcctacctcctggacccggccaacaccaaccccgagggggtggcccggcgctacgggggcgagttcacggaggacgcagcggagagggccctcctctccgagaggctcttccagaacctctttccccggctttccgagaagctcctctggctctaccaggaggtggagcggcccctctcccgggtcttggcccacatggaggcccggggggtgaggctggacgtcccccttctggaggccctctcctttgagctggagaaggagatggagcgcctggagggggaggtcttccgcttggccggccaccccttcaacctcaactcccgcgaccagctggaaagggtcctctttgacgagctgggccttaccccggtgggtcggacggagaagacgggcaagcgctccaccgcccagggggccctggaggccctccggggggcccaccccatcgtggagctcatcctccagtaccgggagctttccaagctcaaaagcacctacctggaccccctgccccggctcgtccacccgcggacgggccggcttcacacccgcttcaaccagacggccacggccacgggaaggctttccagctccgaccccaacctgcagaacatccccgtgcgcacccccttggggcagcgcatccgcaaggccttcgtggccgaggaggggtggctccttttggcggcggactactcccagatcgagcttcgggtcctggcccacctctcgggggacgagaacctgaagcgggtcttccgggaggggaaggacatccataccgaaaccgccgcctggatgttcggcttagaccccgctctagtggatccaaagatgcgccgggcggccaagacggtcaacttcggcgtcctctacgggatgtccgcccacaggctctcccaggagctcggcatagactacaaggaggcggaggcctttattgagcgctacttccagagcttccccaaggtgcgggcctggatagaaaggaccctggaggagggccggacgcggggctacgtggagaccctgttcggcaggaggcgctatgtgcccgctctggcctcccgggtccgctcggtgcgggaggcggcggagcggatggccttcaacatgcccgtgcagggcaccgccgccgacctgatgaagatcgccatggtcaagctcttccccaggctaaagcccctgggggcccacctcctcctccaggtgcacgacgagctggtcctggaggtgcccgaggaccgggccgaggaggccaaggccctggtcaaggaggtcatggagaacacctaccccttggacgtgcccctcgaggtggaggtgggcgtgggtcgggactggctggaggcgaagggggattgaagcggtcgac

SEQ ID NO: 2804 - DNA, 2605 bp, Artificial Sequence
  Description of Artificial Sequence: Synthetic DNA sequence of Thermus Rt41A DNA Polymerase D763R
atgaaatacctgctgccgaccgctgctgctggtctgctgctcctcgctgcccagccggcgatggccatggatatcggaattaattcggatccgaattccccactttttgacctggaggaaccccccaagcgggtgcttctggtggacggccaccacctggcctaccgcaccttctacgccctgagcctcaccacctcccggggggagccggtgcagatggtctacggcttcgcccggagcctcctcaaggccttgaaggaggacgggcaggcggtggtcgtggtctttgacgccaaggccccctccttccgccacgaggcctacgaggcctacaaggcgggccgggcccccaccccggaggacttcccccgccagctcgccttggtcaagcggctggtggaccttctgggcctggtccgcctcgaggccccgggttacgaggcggacgacgtcctgggcaccctggccaagaaggccgaaagggaggggatggaggtgcgcatcctcacgggagaccgggacttcttccagctcctctccgagaaggtctcggtcctcctgccggacgggaccctggtcaccccaaaggacgtccaggagaagtacggggtgccgccggagcgctgggtggacttccgcgccctcacgggggaccgctcggacaacatccccggggtggcggggataggggagaagaccgcccttcgactcctcgcggagtgggggagcgtggagaacctcctgaagaacctggaccgggtgaagccggactcggtccggcgcaagatagaggcgcaccttgaggacctccgcctctccttggacctggcccgcatccgcaccgacctccccttggaggtggactttaaggccctgcgccgcaggacccccgacctggagggcctgagggcctttttggaggagctggagttcggaagcctccttcatgagttcggcctcctgggaggggagaagccccgggaggaggccccctggcccccgcccgaaggggccttcgtaggcttcctcctctcccgcaaggagcccatgtgggcggagcttctggccctggcggccgccgcagagggccgggtccaccgggcaacaagcccggttgaggccctggccgacctcaaggaggcccgggggttcctggccaaggacctggccgttttggccctgcgggagggggtggccctggaccccacggacgaccccctcctggtggcctacctcctggacccggccaacaccaaccccgagggggtggcccggcgctacgggggcgagttcacggaggacgcagcggagagggccctcctctccgagaggctcttccagaacctctttccccggctttccgagaagctcctctggctctaccaggaggtggagcggcccctctcccgggtcttggcccacatggaggcccggggggtgaggctggacgtcccccttctggaggccctctcctttgagctggagaaggagatggagcgcctggagggggaggtcttccgcttggccggccaccccttcaacctcaactcccgcgaccagctggaaagggtcctctttgacgagctgggccttaccccggtgggtcggacggagaagacgggcaagcgctccaccgcccagggggccctggaggccctccggggggcccaccccatcgtggagctcatcctccagtaccgggagctttccaagctcaaaagcacctacctggaccccctgccccggctcgtccacccgcggacgggccggcttcacacccgcttcaaccagacggccacggccacgggaaggctttccagctccgaccccaacctgcagaacatccccgtgcgcacccccttggggcagcgcatccgcaaggccttcgtggccgaggaggggtggctccttttggcggcggactactcccagatcgagcttcgggtcctggcccacctctcgggggacgagaacctgaagcgggtcttccgggaggggaaggacatccataccgaaaccgccgcctggatgttcggcttagaccccgctctagtggatccaaagatgcgccgggcggccaagacggtcaacttcggcgtcctctacgggatgtccgcccacaggctctcccaggagctcggcatagactacaaggaggcggaggcctttattgagcgctacttccagagcttccccaaggtgcgggcctggatagaaaggaccctggaggagggccggacgcggggctacgtggagaccctgttcggcaggaggcgctatgtgccccgactggcctcccgggtccgctcggtgcgggaggcggcggagcggatggccttcaacatgcccgtgcagggcaccgccgccgacctgatgaagatcgccatggtcaagctcttccccaggctaaagcccctgggggcccacctcctcctccaggtgcacgacgagctggtcctggaggtgcccgaggaccgggccgaggaggccaaggccctggtcaaggaggtcatggagaacacctaccccttggacgtgcccctcgaggtggaggtgggcgtgggtcgggactggctggaggcgaagggggattgaagcggtcgac

SEQ ID NO: 2805 - DNA, 2605 bp, Artificial Sequence
  Description of Artificial Sequence: Synthetic DNA sequence of Thermus Rt41A DNA Polymerase D763C
atgaaatacctgctgccgaccgctgctgctggtctgctgctcctcgctgcccagccggcgatggccatggatatcggaattaattcggatccgaattccccactttttgacctggaggaaccccccaagcgggtgcttctggtggacggccaccacctggcctaccgcaccttctacgccctgagcctcaccacctcccggggggagccggtgcagatggtctacggcttcgcccggagcctcctcaaggccttgaaggaggacgggcaggcggtggtcgtggtctttgacgccaaggccccctccttccgccacgaggcctacgaggcctacaaggcgggccgggcccccaccccggaggacttcccccgccagctcgccttggtcaagcggctggtggaccttctgggcctggtccgcctcgaggccccgggttacgaggcggacgacgtcctgggcaccctggccaagaaggccgaaagggaggggatggaggtgcgcatcctcacgggagaccgggacttcttccagctcctctccgagaaggtctcggtcctcctgccggacgggaccctggtcaccccaaaggacgtccaggagaagtacggggtgccgccggagcgctgggtggacttccgcgccctcacgggggaccgctcggacaacatccccggggtggcggggataggggagaagaccgcccttcgactcctcgcggagtgggggagcgtggagaacctcctgaagaacctggaccgggtgaagccggactcggtccggcgcaagatagaggcgcaccttgaggacctccgcctctccttggacctggcccgcatccgcaccgacctccccttggaggtggactttaaggccctgcgccgcaggacccccgacctggagggcctgagggcctttttggaggagctggagttcggaagcctccttcatgagttcggcctcctgggaggggagaagccccgggaggaggccccctggcccccgcccgaaggggccttcgtaggcttcctcctctcccgcaaggagcccatgtgggcggagcttctggccctggcggccgccgcagagggccgggtccaccgggcaacaagcccggttgaggccctggccgacctcaaggaggcccgggggttcctggccaaggacctggccgttttggccctgcgggagggggtggccctggaccccacggacgaccccctcctggtggcctacctcctggacccggccaacaccaaccccgagggggtggcccggcgctacgggggcgagttcacggaggacgcagcggagagggccctcctctccgagaggctcttccagaacctctttccccggctttccgagaagctcctctggctctaccaggaggtggagcggcccctctcccgggtcttggcccacatggaggcccggggggtgaggctggacgtcccccttctggaggccctctcctttgagctggagaaggagatggagcgcctggagggggaggtcttccgcttggccggccaccccttcaacctcaactcccgcgaccagctggaaagggtcctctttgacgagctgggccttaccccggtgggtcggacggagaagacgggcaagcgctccaccgcccagggggccctggaggccctccggggggcccaccccatcgtggagctcatcctccagtaccgggagctttccaagctcaaaagcacctacctggaccccctgccccggctcgtccacccgcggacgggccggcttcacacccgcttcaaccagacggccacggccacgggaaggctttccagctccgaccccaacctgcagaacatccccgtgcgcacccccttggggcagcgcatccgcaaggccttcgtggccgaggaggggtggctccttttggcggcggactactcccagatcgagcttcgggtcctggcccacctctcgggggacgagaacctgaagcgggtcttccgggaggggaaggacatccataccgaaaccgccgcctggatgttcggcttagaccccgctctagtggatccaaagatgcgccgggcggccaagacggtcaacttcggcgtcctctacgggatgtccgcccacaggctctcccaggagctcggcatagactacaaggaggcggaggcctttattgagcgctacttccagagcttccccaaggtgcgggcctggatagaaaggaccctggaggagggccggacgcggggctacgtggagaccctgttcggcaggaggcgctatgtgccctgtctggcctcccgggtccgctcggtgcgggaggcggcggagcggatggccttcaacatgcccgtgcagggcaccgccgccgacctgatgaagatcgccatggtcaagctcttccccaggctaaagcccctgggggcccacctcctcctccaggtgcacgacgagctggtcctggaggtgcccgaggaccgggccgaggaggccaaggccctggtcaaggaggtcatggagaacacctaccccttggacgtgcccctcgaggtggaggtgggcgtgggtcgggactggctggaggcgaagggggattgaagcggtcgac

SEQ ID NO: 2806 - DNA, 2605 bp, Artificial Sequence
  Description of Artificial Sequence: Synthetic DNA sequence of Thermus Rt41A DNA Polymerase D763G
atgaaatacctgctgccgaccgctgctgctggtctgctgctcctcgctgcccagccggcgatggccatggatatcggaattaattcggatccgaattccccactttttgacctggaggaaccccccaagcgggtgcttctggtggacggccaccacctggcctaccgcaccttctacgccctgagcctcaccacctcccggggggagccggtgcagatggtctacggcttcgcccggagcctcctcaaggccttgaaggaggacgggcaggcggtggtcgtggtctttgacgccaaggccccctccttccgccacgaggcctacgaggcctacaaggcgggccgggcccccaccccggaggacttcccccgccagctcgccttggtcaagcggctggtggaccttctgggcctggtccgcctcgaggccccgggttacgaggcggacgacgtcctgggcaccctggccaagaaggccgaaagggaggggatggaggtgcgcatcctcacgggagaccgggacttcttccagctcctctccgagaaggtctcggtcctcctgccggacgggaccctggtcaccccaaaggacgtccaggagaagtacggggtgccgccggagcgctgggtggacttccgcgccctcacgggggaccgctcggacaacatccccggggtggcggggataggggagaagaccgcccttcgactcctcgcggagtgggggagcgtggagaacctcctgaagaacctggaccgggtgaagccggactcggtccggcgcaagatagaggcgcaccttgaggacctccgcctctccttggacctggcccgcatccgcaccgacctccccttggaggtggactttaaggccctgcgccgcaggacccccgacctggagggcctgagggcctttttggaggagctggagttcggaagcctccttcatgagttcggcctcctgggaggggagaagccccgggaggaggccccctggcccccgcccgaaggggccttcgtaggcttcctcctctcccgcaaggagcccatgtgggcggagcttctggccctggcggccgccgcagagggccgggtccaccgggcaacaagcccggttgaggccctggccgacctcaaggaggcccgggggttcctggccaaggacctggccgttttggccctgcgggagggggtggccctggaccccacggacgaccccctcctggtggcctacctcctggacccggccaacaccaaccccgagggggtggcccggcgctacgggggcgagttcacggaggacgcagcggagagggccctcctctccgagaggctcttccagaacctctttccccggctttccgagaagctcctctggctctaccaggaggtggagcggcccctctcccgggtcttggcccacatggaggcccggggggtgaggctggacgtcccccttctggaggccctctcctttgagctggagaaggagatggagcgcctggagggggaggtcttccgcttggccggccaccccttcaacctcaactcccgcgaccagctggaaagggtcctctttgacgagctgggccttaccccggtgggtcggacggagaagacgggcaagcgctccaccgcccagggggccctggaggccctccggggggcccaccccatcgtggagctcatcctccagtaccgggagctttccaagctcaaaagcacctacctggaccccctgccccggctcgtccacccgcggacgggccggcttcacacccgcttcaaccagacggccacggccacgggaaggctttccagctccgaccccaacctgcagaacatccccgtgcgcacccccttggggcagcgcatccgcaaggccttcgtggccgaggaggggtggctccttttggcggcggactactcccagatcgagcttcgggtcctggcccacctctcgggggacgagaacctgaagcgggtcttccgggaggggaaggacatccataccgaaaccgccgcctggatgttcggcttagaccccgctctagtggatccaaagatgcgccgggcggccaagacggtcaacttcggcgtcctctacgggatgtccgcccacaggctctcccaggagctcggcatagactacaaggaggcggaggcctttattgagcgctacttccagagcttccccaaggtgcgggcctggatagaaaggaccctggaggagggccggacgcggggctacgtggagaccctgttcggcaggaggcgctatgtgcccggtctggcctcccgggtccgctcggtgcgggaggcggcggagcggatggccttcaacatgcccgtgcagggcaccgccgccgacctgatgaagatcgccatggtcaagctcttccccaggctaaagcccctgggggcccacctcctcctccaggtgcacgacgagctggtcctggaggtgcccgaggaccgggccgaggaggccaaggccctggtcaaggaggtcatggagaacacctaccccttggacgtgcccctcgaggtggaggtgggcgtgggtcgggactggctggaggcgaagggggattgaagcggtcgac

SEQ ID NO: 2807 - DNA, 2605 bp, Artificial Sequence
  Description of Artificial Sequence: Synthetic DNA sequence of Thermus Rt41A DNA Polymerase D763Q
atgaaatacctgctgccgaccgctgctgctggtctgctgctcctcgctgcccagccggcgatggccatggatatcggaattaattcggatccgaattccccactttttgacctggaggaaccccccaagcgggtgcttctggtggacggccaccacctggcctaccgcaccttctacgccctgagcctcaccacctcccggggggagccggtgcagatggtctacggcttcgcccggagcctcctcaaggccttgaaggaggacgggcaggcggtggtcgtggtctttgacgccaaggccccctccttccgccacgaggcctacgaggcctacaaggcgggccgggcccccaccccggaggacttcccccgccagctcgccttggtcaagcggctggtggaccttctgggcctggtccgcctcgaggccccgggttacgaggcggacgacgtcctgggcaccctggccaagaaggccgaaagggaggggatggaggtgcgcatcctcacgggagaccgggacttcttccagctcctctccgagaaggtctcggtcctcctgccggacgggaccctggtcaccccaaaggacgtccaggagaagtacggggtgccgccggagcgctgggtggacttccgcgccctcacgggggaccgctcggacaacatccccggggtggcggggataggggagaagaccgcccttcgactcctcgcggagtgggggagcgtggagaacctcctgaagaacctggaccgggtgaagccggactcggtccggcgcaagatagaggcgcaccttgaggacctccgcctctccttggacctggcccgcatccgcaccgacctccccttggaggtggactttaaggccctgcgccgcaggacccccgacctggagggcctgagggcctttttggaggagctggagttcggaagcctccttcatgagttcggcctcctgggaggggagaagccccgggaggaggccccctggcccccgcccgaaggggccttcgtaggcttcctcctctcccgcaaggagcccatgtgggcggagcttctggccctggcggccgccgcagagggccgggtccaccgggcaacaagcccggttgaggccctggccgacctcaaggaggcccgggggttcctggccaaggacctggccgttttggccctgcgggagggggtggccctggaccccacggacgaccccctcctggtggcctacctcctggacccggccaacaccaaccccgagggggtggcccggcgctacgggggcgagttcacggaggacgcagcggagagggccctcctctccgagaggctcttccagaacctctttccccggctttccgagaagctcctctggctctaccaggaggtggagcggcccctctcccgggtcttggcccacatggaggcccggggggtgaggctggacgtcccccttctggaggccctctcctttgagctggagaaggagatggagcgcctggagggggaggtcttccgcttggccggccaccccttcaacctcaactcccgcgaccagctggaaagggtcctctttgacgagctgggccttaccccggtgggtcggacggagaagacgggcaagcgctccaccgcccagggggccctggaggccctccggggggcccaccccatcgtggagctcatcctccagtaccgggagctttccaagctcaaaagcacctacctggaccccctgccccggctcgtccacccgcggacgggccggcttcacacccgcttcaaccagacggccacggccacgggaaggctttccagctccgaccccaacctgcagaacatccccgtgcgcacccccttggggcagcgcatccgcaaggccttcgtggccgaggaggggtggctccttttggcggcggactactcccagatcgagcttcgggtcctggcccacctctcgggggacgagaacctgaagcgggtcttccgggaggggaaggacatccataccgaaaccgccgcctggatgttcggcttagaccccgctctagtggatccaaagatgcgccgggcggccaagacggtcaacttcggcgtcctctacgggatgtccgcccacaggctctcccaggagctcggcatagactacaaggaggcggaggcctttattgagcgctacttccagagcttccccaaggtgcgggcctggatagaaaggaccctggaggagggccggacgcggggctacgtggagaccctgttcggcaggaggcgctatgtgccccaactggcctcccgggtccgctcggtgcgggaggcggcggagcggatggccttcaacatgcccgtgcagggcaccgccgccgacctgatgaagatcgccatggtcaagctcttccccaggctaaagcccctgggggcccacctcctcctccaggtgcacgacgagctggtcctggaggtgcccgaggaccgggccgaggaggccaaggccctggtcaaggaggtcatggagaacacctaccccttggacgtgcccctcgaggtggaggtgggcgtgggtcgggactggctggaggcgaagggggattgaagcggtcgac

SEQ ID NO: 2808 - DNA, 2605 bp, Artificial Sequence
  Description of Artificial Sequence: Synthetic DNA sequence of Thermus Rt41A DNA Polymerase D763H
atgaaatacctgctgccgaccgctgctgctggtctgctgctcctcgctgcccagccggcgatggccatggatatcggaattaattcggatccgaattccccactttttgacctggaggaaccccccaagcgggtgcttctggtggacggccaccacctggcctaccgcaccttctacgccctgagcctcaccacctcccggggggagccggtgcagatggtctacggcttcgcccggagcctcctcaaggccttgaaggaggacgggcaggcggtggtcgtggtctttgacgccaaggccccctccttccgccacgaggcctacgaggcctacaaggcgggccgggcccccaccccggaggacttcccccgccagctcgccttggtcaagcggctggtggaccttctgggcctggtccgcctcgaggccccgggttacgaggcggacgacgtcctgggcaccctggccaagaaggccgaaagggaggggatggaggtgcgcatcctcacgggagaccgggacttcttccagctcctctccgagaaggtctcggtcctcctgccggacgggaccctggtcaccccaaaggacgtccaggagaagtacggggtgccgccggagcgctgggtggacttccgcgccctcacgggggaccgctcggacaacatccccggggtggcggggataggggagaagaccgcccttcgactcctcgcggagtgggggagcgtggagaacctcctgaagaacctggaccgggtgaagccggactcggtccggcgcaagatagaggcgcaccttgaggacctccgcctctccttggacctggcccgcatccgcaccgacctccccttggaggtggactttaaggccctgcgccgcaggacccccgacctggagggcctgagggcctttttggaggagctggagttcggaagcctccttcatgagttcggcctcctgggaggggagaagccccgggaggaggccccctggcccccgcccgaaggggccttcgtaggcttcctcctctcccgcaaggagcccatgtgggcggagcttctggccctggcggccgccgcagagggccgggtccaccgggcaacaagcccggttgaggccctggccgacctcaaggaggcccgggggttcctggccaaggacctggccgttttggccctgcgggagggggtggccctggaccccacggacgaccccctcctggtggcctacctcctggacccggccaacaccaaccccgagggggtggcccggcgctacgggggcgagttcacggaggacgcagcggagagggccctcctctccgagaggctcttccagaacctctttccccggctttccgagaagctcctctggctctaccaggaggtggagcggcccctctcccgggtcttggcccacatggaggcccggggggtgaggctggacgtcccccttctggaggccctctcctttgagctggagaaggagatggagcgcctggagggggaggtcttccgcttggccggccaccccttcaacctcaactcccgcgaccagctggaaagggtcctctttgacgagctgggccttaccccggtgggtcggacggagaagacgggcaagcgctccaccgcccagggggccctggaggccctccggggggcccaccccatcgtggagctcatcctccagtaccgggagctttccaagctcaaaagcacctacctggaccccctgccccggctcgtccacccgcggacgggccggcttcacacccgcttcaaccagacggccacggccacgggaaggctttccagctccgaccccaacctgcagaacatccccgtgcgcacccccttggggcagcgcatccgcaaggccttcgtggccgaggaggggtggctccttttggcggcggactactcccagatcgagcttcgggtcctggcccacctctcgggggacgagaacctgaagcgggtcttccgggaggggaaggacatccataccgaaaccgccgcctggatgttcggcttagaccccgctctagtggatccaaagatgcgccgggcggccaagacggtcaacttcggcgtcctctacgggatgtccgcccacaggctctcccaggagctcggcatagactacaaggaggcggaggcctttattgagcgctacttccagagcttccccaaggtgcgggcctggatagaaaggaccctggaggagggccggacgcggggctacgtggagaccctgttcggcaggaggcgctatgtgccccatctggcctcccgggtccgctcggtgcgggaggcggcggagcggatggccttcaacatgcccgtgcagggcaccgccgccgacctgatgaagatcgccatggtcaagctcttccccaggctaaagcccctgggggcccacctcctcctccaggtgcacgacgagctggtcctggaggtgcccgaggaccgggccgaggaggccaaggccctggtcaaggaggtcatggagaacacctaccccttggacgtgcccctcgaggtggaggtgggcgtgggtcgggactggctggaggcgaagggggattgaagcggtcgac

SEQ ID NO: 2809 - DNA, 2605 bp, Artificial Sequence
  Description of Artificial Sequence: Synthetic DNA sequence of Thermus Rt41A DNA Polymerase D763I
atgaaatacctgctgccgaccgctgctgctggtctgctgctcctcgctgcccagccggcgatggccatggatatcggaattaattcggatccgaattccccactttttgacctggaggaaccccccaagcgggtgcttctggtggacggccaccacctggcctaccgcaccttctacgccctgagcctcaccacctcccggggggagccggtgcagatggtctacggcttcgcccggagcctcctcaaggccttgaaggaggacgggcaggcggtggtcgtggtctttgacgccaaggccccctccttccgccacgaggcctacgaggcctacaaggcgggccgggcccccaccccggaggacttcccccgccagctcgccttggtcaagcggctggtggaccttctgggcctggtccgcctcgaggccccgggttacgaggcggacgacgtcctgggcaccctggccaagaaggccgaaagggaggggatggaggtgcgcatcctcacgggagaccgggacttcttccagctcctctccgagaaggtctcggtcctcctgccggacgggaccctggtcaccccaaaggacgtccaggagaagtacggggtgccgccggagcgctgggtggacttccgcgccctcacgggggaccgctcggacaacatccccggggtggcggggataggggagaagaccgcccttcgactcctcgcggagtgggggagcgtggagaacctcctgaagaacctggaccgggtgaagccggactcggtccggcgcaagatagaggcgcaccttgaggacctccgcctctccttggacctggcccgcatccgcaccgacctccccttggaggtggactttaaggccctgcgccgcaggacccccgacctggagggcctgagggcctttttggaggagctggagttcggaagcctccttcatgagttcggcctcctgggaggggagaagccccgggaggaggccccctggcccccgcccgaaggggccttcgtaggcttcctcctctcccgcaaggagcccatgtgggcggagcttctggccctggcggccgccgcagagggccgggtccaccgggcaacaagcccggttgaggccctggccgacctcaaggaggcccgggggttcctggccaaggacctggccgttttggccctgcgggagggggtggccctggaccccacggacgaccccctcctggtggcctacctcctggacccggccaacaccaaccccgagggggtggcccggcgctacgggggcgagttcacggaggacgcagcggagagggccctcctctccgagaggctcttccagaacctctttccccggctttccgagaagctcctctggctctaccaggaggtggagcggcccctctcccgggtcttggcccacatggaggcccggggggtgaggctggacgtcccccttctggaggccctctcctttgagctggagaaggagatggagcgcctggagggggaggtcttccgcttggccggccaccccttcaacctcaactcccgcgaccagctggaaagggtcctctttgacgagctgggccttaccccggtgggtcggacggagaagacgggcaagcgctccaccgcccagggggccctggaggccctccggggggcccaccccatcgtggagctcatcctccagtaccgggagctttccaagctcaaaagcacctacctggaccccctgccccggctcgtccacccgcggacgggccggcttcacacccgcttcaaccagacggccacggccacgggaaggctttccagctccgaccccaacctgcagaacatccccgtgcgcacccccttggggcagcgcatccgcaaggccttcgtggccgaggaggggtggctccttttggcggcggactactcccagatcgagcttcgggtcctggcccacctctcgggggacgagaacctgaagcgggtcttccgggaggggaaggacatccataccgaaaccgccgcctggatgttcggcttagaccccgctctagtggatccaaagatgcgccgggcggccaagacggtcaacttcggcgtcctctacgggatgtccgcccacaggctctcccaggagctcggcatagactacaaggaggcggaggcctttattgagcgctacttccagagcttccccaaggtgcgggcctggatagaaaggaccctggaggagggccggacgcggggctacgtggagaccctgttcggcaggaggcgctatgtgcccattctggcctcccgggtccgctcggtgcgggaggcggcggagcggatggccttcaacatgcccgtgcagggcaccgccgccgacctgatgaagatcgccatggtcaagctcttccccaggctaaagcccctgggggcccacctcctcctccaggtgcacgacgagctggtcctggaggtgcccgaggaccgggccgaggaggccaaggccctggtcaaggaggtcatggagaacacctaccccttggacgtgcccctcgaggtggaggtgggcgtgggtcgggactggctggaggcgaagggggattgaagcggtcgac

SEQ ID NO: 2810 - DNA, 2605 bp, Artificial Sequence
  Description of Artificial Sequence: Synthetic DNA sequence of Thermus Rt41A DNA Polymerase D763L
atgaaatacctgctgccgaccgctgctgctggtctgctgctcctcgctgcccagccggcgatggccatggatatcggaattaattcggatccgaattccccactttttgacctggaggaaccccccaagcgggtgcttctggtggacggccaccacctggcctaccgcaccttctacgccctgagcctcaccacctcccggggggagccggtgcagatggtctacggcttcgcccggagcctcctcaaggccttgaaggaggacgggcaggcggtggtcgtggtctttgacgccaaggccccctccttccgccacgaggcctacgaggcctacaaggcgggccgggcccccaccccggaggacttcccccgccagctcgccttggtcaagcggctggtggaccttctgggcctggtccgcctcgaggccccgggttacgaggcggacgacgtcctgggcaccctggccaagaaggccgaaagggaggggatggaggtgcgcatcctcacgggagaccgggacttcttccagctcctctccgagaaggtctcggtcctcctgccggacgggaccctggtcaccccaaaggacgtccaggagaagtacggggtgccgccggagcgctgggtggacttccgcgccctcacgggggaccgctcggacaacatccccggggtggcggggataggggagaagaccgcccttcgactcctcgcggagtgggggagcgtggagaacctcctgaagaacctggaccgggtgaagccggactcggtccggcgcaagatagaggcgcaccttgaggacctccgcctctccttggacctggcccgcatccgcaccgacctccccttggaggtggactttaaggccctgcgccgcaggacccccgacctggagggcctgagggcctttttggaggagctggagttcggaagcctccttcatgagttcggcctcctgggaggggagaagccccgggaggaggccccctggcccccgcccgaaggggccttcgtaggcttcctcctctcccgcaaggagcccatgtgggcggagcttctggccctggcggccgccgcagagggccgggtccaccgggcaacaagcccggttgaggccctggccgacctcaaggaggcccgggggttcctggccaaggacctggccgttttggccctgcgggagggggtggccctggaccccacggacgaccccctcctggtggcctacctcctggacccggccaacaccaaccccgagggggtggcccggcgctacgggggcgagttcacggaggacgcagcggagagggccctcctctccgagaggctcttccagaacctctttccccggctttccgagaagctcctctggctctaccaggaggtggagcggcccctctcccgggtcttggcccacatggaggcccggggggtgaggctggacgtcccccttctggaggccctctcctttgagctggagaaggagatggagcgcctggagggggaggtcttccgcttggccggccaccccttcaacctcaactcccgcgaccagctggaaagggtcctctttgacgagctgggccttaccccggtgggtcggacggagaagacgggcaagcgctccaccgcccagggggccctggaggccctccggggggcccaccccatcgtggagctcatcctccagtaccgggagctttccaagctcaaaagcacctacctggaccccctgccccggctcgtccacccgcggacgggccggcttcacacccgcttcaaccagacggccacggccacgggaaggctttccagctccgaccccaacctgcagaacatccccgtgcgcacccccttggggcagcgcatccgcaaggccttcgtggccgaggaggggtggctccttttggcggcggactactcccagatcgagcttcgggtcctggcccacctctcgggggacgagaacctgaagcgggtcttccgggaggggaaggacatccataccgaaaccgccgcctggatgttcggcttagaccccgctctagtggatccaaagatgcgccgggcggccaagacggtcaacttcggcgtcctctacgggatgtccgcccacaggctctcccaggagctcggcatagactacaaggaggcggaggcctttattgagcgctacttccagagcttccccaaggtgcgggcctggatagaaaggaccctggaggagggccggacgcggggctacgtggagaccctgttcggcaggaggcgctatgtgcccttactggcctcccgggtccgctcggtgcgggaggcggcggagcggatggccttcaacatgcccgtgcagggcaccgccgccgacctgatgaagatcgccatggtcaagctcttccccaggctaaagcccctgggggcccacctcctcctccaggtgcacgacgagctggtcctggaggtgcccgaggaccgggccgaggaggccaaggccctggtcaaggaggtcatggagaacacctaccccttggacgtgcccctcgaggtggaggtgggcgtgggtcgggactggctggaggcgaagggggattgaagcggtcgac

SEQ ID NO: 2811 - DNA, 2605 bp, Artificial Sequence
  Description of Artificial Sequence: Synthetic DNA sequence of Thermus Rt41A DNA Polymerase D763K
atgaaatacctgctgccgaccgctgctgctggtctgctgctcctcgctgcccagccggcgatggccatggatatcggaattaattcggatccgaattccccactttttgacctggaggaaccccccaagcgggtgcttctggtggacggccaccacctggcctaccgcaccttctacgccctgagcctcaccacctcccggggggagccggtgcagatggtctacggcttcgcccggagcctcctcaaggccttgaaggaggacgggcaggcggtggtcgtggtctttgacgccaaggccccctccttccgccacgaggcctacgaggcctacaaggcgggccgggcccccaccccggaggacttcccccgccagctcgccttggtcaagcggctggtggaccttctgggcctggtccgcctcgaggccccgggttacgaggcggacgacgtcctgggcaccctggccaagaaggccgaaagggaggggatggaggtgcgcatcctcacgggagaccgggacttcttccagctcctctccgagaaggtctcggtcctcctgccggacgggaccctggtcaccccaaaggacgtccaggagaagtacggggtgccgccggagcgctgggtggacttccgcgccctcacgggggaccgctcggacaacatccccggggtggcggggataggggagaagaccgcccttcgactcctcgcggagtgggggagcgtggagaacctcctgaagaacctggaccgggtgaagccggactcggtccggcgcaagatagaggcgcaccttgaggacctccgcctctccttggacctggcccgcatccgcaccgacctccccttggaggtggactttaaggccctgcgccgcaggacccccgacctggagggcctgagggcctttttggaggagctggagttcggaagcctccttcatgagttcggcctcctgggaggggagaagccccgggaggaggccccctggcccccgcccgaaggggccttcgtaggcttcctcctctcccgcaaggagcccatgtgggcggagcttctggccctggcggccgccgcagagggccgggtccaccgggcaacaagcccggttgaggccctggccgacctcaaggaggcccgggggttcctggccaaggacctggccgttttggccctgcgggagggggtggccctggaccccacggacgaccccctcctggtggcctacctcctggacccggccaacaccaaccccgagggggtggcccggcgctacgggggcgagttcacggaggacgcagcggagagggccctcctctccgagaggctcttccagaacctctttccccggctttccgagaagctcctctggctctaccaggaggtggagcggcccctctcccgggtcttggcccacatggaggcccggggggtgaggctggacgtcccccttctggaggccctctcctttgagctggagaaggagatggagcgcctggagggggaggtcttccgcttggccggccaccccttcaacctcaactcccgcgaccagctggaaagggtcctctttgacgagctgggccttaccccggtgggtcggacggagaagacgggcaagcgctccaccgcccagggggccctggaggccctccggggggcccaccccatcgtggagctcatcctccagtaccgggagctttccaagctcaaaagcacctacctggaccccctgccccggctcgtccacccgcggacgggccggcttcacacccgcttcaaccagacggccacggccacgggaaggctttccagctccgaccccaacctgcagaacatccccgtgcgcacccccttggggcagcgcatccgcaaggccttcgtggccgaggaggggtggctccttttggcggcggactactcccagatcgagcttcgggtcctggcccacctctcgggggacgagaacctgaagcgggtcttccgggaggggaaggacatccataccgaaaccgccgcctggatgttcggcttagaccccgctctagtggatccaaagatgcgccgggcggccaagacggtcaacttcggcgtcctctacgggatgtccgcccacaggctctcccaggagctcggcatagactacaaggaggcggaggcctttattgagcgctacttccagagcttccccaaggtgcgggcctggatagaaaggaccctggaggagggccggacgcggggctacgtggagaccctgttcggcaggaggcgctatgtgcccaaactggcctcccgggtccgctcggtgcgggaggcggcggagcggatggccttcaacatgcccgtgcagggcaccgccgccgacctgatgaagatcgccatggtcaagctcttccccaggctaaagcccctgggggcccacctcctcctccaggtgcacgacgagctggtcctggaggtgcccgaggaccgggccgaggaggccaaggccctggtcaaggaggtcatggagaacacctaccccttggacgtgcccctcgaggtggaggtgggcgtgggtcgggactggctggaggcgaagggggattgaagcggtcgac

SEQ ID NO: 2812 - DNA, 2605 bp, Artificial Sequence
  Description of Artificial Sequence: Synthetic DNA sequence of Thermus Rt41A DNA Polymerase D763E
atgaaatacctgctgccgaccgctgctgctggtctgctgctcctcgctgcccagccggcgatggccatggatatcggaattaattcggatccgaattccccactttttgacctggaggaaccccccaagcgggtgcttctggtggacggccaccacctggcctaccgcaccttctacgccctgagcctcaccacctcccggggggagccggtgcagatggtctacggcttcgcccggagcctcctcaaggccttgaaggaggacgggcaggcggtggtcgtggtctttgacgccaaggccccctccttccgccacgaggcctacgaggcctacaaggcgggccgggcccccaccccggaggacttcccccgccagctcgccttggtcaagcggctggtggaccttctgggcctggtccgcctcgaggccccgggttacgaggcggacgacgtcctgggcaccctggccaagaaggccgaaagggaggggatggaggtgcgcatcctcacgggagaccgggacttcttccagctcctctccgagaaggtctcggtcctcctgccggacgggaccctggtcaccccaaaggacgtccaggagaagtacggggtgccgccggagcgctgggtggacttccgcgccctcacgggggaccgctcggacaacatccccggggtggcggggataggggagaagaccgcccttcgactcctcgcggagtgggggagcgtggagaacctcctgaagaacctggaccgggtgaagccggactcggtccggcgcaagatagaggcgcaccttgaggacctccgcctctccttggacctggcccgcatccgcaccgacctccccttggaggtggactttaaggccctgcgccgcaggacccccgacctggagggcctgagggcctttttggaggagctggagttcggaagcctccttcatgagttcggcctcctgggaggggagaagccccgggaggaggccccctggcccccgcccgaaggggccttcgtaggcttcctcctctcccgcaaggagcccatgtgggcggagcttctggccctggcggccgccgcagagggccgggtccaccgggcaacaagcccggttgaggccctggccgacctcaaggaggcccgggggttcctggccaaggacctggccgttttggccctgcgggagggggtggccctggaccccacggacgaccccctcctggtggcctacctcctggacccggccaacaccaaccccgagggggtggcccggcgctacgggggcgagttcacggaggacgcagcggagagggccctcctctccgagaggctcttccagaacctctttccccggctttccgagaagctcctctggctctaccaggaggtggagcggcccctctcccgggtcttggcccacatggaggcccggggggtgaggctggacgtcccccttctggaggccctctcctttgagctggagaaggagatggagcgcctggagggggaggtcttccgcttggccggccaccccttcaacctcaactcccgcgaccagctggaaagggtcctctttgacgagctgggccttaccccggtgggtcggacggagaagacgggcaagcgctccaccgcccagggggccctggaggccctccggggggcccaccccatcgtggagctcatcctccagtaccgggagctttccaagctcaaaagcacctacctggaccccctgccccggctcgtccacccgcggacgggccggcttcacacccgcttcaaccagacggccacggccacgggaaggctttccagctccgaccccaacctgcagaacatccccgtgcgcacccccttggggcagcgcatccgcaaggccttcgtggccgaggaggggtggctccttttggcggcggactactcccagatcgagcttcgggtcctggcccacctctcgggggacgagaacctgaagcgggtcttccgggaggggaaggacatccataccgaaaccgccgcctggatgttcggcttagaccccgctctagtggatccaaagatgcgccgggcggccaagacggtcaacttcggcgtcctctacgggatgtccgcccacaggctctcccaggagctcggcatagactacaaggaggcggaggcctttattgagcgctacttccagagcttccccaaggtgcgggcctggatagaaaggaccctggaggagggccggacgcggggctacgtggagaccctgttcggcaggaggcgctatgtgcccgaactggcctcccgggtccgctcggtgcgggaggcggcggagcggatggccttcaacatgcccgtgcagggcaccgccgccgacctgatgaagatcgccatggtcaagctcttccccaggctaaagcccctgggggcccacctcctcctccaggtgcacgacgagctggtcctggaggtgcccgaggaccgggccgaggaggccaaggccctggtcaaggaggtcatggagaacacctaccccttggacgtgcccctcgaggtggaggtgggcgtgggtcgggactggctggaggcgaagggggattgaagcggtcgac

SEQ ID NO: 2813 - DNA, 2605 bp, Artificial Sequence
  Description of Artificial Sequence: Synthetic DNA sequence of Thermus Rt41A DNA Polymerase D763F
atgaaatacctgctgccgaccgctgctgctggtctgctgctcctcgctgcccagccggcgatggccatggatatcggaattaattcggatccgaattccccactttttgacctggaggaaccccccaagcgggtgcttctggtggacggccaccacctggcctaccgcaccttctacgccctgagcctcaccacctcccggggggagccggtgcagatggtctacggcttcgcccggagcctcctcaaggccttgaaggaggacgggcaggcggtggtcgtggtctttgacgccaaggccccctccttccgccacgaggcctacgaggcctacaaggcgggccgggcccccaccccggaggacttcccccgccagctcgccttggtcaagcggctggtggaccttctgggcctggtccgcctcgaggccccgggttacgaggcggacgacgtcctgggcaccctggccaagaaggccgaaagggaggggatggaggtgcgcatcctcacgggagaccgggacttcttccagctcctctccgagaaggtctcggtcctcctgccggacgggaccctggtcaccccaaaggacgtccaggagaagtacggggtgccgccggagcgctgggtggacttccgcgccctcacgggggaccgctcggacaacatccccggggtggcggggataggggagaagaccgcccttcgactcctcgcggagtgggggagcgtggagaacctcctgaagaacctggaccgggtgaagccggactcggtccggcgcaagatagaggcgcaccttgaggacctccgcctctccttggacctggcccgcatccgcaccgacctccccttggaggtggactttaaggccctgcgccgcaggacccccgacctggagggcctgagggcctttttggaggagctggagttcggaagcctccttcatgagttcggcctcctgggaggggagaagccccgggaggaggccccctggcccccgcccgaaggggccttcgtaggcttcctcctctcccgcaaggagcccatgtgggcggagcttctggccctggcggccgccgcagagggccgggtccaccgggcaacaagcccggttgaggccctggccgacctcaaggaggcccgggggttcctggccaaggacctggccgttttggccctgcgggagggggtggccctggaccccacggacgaccccctcctggtggcctacctcctggacccggccaacaccaaccccgagggggtggcccggcgctacgggggcgagttcacggaggacgcagcggagagggccctcctctccgagaggctcttccagaacctctttccccggctttccgagaagctcctctggctctaccaggaggtggagcggcccctctcccgggtcttggcccacatggaggcccggggggtgaggctggacgtcccccttctggaggccctctcctttgagctggagaaggagatggagcgcctggagggggaggtcttccgcttggccggccaccccttcaacctcaactcccgcgaccagctggaaagggtcctctttgacgagctgggccttaccccggtgggtcggacggagaagacgggcaagcgctccaccgcccagggggccctggaggccctccggggggcccaccccatcgtggagctcatcctccagtaccgggagctttccaagctcaaaagcacctacctggaccccctgccccggctcgtccacccgcggacgggccggcttcacacccgcttcaaccagacggccacggccacgggaaggctttccagctccgaccccaacctgcagaacatccccgtgcgcacccccttggggcagcgcatccgcaaggccttcgtggccgaggaggggtggctccttttggcggcggactactcccagatcgagcttcgggtcctggcccacctctcgggggacgagaacctgaagcgggtcttccgggaggggaaggacatccataccgaaaccgccgcctggatgttcggcttagaccccgctctagtggatccaaagatgcgccgggcggccaagacggtcaacttcggcgtcctctacgggatgtccgcccacaggctctcccaggagctcggcatagactacaaggaggcggaggcctttattgagcgctacttccagagcttccccaaggtgcgggcctggatagaaaggaccctggaggagggccggacgcggggctacgtggagaccctgttcggcaggaggcgctatgtgccctttctggcctcccgggtccgctcggtgcgggaggcggcggagcggatggccttcaacatgcccgtgcagggcaccgccgccgacctgatgaagatcgccatggtcaagctcttccccaggctaaagcccctgggggcccacctcctcctccaggtgcacgacgagctggtcctggaggtgcccgaggaccgggccgaggaggccaaggccctggtcaaggaggtcatggagaacacctaccccttggacgtgcccctcgaggtggaggtgggcgtgggtcgggactggctggaggcgaagggggattgaagcggtcgac

SEQ ID NO: 2814 - DNA, 2605 bp, Artificial Sequence
  Description of Artificial Sequence: Synthetic DNA sequence of Thermus Rt41A DNA Polymerase D763S
atgaaatacctgctgccgaccgctgctgctggtctgctgctcctcgctgcccagccggcgatggccatggatatcggaattaattcggatccgaattccccactttttgacctggaggaaccccccaagcgggtgcttctggtggacggccaccacctggcctaccgcaccttctacgccctgagcctcaccacctcccggggggagccggtgcagatggtctacggcttcgcccggagcctcctcaaggccttgaaggaggacgggcaggcggtggtcgtggtctttgacgccaaggccccctccttccgccacgaggcctacgaggcctacaaggcgggccgggcccccaccccggaggacttcccccgccagctcgccttggtcaagcggctggtggaccttctgggcctggtccgcctcgaggccccgggttacgaggcggacgacgtcctgggcaccctggccaagaaggccgaaagggaggggatggaggtgcgcatcctcacgggagaccgggacttcttccagctcctctccgagaaggtctcggtcctcctgccggacgggaccctggtcaccccaaaggacgtccaggagaagtacggggtgccgccggagcgctgggtggacttccgcgccctcacgggggaccgctcggacaacatccccggggtggcggggataggggagaagaccgcccttcgactcctcgcggagtgggggagcgtggagaacctcctgaagaacctggaccgggtgaagccggactcggtccggcgcaagatagaggcgcaccttgaggacctccgcctctccttggacctggcccgcatccgcaccgacctccccttggaggtggactttaaggccctgcgccgcaggacccccgacctggagggcctgagggcctttttggaggagctggagttcggaagcctccttcatgagttcggcctcctgggaggggagaagccccgggaggaggccccctggcccccgcccgaaggggccttcgtaggcttcctcctctcccgcaaggagcccatgtgggcggagcttctggccctggcggccgccgcagagggccgggtccaccgggcaacaagcccggttgaggccctggccgacctcaaggaggcccgggggttcctggccaaggacctggccgttttggccctgcgggagggggtggccctggaccccacggacgaccccctcctggtggcctacctcctggacccggccaacaccaaccccgagggggtggcccggcgctacgggggcgagttcacggaggacgcagcggagagggccctcctctccgagaggctcttccagaacctctttccccggctttccgagaagctcctctggctctaccaggaggtggagcggcccctctcccgggtcttggcccacatggaggcccggggggtgaggctggacgtcccccttctggaggccctctcctttgagctggagaaggagatggagcgcctggagggggaggtcttccgcttggccggccaccccttcaacctcaactcccgcgaccagctggaaagggtcctctttgacgagctgggccttaccccggtgggtcggacggagaagacgggcaagcgctccaccgcccagggggccctggaggccctccggggggcccaccccatcgtggagctcatcctccagtaccgggagctttccaagctcaaaagcacctacctggaccccctgccccggctcgtccacccgcggacgggccggcttcacacccgcttcaaccagacggccacggccacgggaaggctttccagctccgaccccaacctgcagaacatccccgtgcgcacccccttggggcagcgcatccgcaaggccttcgtggccgaggaggggtggctccttttggcggcggactactcccagatcgagcttcgggtcctggcccacctctcgggggacgagaacctgaagcgggtcttccgggaggggaaggacatccataccgaaaccgccgcctggatgttcggcttagaccccgctctagtggatccaaagatgcgccgggcggccaagacggtcaacttcggcgtcctctacgggatgtccgcccacaggctctcccaggagctcggcatagactacaaggaggcggaggcctttattgagcgctacttccagagcttccccaaggtgcgggcctggatagaaaggaccctggaggagggccggacgcggggctacgtggagaccctgttcggcaggaggcgctatgtgccctctctggcctcccgggtccgctcggtgcgggaggcggcggagcggatggccttcaacatgcccgtgcagggcaccgccgccgacctgatgaagatcgccatggtcaagctcttccccaggctaaagcccctgggggcccacctcctcctccaggtgcacgacgagctggtcctggaggtgcccgaggaccgggccgaggaggccaaggccctggtcaaggaggtcatggagaacacctaccccttggacgtgcccctcgaggtggaggtgggcgtgggtcgggactggctggaggcgaagggggattgaagcggtcgac

SEQ ID NO: 2815 - DNA, 2605 bp, Artificial Sequence
  Description of Artificial Sequence: Synthetic DNA sequence of Thermus Rt41A DNA Polymerase D763Y
atgaaatacctgctgccgaccgctgctgctggtctgctgctcctcgctgcccagccggcgatggccatggatatcggaattaattcggatccgaattccccactttttgacctggaggaaccccccaagcgggtgcttctggtggacggccaccacctggcctaccgcaccttctacgccctgagcctcaccacctcccggggggagccggtgcagatggtctacggcttcgcccggagcctcctcaaggccttgaaggaggacgggcaggcggtggtcgtggtctttgacgccaaggccccctccttccgccacgaggcctacgaggcctacaaggcgggccgggcccccaccccggaggacttcccccgccagctcgccttggtcaagcggctggtggaccttctgggcctggtccgcctcgaggccccgggttacgaggcggacgacgtcctgggcaccctggccaagaaggccgaaagggaggggatggaggtgcgcatcctcacgggagaccgggacttcttccagctcctctccgagaaggtctcggtcctcctgccggacgggaccctggtcaccccaaaggacgtccaggagaagtacggggtgccgccggagcgctgggtggacttccgcgccctcacgggggaccgctcggacaacatccccggggtggcggggataggggagaagaccgcccttcgactcctcgcggagtgggggagcgtggagaacctcctgaagaacctggaccgggtgaagccggactcggtccggcgcaagatagaggcgcaccttgaggacctccgcctctccttggacctggcccgcatccgcaccgacctccccttggaggtggactttaaggccctgcgccgcaggacccccgacctggagggcctgagggcctttttggaggagctggagttcggaagcctccttcatgagttcggcctcctgggaggggagaagccccgggaggaggccccctggcccccgcccgaaggggccttcgtaggcttcctcctctcccgcaaggagcccatgtgggcggagcttctggccctggcggccgccgcagagggccgggtccaccgggcaacaagcccggttgaggccctggccgacctcaaggaggcccgggggttcctggccaaggacctggccgttttggccctgcgggagggggtggccctggaccccacggacgaccccctcctggtggcctacctcctggacccggccaacaccaaccccgagggggtggcccggcgctacgggggcgagttcacggaggacgcagcggagagggccctcctctccgagaggctcttccagaacctctttccccggctttccgagaagctcctctggctctaccaggaggtggagcggcccctctcccgggtcttggcccacatggaggcccggggggtgaggctggacgtcccccttctggaggccctctcctttgagctggagaaggagatggagcgcctggagggggaggtcttccgcttggccggccaccccttcaacctcaactcccgcgaccagctggaaagggtcctctttgacgagctgggccttaccccggtgggtcggacggagaagacgggcaagcgctccaccgcccagggggccctggaggccctccggggggcccaccccatcgtggagctcatcctccagtaccgggagctttccaagctcaaaagcacctacctggaccccctgccccggctcgtccacccgcggacgggccggcttcacacccgcttcaaccagacggccacggccacgggaaggctttccagctccgaccccaacctgcagaacatccccgtgcgcacccccttggggcagcgcatccgcaaggccttcgtggccgaggaggggtggctccttttggcggcggactactcccagatcgagcttcgggtcctggcccacctctcgggggacgagaacctgaagcgggtcttccgggaggggaaggacatccataccgaaaccgccgcctggatgttcggcttagaccccgctctagtggatccaaagatgcgccgggcggccaagacggtcaacttcggcgtcctctacgggatgtccgcccacaggctctcccaggagctcggcatagactacaaggaggcggaggcctttattgagcgctacttccagagcttccccaaggtgcgggcctggatagaaaggaccctggaggagggccggacgcggggctacgtggagaccctgttcggcaggaggcgctatgtgccctatctggcctcccgggtccgctcggtgcgggaggcggcggagcggatggccttcaacatgcccgtgcagggcaccgccgccgacctgatgaagatcgccatggtcaagctcttccccaggctaaagcccctgggggcccacctcctcctccaggtgcacgacgagctggtcctggaggtgcccgaggaccgggccgaggaggccaaggccctggtcaaggaggtcatggagaacacctaccccttggacgtgcccctcgaggtggaggtgggcgtgggtcgggactggctggaggcgaagggggattgaagcggtcgac

SEQ ID NO: 2816 - DNA, 2605 bp, Artificial Sequence
  Description of Artificial Sequence: Synthetic DNA sequence of Thermus Rt41A DNA Polymerase D763W
atgaaatacctgctgccgaccgctgctgctggtctgctgctcctcgctgcccagccggcgatggccatggatatcggaattaattcggatccgaattccccactttttgacctggaggaaccccccaagcgggtgcttctggtggacggccaccacctggcctaccgcaccttctacgccctgagcctcaccacctcccggggggagccggtgcagatggtctacggcttcgcccggagcctcctcaaggccttgaaggaggacgggcaggcggtggtcgtggtctttgacgccaaggccccctccttccgccacgaggcctacgaggcctacaaggcgggccgggcccccaccccggaggacttcccccgccagctcgccttggtcaagcggctggtggaccttctgggcctggtccgcctcgaggccccgggttacgaggcggacgacgtcctgggcaccctggccaagaaggccgaaagggaggggatggaggtgcgcatcctcacgggagaccgggacttcttccagctcctctccgagaaggtctcggtcctcctgccggacgggaccctggtcaccccaaaggacgtccaggagaagtacggggtgccgccggagcgctgggtggacttccgcgccctcacgggggaccgctcggacaacatccccggggtggcggggataggggagaagaccgcccttcgactcctcgcggagtgggggagcgtggagaacctcctgaagaacctggaccgggtgaagccggactcggtccggcgcaagatagaggcgcaccttgaggacctccgcctctccttggacctggcccgcatccgcaccgacctccccttggaggtggactttaaggccctgcgccgcaggacccccgacctggagggcctgagggcctttttggaggagctggagttcggaagcctccttcatgagttcggcctcctgggaggggagaagccccgggaggaggccccctggcccccgcccgaaggggccttcgtaggcttcctcctctcccgcaaggagcccatgtgggcggagcttctggccctggcggccgccgcagagggccgggtccaccgggcaacaagcccggttgaggccctggccgacctcaaggaggcccgggggttcctggccaaggacctggccgttttggccctgcgggagggggtggccctggaccccacggacgaccccctcctggtggcctacctcctggacccggccaacaccaaccccgagggggtggcccggcgctacgggggcgagttcacggaggacgcagcggagagggccctcctctccgagaggctcttccagaacctctttccccggctttccgagaagctcctctggctctaccaggaggtggagcggcccctctcccgggtcttggcccacatggaggcccggggggtgaggctggacgtcccccttctggaggccctctcctttgagctggagaaggagatggagcgcctggagggggaggtcttccgcttggccggccaccccttcaacctcaactcccgcgaccagctggaaagggtcctctttgacgagctgggccttaccccggtgggtcggacggagaagacgggcaagcgctccaccgcccagggggccctggaggccctccggggggcccaccccatcgtggagctcatcctccagtaccgggagctttccaagctcaaaagcacctacctggaccccctgccccggctcgtccacccgcggacgggccggcttcacacccgcttcaaccagacggccacggccacgggaaggctttccagctccgaccccaacctgcagaacatccccgtgcgcacccccttggggcagcgcatccgcaaggccttcgtggccgaggaggggtggctccttttggcggcggactactcccagatcgagcttcgggtcctggcccacctctcgggggacgagaacctgaagcgggtcttccgggaggggaaggacatccataccgaaaccgccgcctggatgttcggcttagaccccgctctagtggatccaaagatgcgccgggcggccaagacggtcaacttcggcgtcctctacgggatgtccgcccacaggctctcccaggagctcggcatagactacaaggaggcggaggcctttattgagcgctacttccagagcttccccaaggtgcgggcctggatagaaaggaccctggaggagggccggacgcggggctacgtggagaccctgttcggcaggaggcgctatgtgccctggctggcctcccgggtccgctcggtgcgggaggcggcggagcggatggccttcaacatgcccgtgcagggcaccgccgccgacctgatgaagatcgccatggtcaagctcttccccaggctaaagcccctgggggcccacctcctcctccaggtgcacgacgagctggtcctggaggtgcccgaggaccgggccgaggaggccaaggccctggtcaaggaggtcatggagaacacctaccccttggacgtgcccctcgaggtggaggtgggcgtgggtcgggactggctggaggcgaagggggattgaagcggtcgac

SEQ ID NO: 2817 - DNA, 2605 bp, Artificial Sequence
  Description of Artificial Sequence: Synthetic DNA sequence of Thermus Rt41A DNA Polymerase D763P
atgaaatacctgctgccgaccgctgctgctggtctgctgctcctcgctgcccagccggcgatggccatggatatcggaattaattcggatccgaattccccactttttgacctggaggaaccccccaagcgggtgcttctggtggacggccaccacctggcctaccgcaccttctacgccctgagcctcaccacctcccggggggagccggtgcagatggtctacggcttcgcccggagcctcctcaaggccttgaaggaggacgggcaggcggtggtcgtggtctttgacgccaaggccccctccttccgccacgaggcctacgaggcctacaaggcgggccgggcccccaccccggaggacttcccccgccagctcgccttggtcaagcggctggtggaccttctgggcctggtccgcctcgaggccccgggttacgaggcggacgacgtcctgggcaccctggccaagaaggccgaaagggaggggatggaggtgcgcatcctcacgggagaccgggacttcttccagctcctctccgagaaggtctcggtcctcctgccggacgggaccctggtcaccccaaaggacgtccaggagaagtacggggtgccgccggagcgctgggtggacttccgcgccctcacgggggaccgctcggacaacatccccggggtggcggggataggggagaagaccgcccttcgactcctcgcggagtgggggagcgtggagaacctcctgaagaacctggaccgggtgaagccggactcggtccggcgcaagatagaggcgcaccttgaggacctccgcctctccttggacctggcccgcatccgcaccgacctccccttggaggtggactttaaggccctgcgccgcaggacccccgacctggagggcctgagggcctttttggaggagctggagttcggaagcctccttcatgagttcggcctcctgggaggggagaagccccgggaggaggccccctggcccccgcccgaaggggccttcgtaggcttcctcctctcccgcaaggagcccatgtgggcggagcttctggccctggcggccgccgcagagggccgggtccaccgggcaacaagcccggttgaggccctggccgacctcaaggaggcccgggggttcctggccaaggacctggccgttttggccctgcgggagggggtggccctggaccccacggacgaccccctcctggtggcctacctcctggacccggccaacaccaaccccgagggggtggcccggcgctacgggggcgagttcacggaggacgcagcggagagggccctcctctccgagaggctcttccagaacctctttccccggctttccgagaagctcctctggctctaccaggaggtggagcggcccctctcccgggtcttggcccacatggaggcccggggggtgaggctggacgtcccccttctggaggccctctcctttgagctggagaaggagatggagcgcctggagggggaggtcttccgcttggccggccaccccttcaacctcaactcccgcgaccagctggaaagggtcctctttgacgagctgggccttaccccggtgggtcggacggagaagacgggcaagcgctccaccgcccagggggccctggaggccctccggggggcccaccccatcgtggagctcatcctccagtaccgggagctttccaagctcaaaagcacctacctggaccccctgccccggctcgtccacccgcggacgggccggcttcacacccgcttcaaccagacggccacggccacgggaaggctttccagctccgaccccaacctgcagaacatccccgtgcgcacccccttggggcagcgcatccgcaaggccttcgtggccgaggaggggtggctccttttggcggcggactactcccagatcgagcttcgggtcctggcccacctctcgggggacgagaacctgaagcgggtcttccgggaggggaaggacatccataccgaaaccgccgcctggatgttcggcttagaccccgctctagtggatccaaagatgcgccgggcggccaagacggtcaacttcggcgtcctctacgggatgtccgcccacaggctctcccaggagctcggcatagactacaaggaggcggaggcctttattgagcgctacttccagagcttccccaaggtgcgggcctggatagaaaggaccctggaggagggccggacgcggggctacgtggagaccctgttcggcaggaggcgctatgtgccccctctggcctcccgggtccgctcggtgcgggaggcggcggagcggatggccttcaacatgcccgtgcagggcaccgccgccgacctgatgaagatcgccatggtcaagctcttccccaggctaaagcccctgggggcccacctcctcctccaggtgcacgacgagctggtcctggaggtgcccgaggaccgggccgaggaggccaaggccctggtcaaggaggtcatggagaacacctaccccttggacgtgcccctcgaggtggaggtgggcgtgggtcgggactggctggaggcgaagggggattgaagcggtcgac

SEQ ID NO: 2818 - DNA, 2605 bp, Artificial Sequence
  Description of Artificial Sequence: Synthetic DNA sequence of Thermus Rt41A DNA Polymerase D763M
atgaaatacctgctgccgaccgctgctgctggtctgctgctcctcgctgcccagccggcgatggccatggatatcggaattaattcggatccgaattccccactttttgacctggaggaaccccccaagcgggtgcttctggtggacggccaccacctggcctaccgcaccttctacgccctgagcctcaccacctcccggggggagccggtgcagatggtctacggcttcgcccggagcctcctcaaggccttgaaggaggacgggcaggcggtggtcgtggtctttgacgccaaggccccctccttccgccacgaggcctacgaggcctacaaggcgggccgggcccccaccccggaggacttcccccgccagctcgccttggtcaagcggctggtggaccttctgggcctggtccgcctcgaggccccgggttacgaggcggacgacgtcctgggcaccctggccaagaaggccgaaagggaggggatggaggtgcgcatcctcacgggagaccgggacttcttccagctcctctccgagaaggtctcggtcctcctgccggacgggaccctggtcaccccaaaggacgtccaggagaagtacggggtgccgccggagcgctgggtggacttccgcgccctcacgggggaccgctcggacaacatccccggggtggcggggataggggagaagaccgcccttcgactcctcgcggagtgggggagcgtggagaacctcctgaagaacctggaccgggtgaagccggactcggtccggcgcaagatagaggcgcaccttgaggacctccgcctctccttggacctggcccgcatccgcaccgacctccccttggaggtggactttaaggccctgcgccgcaggacccccgacctggagggcctgagggcctttttggaggagctggagttcggaagcctccttcatgagttcggcctcctgggaggggagaagccccgggaggaggccccctggcccccgcccgaaggggccttcgtaggcttcctcctctcccgcaaggagcccatgtgggcggagcttctggccctggcggccgccgcagagggccgggtccaccgggcaacaagcccggttgaggccctggccgacctcaaggaggcccgggggttcctggccaaggacctggccgttttggccctgcgggagggggtggccctggaccccacggacgaccccctcctggtggcctacctcctggacccggccaacaccaaccccgagggggtggcccggcgctacgggggcgagttcacggaggacgcagcggagagggccctcctctccgagaggctcttccagaacctctttccccggctttccgagaagctcctctggctctaccaggaggtggagcggcccctctcccgggtcttggcccacatggaggcccggggggtgaggctggacgtcccccttctggaggccctctcctttgagctggagaaggagatggagcgcctggagggggaggtcttccgcttggccggccaccccttcaacctcaactcccgcgaccagctggaaagggtcctctttgacgagctgggccttaccccggtgggtcggacggagaagacgggcaagcgctccaccgcccagggggccctggaggccctccggggggcccaccccatcgtggagctcatcctccagtaccgggagctttccaagctcaaaagcacctacctggaccccctgccccggctcgtccacccgcggacgggccggcttcacacccgcttcaaccagacggccacggccacgggaaggctttccagctccgaccccaacctgcagaacatccccgtgcgcacccccttggggcagcgcatccgcaaggccttcgtggccgaggaggggtggctccttttggcggcggactactcccagatcgagcttcgggtcctggcccacctctcgggggacgagaacctgaagcgggtcttccgggaggggaaggacatccataccgaaaccgccgcctggatgttcggcttagaccccgctctagtggatccaaagatgcgccgggcggccaagacggtcaacttcggcgtcctctacgggatgtccgcccacaggctctcccaggagctcggcatagactacaaggaggcggaggcctttattgagcgctacttccagagcttccccaaggtgcgggcctggatagaaaggaccctggaggagggccggacgcggggctacgtggagaccctgttcggcaggaggcgctatgtgcccatgctggcctcccgggtccgctcggtgcgggaggcggcggagcggatggccttcaacatgcccgtgcagggcaccgccgccgacctgatgaagatcgccatggtcaagctcttccccaggctaaagcccctgggggcccacctcctcctccaggtgcacgacgagctggtcctggaggtgcccgaggaccgggccgaggaggccaaggccctggtcaaggaggtcatggagaacacctaccccttggacgtgcccctcgaggtggaggtgggcgtgggtcgggactggctggaggcgaagggggattgaagcggtcgac

SEQ ID NO: 2819 - DNA, 2605 bp, Artificial Sequence
  Description of Artificial Sequence: Synthetic DNA sequence of Thermus Rt41A DNA Polymerase D763T
atgaaatacctgctgccgaccgctgctgctggtctgctgctcctcgctgcccagccggcgatggccatggatatcggaattaattcggatccgaattccccactttttgacctggaggaaccccccaagcgggtgcttctggtggacggccaccacctggcctaccgcaccttctacgccctgagcctcaccacctcccggggggagccggtgcagatggtctacggcttcgcccggagcctcctcaaggccttgaaggaggacgggcaggcggtggtcgtggtctttgacgccaaggccccctccttccgccacgaggcctacgaggcctacaaggcgggccgggcccccaccccggaggacttcccccgccagctcgccttggtcaagcggctggtggaccttctgggcctggtccgcctcgaggccccgggttacgaggcggacgacgtcctgggcaccctggccaagaaggccgaaagggaggggatggaggtgcgcatcctcacgggagaccgggacttcttccagctcctctccgagaaggtctcggtcctcctgccggacgggaccctggtcaccccaaaggacgtccaggagaagtacggggtgccgccggagcgctgggtggacttccgcgccctcacgggggaccgctcggacaacatccccggggtggcggggataggggagaagaccgcccttcgactcctcgcggagtgggggagcgtggagaacctcctgaagaacctggaccgggtgaagccggactcggtccggcgcaagatagaggcgcaccttgaggacctccgcctctccttggacctggcccgcatccgcaccgacctccccttggaggtggactttaaggccctgcgccgcaggacccccgacctggagggcctgagggcctttttggaggagctggagttcggaagcctccttcatgagttcggcctcctgggaggggagaagccccgggaggaggccccctggcccccgcccgaaggggccttcgtaggcttcctcctctcccgcaaggagcccatgtgggcggagcttctggccctggcggccgccgcagagggccgggtccaccgggcaacaagcccggttgaggccctggccgacctcaaggaggcccgggggttcctggccaaggacctggccgttttggccctgcgggagggggtggccctggaccccacggacgaccccctcctggtggcctacctcctggacccggccaacaccaaccccgagggggtggcccggcgctacgggggcgagttcacggaggacgcagcggagagggccctcctctccgagaggctcttccagaacctctttccccggctttccgagaagctcctctggctctaccaggaggtggagcggcccctctcccgggtcttggcccacatggaggcccggggggtgaggctggacgtcccccttctggaggccctctcctttgagctggagaaggagatggagcgcctggagggggaggtcttccgcttggccggccaccccttcaacctcaactcccgcgaccagctggaaagggtcctctttgacgagctgggccttaccccggtgggtcggacggagaagacgggcaagcgctccaccgcccagggggccctggaggccctccggggggcccaccccatcgtggagctcatcctccagtaccgggagctttccaagctcaaaagcacctacctggaccccctgccccggctcgtccacccgcggacgggccggcttcacacccgcttcaaccagacggccacggccacgggaaggctttccagctccgaccccaacctgcagaacatccccgtgcgcacccccttggggcagcgcatccgcaaggccttcgtggccgaggaggggtggctccttttggcggcggactactcccagatcgagcttcgggtcctggcccacctctcgggggacgagaacctgaagcgggtcttccgggaggggaaggacatccataccgaaaccgccgcctggatgttcggcttagaccccgctctagtggatccaaagatgcgccgggcggccaagacggtcaacttcggcgtcctctacgggatgtccgcccacaggctctcccaggagctcggcatagactacaaggaggcggaggcctttattgagcgctacttccagagcttccccaaggtgcgggcctggatagaaaggaccctggaggagggccggacgcggggctacgtggagaccctgttcggcaggaggcgctatgtgcccactctggcctcccgggtccgctcggtgcgggaggcggcggagcggatggccttcaacatgcccgtgcagggcaccgccgccgacctgatgaagatcgccatggtcaagctcttccccaggctaaagcccctgggggcccacctcctcctccaggtgcacgacgagctggtcctggaggtgcccgaggaccgggccgaggaggccaaggccctggtcaaggaggtcatggagaacacctaccccttggacgtgcccctcgaggtggaggtgggcgtgggtcgggactggctggaggcgaagggggattgaagcggtcgac

SEQ ID NO: 2820 - DNA, 2605 bp, Artificial Sequence
  Description of Artificial Sequence: Synthetic DNA sequence of Thermus Rt41A DNA Polymerase D763N
atgaaatacctgctgccgaccgctgctgctggtctgctgctcctcgctgcccagccggcgatggccatggatatcggaattaattcggatccgaattccccactttttgacctggaggaaccccccaagcgggtgcttctggtggacggccaccacctggcctaccgcaccttctacgccctgagcctcaccacctcccggggggagccggtgcagatggtctacggcttcgcccggagcctcctcaaggccttgaaggaggacgggcaggcggtggtcgtggtctttgacgccaaggccccctccttccgccacgaggcctacgaggcctacaaggcgggccgggcccccaccccggaggacttcccccgccagctcgccttggtcaagcggctggtggaccttctgggcctggtccgcctcgaggccccgggttacgaggcggacgacgtcctgggcaccctggccaagaaggccgaaagggaggggatggaggtgcgcatcctcacgggagaccgggacttcttccagctcctctccgagaaggtctcggtcctcctgccggacgggaccctggtcaccccaaaggacgtccaggagaagtacggggtgccgccggagcgctgggtggacttccgcgccctcacgggggaccgctcggacaacatccccggggtggcggggataggggagaagaccgcccttcgactcctcgcggagtgggggagcgtggagaacctcctgaagaacctggaccgggtgaagccggactcggtccggcgcaagatagaggcgcaccttgaggacctccgcctctccttggacctggcccgcatccgcaccgacctccccttggaggtggactttaaggccctgcgccgcaggacccccgacctggagggcctgagggcctttttggaggagctggagttcggaagcctccttcatgagttcggcctcctgggaggggagaagccccgggaggaggccccctggcccccgcccgaaggggccttcgtaggcttcctcctctcccgcaaggagcccatgtgggcggagcttctggccctggcggccgccgcagagggccgggtccaccgggcaacaagcccggttgaggccctggccgacctcaaggaggcccgggggttcctggccaaggacctggccgttttggccctgcgggagggggtggccctggaccccacggacgaccccctcctggtggcctacctcctggacccggccaacaccaaccccgagggggtggcccggcgctacgggggcgagttcacggaggacgcagcggagagggccctcctctccgagaggctcttccagaacctctttccccggctttccgagaagctcctctggctctaccaggaggtggagcggcccctctcccgggtcttggcccacatggaggcccggggggtgaggctggacgtcccccttctggaggccctctcctttgagctggagaaggagatggagcgcctggagggggaggtcttccgcttggccggccaccccttcaacctcaactcccgcgaccagctggaaagggtcctctttgacgagctgggccttaccccggtgggtcggacggagaagacgggcaagcgctccaccgcccagggggccctggaggccctccggggggcccaccccatcgtggagctcatcctccagtaccgggagctttccaagctcaaaagcacctacctggaccccctgccccggctcgtccacccgcggacgggccggcttcacacccgcttcaaccagacggccacggccacgggaaggctttccagctccgaccccaacctgcagaacatccccgtgcgcacccccttggggcagcgcatccgcaaggccttcgtggccgaggaggggtggctccttttggcggcggactactcccagatcgagcttcgggtcctggcccacctctcgggggacgagaacctgaagcgggtcttccgggaggggaaggacatccataccgaaaccgccgcctggatgttcggcttagaccccgctctagtggatccaaagatgcgccgggcggccaagacggtcaacttcggcgtcctctacgggatgtccgcccacaggctctcccaggagctcggcatagactacaaggaggcggaggcctttattgagcgctacttccagagcttccccaaggtgcgggcctggatagaaaggaccctggaggagggccggacgcggggctacgtggagaccctgttcggcaggaggcgctatgtgcccaatctggcctcccgggtccgctcggtgcgggaggcggcggagcggatggccttcaacatgcccgtgcagggcaccgccgccgacctgatgaagatcgccatggtcaagctcttccccaggctaaagcccctgggggcccacctcctcctccaggtgcacgacgagctggtcctggaggtgcccgaggaccgggccgaggaggccaaggccctggtcaaggaggtcatggagaacacctaccccttggacgtgcccctcgaggtggaggtgggcgtgggtcgggactggctggaggcgaagggggattgaagcggtcgac

SEQ ID NO: 2821 - DNA, 2605 bp, Artificial Sequence
  Description of Artificial Sequence: Synthetic DNA sequence of Thermus Rt41A DNA Polymerase D763V
atgaaatacctgctgccgaccgctgctgctggtctgctgctcctcgctgcccagccggcgatggccatggatatcggaattaattcggatccgaattccccactttttgacctggaggaaccccccaagcgggtgcttctggtggacggccaccacctggcctaccgcaccttctacgccctgagcctcaccacctcccggggggagccggtgcagatggtctacggcttcgcccggagcctcctcaaggccttgaaggaggacgggcaggcggtggtcgtggtctttgacgccaaggccccctccttccgccacgaggcctacgaggcctacaaggcgggccgggcccccaccccggaggacttcccccgccagctcgccttggtcaagcggctggtggaccttctgggcctggtccgcctcgaggccccgggttacgaggcggacgacgtcctgggcaccctggccaagaaggccgaaagggaggggatggaggtgcgcatcctcacgggagaccgggacttcttccagctcctctccgagaaggtctcggtcctcctgccggacgggaccctggtcaccccaaaggacgtccaggagaagtacggggtgccgccggagcgctgggtggacttccgcgccctcacgggggaccgctcggacaacatccccggggtggcggggataggggagaagaccgcccttcgactcctcgcggagtgggggagcgtggagaacctcctgaagaacctggaccgggtgaagccggactcggtccggcgcaagatagaggcgcaccttgaggacctccgcctctccttggacctggcccgcatccgcaccgacctccccttggaggtggactttaaggccctgcgccgcaggacccccgacctggagggcctgagggcctttttggaggagctggagttcggaagcctccttcatgagttcggcctcctgggaggggagaagccccgggaggaggccccctggcccccgcccgaaggggccttcgtaggcttcctcctctcccgcaaggagcccatgtgggcggagcttctggccctggcggccgccgcagagggccgggtccaccgggcaacaagcccggttgaggccctggccgacctcaaggaggcccgggggttcctggccaaggacctggccgttttggccctgcgggagggggtggccctggaccccacggacgaccccctcctggtggcctacctcctggacccggccaacaccaaccccgagggggtggcccggcgctacgggggcgagttcacggaggacgcagcggagagggccctcctctccgagaggctcttccagaacctctttccccggctttccgagaagctcctctggctctaccaggaggtggagcggcccctctcccgggtcttggcccacatggaggcccggggggtgaggctggacgtcccccttctggaggccctctcctttgagctggagaaggagatggagcgcctggagggggaggtcttccgcttggccggccaccccttcaacctcaactcccgcgaccagctggaaagggtcctctttgacgagctgggccttaccccggtgggtcggacggagaagacgggcaagcgctccaccgcccagggggccctggaggccctccggggggcccaccccatcgtggagctcatcctccagtaccgggagctttccaagctcaaaagcacctacctggaccccctgccccggctcgtccacccgcggacgggccggcttcacacccgcttcaaccagacggccacggccacgggaaggctttccagctccgaccccaacctgcagaacatccccgtgcgcacccccttggggcagcgcatccgcaaggccttcgtggccgaggaggggtggctccttttggcggcggactactcccagatcgagcttcgggtcctggcccacctctcgggggacgagaacctgaagcgggtcttccgggaggggaaggacatccataccgaaaccgccgcctggatgttcggcttagaccccgctctagtggatccaaagatgcgccgggcggccaagacggtcaacttcggcgtcctctacgggatgtccgcccacaggctctcccaggagctcggcatagactacaaggaggcggaggcctttattgagcgctacttccagagcttccccaaggtgcgggcctggatagaaaggaccctggaggagggccggacgcggggctacgtggagaccctgttcggcaggaggcgctatgtgcccgtcctggcctcccgggtccgctcggtgcgggaggcggcggagcggatggccttcaacatgcccgtgcagggcaccgccgccgacctgatgaagatcgccatggtcaagctcttccccaggctaaagcccctgggggcccacctcctcctccaggtgcacgacgagctggtcctggaggtgcccgaggaccgggccgaggaggccaaggccctggtcaaggaggtcatggagaacacctaccccttggacgtgcccctcgaggtggaggtgggcgtgggtcgggactggctggaggcgaagggggattgaagcggtcgac

SEQ ID NO: 2822 - DNA, 2605 bp, Artificial Sequence
  Description of Artificial Sequence: Synthetic DNA sequence of Thermus Rt41A DNA Polymerase L764A
atgaaatacctgctgccgaccgctgctgctggtctgctgctcctcgctgcccagccggcgatggccatggatatcggaattaattcggatccgaattccccactttttgacctggaggaaccccccaagcgggtgcttctggtggacggccaccacctggcctaccgcaccttctacgccctgagcctcaccacctcccggggggagccggtgcagatggtctacggcttcgcccggagcctcctcaaggccttgaaggaggacgggcaggcggtggtcgtggtctttgacgccaaggccccctccttccgccacgaggcctacgaggcctacaaggcgggccgggcccccaccccggaggacttcccccgccagctcgccttggtcaagcggctggtggaccttctgggcctggtccgcctcgaggccccgggttacgaggcggacgacgtcctgggcaccctggccaagaaggccgaaagggaggggatggaggtgcgcatcctcacgggagaccgggacttcttccagctcctctccgagaaggtctcggtcctcctgccggacgggaccctggtcaccccaaaggacgtccaggagaagtacggggtgccgccggagcgctgggtggacttccgcgccctcacgggggaccgctcggacaacatccccggggtggcggggataggggagaagaccgcccttcgactcctcgcggagtgggggagcgtggagaacctcctgaagaacctggaccgggtgaagccggactcggtccggcgcaagatagaggcgcaccttgaggacctccgcctctccttggacctggcccgcatccgcaccgacctccccttggaggtggactttaaggccctgcgccgcaggacccccgacctggagggcctgagggcctttttggaggagctggagttcggaagcctccttcatgagttcggcctcctgggaggggagaagccccgggaggaggccccctggcccccgcccgaaggggccttcgtaggcttcctcctctcccgcaaggagcccatgtgggcggagcttctggccctggcggccgccgcagagggccgggtccaccgggcaacaagcccggttgaggccctggccgacctcaaggaggcccgggggttcctggccaaggacctggccgttttggccctgcgggagggggtggccctggaccccacggacgaccccctcctggtggcctacctcctggacccggccaacaccaaccccgagggggtggcccggcgctacgggggcgagttcacggaggacgcagcggagagggccctcctctccgagaggctcttccagaacctctttccccggctttccgagaagctcctctggctctaccaggaggtggagcggcccctctcccgggtcttggcccacatggaggcccggggggtgaggctggacgtcccccttctggaggccctctcctttgagctggagaaggagatggagcgcctggagggggaggtcttccgcttggccggccaccccttcaacctcaactcccgcgaccagctggaaagggtcctctttgacgagctgggccttaccccggtgggtcggacggagaagacgggcaagcgctccaccgcccagggggccctggaggccctccggggggcccaccccatcgtggagctcatcctccagtaccgggagctttccaagctcaaaagcacctacctggaccccctgccccggctcgtccacccgcggacgggccggcttcacacccgcttcaaccagacggccacggccacgggaaggctttccagctccgaccccaacctgcagaacatccccgtgcgcacccccttggggcagcgcatccgcaaggccttcgtggccgaggaggggtggctccttttggcggcggactactcccagatcgagcttcgggtcctggcccacctctcgggggacgagaacctgaagcgggtcttccgggaggggaaggacatccataccgaaaccgccgcctggatgttcggcttagaccccgctctagtggatccaaagatgcgccgggcggccaagacggtcaacttcggcgtcctctacgggatgtccgcccacaggctctcccaggagctcggcatagactacaaggaggcggaggcctttattgagcgctacttccagagcttccccaaggtgcgggcctggatagaaaggaccctggaggagggccggacgcggggctacgtggagaccctgttcggcaggaggcgctatgtgcccgacgctgcctcccgggtccgctcggtgcgggaggcggcggagcggatggccttcaacatgcccgtgcagggcaccgccgccgacctgatgaagatcgccatggtcaagctcttccccaggctaaagcccctgggggcccacctcctcctccaggtgcacgacgagctggtcctggaggtgcccgaggaccgggccgaggaggccaaggccctggtcaaggaggtcatggagaacacctaccccttggacgtgcccctcgaggtggaggtgggcgtgggtcgggactggctggaggcgaagggggattgaagcggtcgac

SEQ ID NO: 2823 - DNA, 2605 bp, Artificial Sequence
  Description of Artificial Sequence: Synthetic DNA sequence of Thermus Rt41A DNA Polymerase L764R
atgaaatacctgctgccgaccgctgctgctggtctgctgctcctcgctgcccagccggcgatggccatggatatcggaattaattcggatccgaattccccactttttgacctggaggaaccccccaagcgggtgcttctggtggacggccaccacctggcctaccgcaccttctacgccctgagcctcaccacctcccggggggagccggtgcagatggtctacggcttcgcccggagcctcctcaaggccttgaaggaggacgggcaggcggtggtcgtggtctttgacgccaaggccccctccttccgccacgaggcctacgaggcctacaaggcgggccgggcccccaccccggaggacttcccccgccagctcgccttggtcaagcggctggtggaccttctgggcctggtccgcctcgaggccccgggttacgaggcggacgacgtcctgggcaccctggccaagaaggccgaaagggaggggatggaggtgcgcatcctcacgggagaccgggacttcttccagctcctctccgagaaggtctcggtcctcctgccggacgggaccctggtcaccccaaaggacgtccaggagaagtacggggtgccgccggagcgctgggtggacttccgcgccctcacgggggaccgctcggacaacatccccggggtggcggggataggggagaagaccgcccttcgactcctcgcggagtgggggagcgtggagaacctcctgaagaacctggaccgggtgaagccggactcggtccggcgcaagatagaggcgcaccttgaggacctccgcctctccttggacctggcccgcatccgcaccgacctccccttggaggtggactttaaggccctgcgccgcaggacccccgacctggagggcctgagggcctttttggaggagctggagttcggaagcctccttcatgagttcggcctcctgggaggggagaagccccgggaggaggccccctggcccccgcccgaaggggccttcgtaggcttcctcctctcccgcaaggagcccatgtgggcggagcttctggccctggcggccgccgcagagggccgggtccaccgggcaacaagcccggttgaggccctggccgacctcaaggaggcccgggggttcctggccaaggacctggccgttttggccctgcgggagggggtggccctggaccccacggacgaccccctcctggtggcctacctcctggacccggccaacaccaaccccgagggggtggcccggcgctacgggggcgagttcacggaggacgcagcggagagggccctcctctccgagaggctcttccagaacctctttccccggctttccgagaagctcctctggctctaccaggaggtggagcggcccctctcccgggtcttggcccacatggaggcccggggggtgaggctggacgtcccccttctggaggccctctcctttgagctggagaaggagatggagcgcctggagggggaggtcttccgcttggccggccaccccttcaacctcaactcccgcgaccagctggaaagggtcctctttgacgagctgggccttaccccggtgggtcggacggagaagacgggcaagcgctccaccgcccagggggccctggaggccctccggggggcccaccccatcgtggagctcatcctccagtaccgggagctttccaagctcaaaagcacctacctggaccccctgccccggctcgtccacccgcggacgggccggcttcacacccgcttcaaccagacggccacggccacgggaaggctttccagctccgaccccaacctgcagaacatccccgtgcgcacccccttggggcagcgcatccgcaaggccttcgtggccgaggaggggtggctccttttggcggcggactactcccagatcgagcttcgggtcctggcccacctctcgggggacgagaacctgaagcgggtcttccgggaggggaaggacatccataccgaaaccgccgcctggatgttcggcttagaccccgctctagtggatccaaagatgcgccgggcggccaagacggtcaacttcggcgtcctctacgggatgtccgcccacaggctctcccaggagctcggcatagactacaaggaggcggaggcctttattgagcgctacttccagagcttccccaaggtgcgggcctggatagaaaggaccctggaggagggccggacgcggggctacgtggagaccctgttcggcaggaggcgctatgtgcccgaccgagcctcccgggtccgctcggtgcgggaggcggcggagcggatggccttcaacatgcccgtgcagggcaccgccgccgacctgatgaagatcgccatggtcaagctcttccccaggctaaagcccctgggggcccacctcctcctccaggtgcacgacgagctggtcctggaggtgcccgaggaccgggccgaggaggccaaggccctggtcaaggaggtcatggagaacacctaccccttggacgtgcccctcgaggtggaggtgggcgtgggtcgggactggctggaggcgaagggggattgaagcggtcgac

SEQ ID NO: 2824 - DNA, 2605 bp, Artificial Sequence
  Description of Artificial Sequence: Synthetic DNA sequence of Thermus Rt41A DNA Polymerase L764C
atgaaatacctgctgccgaccgctgctgctggtctgctgctcctcgctgcccagccggcgatggccatggatatcggaattaattcggatccgaattccccactttttgacctggaggaaccccccaagcgggtgcttctggtggacggccaccacctggcctaccgcaccttctacgccctgagcctcaccacctcccggggggagccggtgcagatggtctacggcttcgcccggagcctcctcaaggccttgaaggaggacgggcaggcggtggtcgtggtctttgacgccaaggccccctccttccgccacgaggcctacgaggcctacaaggcgggccgggcccccaccccggaggacttcccccgccagctcgccttggtcaagcggctggtggaccttctgggcctggtccgcctcgaggccccgggttacgaggcggacgacgtcctgggcaccctggccaagaaggccgaaagggaggggatggaggtgcgcatcctcacgggagaccgggacttcttccagctcctctccgagaaggtctcggtcctcctgccggacgggaccctggtcaccccaaaggacgtccaggagaagtacggggtgccgccggagcgctgggtggacttccgcgccctcacgggggaccgctcggacaacatccccggggtggcggggataggggagaagaccgcccttcgactcctcgcggagtgggggagcgtggagaacctcctgaagaacctggaccgggtgaagccggactcggtccggcgcaagatagaggcgcaccttgaggacctccgcctctccttggacctggcccgcatccgcaccgacctccccttggaggtggactttaaggccctgcgccgcaggacccccgacctggagggcctgagggcctttttggaggagctggagttcggaagcctccttcatgagttcggcctcctgggaggggagaagccccgggaggaggccccctggcccccgcccgaaggggccttcgtaggcttcctcctctcccgcaaggagcccatgtgggcggagcttctggccctggcggccgccgcagagggccgggtccaccgggcaacaagcccggttgaggccctggccgacctcaaggaggcccgggggttcctggccaaggacctggccgttttggccctgcgggagggggtggccctggaccccacggacgaccccctcctggtggcctacctcctggacccggccaacaccaaccccgagggggtggcccggcgctacgggggcgagttcacggaggacgcagcggagagggccctcctctccgagaggctcttccagaacctctttccccggctttccgagaagctcctctggctctaccaggaggtggagcggcccctctcccgggtcttggcccacatggaggcccggggggtgaggctggacgtcccccttctggaggccctctcctttgagctggagaaggagatggagcgcctggagggggaggtcttccgcttggccggccaccccttcaacctcaactcccgcgaccagctggaaagggtcctctttgacgagctgggccttaccccggtgggtcggacggagaagacgggcaagcgctccaccgcccagggggccctggaggccctccggggggcccaccccatcgtggagctcatcctccagtaccgggagctttccaagctcaaaagcacctacctggaccccctgccccggctcgtccacccgcggacgggccggcttcacacccgcttcaaccagacggccacggccacgggaaggctttccagctccgaccccaacctgcagaacatccccgtgcgcacccccttggggcagcgcatccgcaaggccttcgtggccgaggaggggtggctccttttggcggcggactactcccagatcgagcttcgggtcctggcccacctctcgggggacgagaacctgaagcgggtcttccgggaggggaaggacatccataccgaaaccgccgcctggatgttcggcttagaccccgctctagtggatccaaagatgcgccgggcggccaagacggtcaacttcggcgtcctctacgggatgtccgcccacaggctctcccaggagctcggcatagactacaaggaggcggaggcctttattgagcgctacttccagagcttccccaaggtgcgggcctggatagaaaggaccctggaggagggccggacgcggggctacgtggagaccctgttcggcaggaggcgctatgtgcccgactgtgcctcccgggtccgctcggtgcgggaggcggcggagcggatggccttcaacatgcccgtgcagggcaccgccgccgacctgatgaagatcgccatggtcaagctcttccccaggctaaagcccctgggggcccacctcctcctccaggtgcacgacgagctggtcctggaggtgcccgaggaccgggccgaggaggccaaggccctggtcaaggaggtcatggagaacacctaccccttggacgtgcccctcgaggtggaggtgggcgtgggtcgggactggctggaggcgaagggggattgaagcggtcgac

SEQ ID NO: 2825 - DNA, 2605 bp, Artificial Sequence
  Description of Artificial Sequence: Synthetic DNA sequence of Thermus Rt41A DNA Polymerase L764G
atgaaatacctgctgccgaccgctgctgctggtctgctgctcctcgctgcccagccggcgatggccatggatatcggaattaattcggatccgaattccccactttttgacctggaggaaccccccaagcgggtgcttctggtggacggccaccacctggcctaccgcaccttctacgccctgagcctcaccacctcccggggggagccggtgcagatggtctacggcttcgcccggagcctcctcaaggccttgaaggaggacgggcaggcggtggtcgtggtctttgacgccaaggccccctccttccgccacgaggcctacgaggcctacaaggcgggccgggcccccaccccggaggacttcccccgccagctcgccttggtcaagcggctggtggaccttctgggcctggtccgcctcgaggccccgggttacgaggcggacgacgtcctgggcaccctggccaagaaggccgaaagggaggggatggaggtgcgcatcctcacgggagaccgggacttcttccagctcctctccgagaaggtctcggtcctcctgccggacgggaccctggtcaccccaaaggacgtccaggagaagtacggggtgccgccggagcgctgggtggacttccgcgccctcacgggggaccgctcggacaacatccccggggtggcggggataggggagaagaccgcccttcgactcctcgcggagtgggggagcgtggagaacctcctgaagaacctggaccgggtgaagccggactcggtccggcgcaagatagaggcgcaccttgaggacctccgcctctccttggacctggcccgcatccgcaccgacctccccttggaggtggactttaaggccctgcgccgcaggacccccgacctggagggcctgagggcctttttggaggagctggagttcggaagcctccttcatgagttcggcctcctgggaggggagaagccccgggaggaggccccctggcccccgcccgaaggggccttcgtaggcttcctcctctcccgcaaggagcccatgtgggcggagcttctggccctggcggccgccgcagagggccgggtccaccgggcaacaagcccggttgaggccctggccgacctcaaggaggcccgggggttcctggccaaggacctggccgttttggccctgcgggagggggtggccctggaccccacggacgaccccctcctggtggcctacctcctggacccggccaacaccaaccccgagggggtggcccggcgctacgggggcgagttcacggaggacgcagcggagagggccctcctctccgagaggctcttccagaacctctttccccggctttccgagaagctcctctggctctaccaggaggtggagcggcccctctcccgggtcttggcccacatggaggcccggggggtgaggctggacgtcccccttctggaggccctctcctttgagctggagaaggagatggagcgcctggagggggaggtcttccgcttggccggccaccccttcaacctcaactcccgcgaccagctggaaagggtcctctttgacgagctgggccttaccccggtgggtcggacggagaagacgggcaagcgctccaccgcccagggggccctggaggccctccggggggcccaccccatcgtggagctcatcctccagtaccgggagctttccaagctcaaaagcacctacctggaccccctgccccggctcgtccacccgcggacgggccggcttcacacccgcttcaaccagacggccacggccacgggaaggctttccagctccgaccccaacctgcagaacatccccgtgcgcacccccttggggcagcgcatccgcaaggccttcgtggccgaggaggggtggctccttttggcggcggactactcccagatcgagcttcgggtcctggcccacctctcgggggacgagaacctgaagcgggtcttccgggaggggaaggacatccataccgaaaccgccgcctggatgttcggcttagaccccgctctagtggatccaaagatgcgccgggcggccaagacggtcaacttcggcgtcctctacgggatgtccgcccacaggctctcccaggagctcggcatagactacaaggaggcggaggcctttattgagcgctacttccagagcttccccaaggtgcgggcctggatagaaaggaccctggaggagggccggacgcggggctacgtggagaccctgttcggcaggaggcgctatgtgcccgacggtgcctcccgggtccgctcggtgcgggaggcggcggagcggatggccttcaacatgcccgtgcagggcaccgccgccgacctgatgaagatcgccatggtcaagctcttccccaggctaaagcccctgggggcccacctcctcctccaggtgcacgacgagctggtcctggaggtgcccgaggaccgggccgaggaggccaaggccctggtcaaggaggtcatggagaacacctaccccttggacgtgcccctcgaggtggaggtgggcgtgggtcgggactggctggaggcgaagggggattgaagcggtcgac

SEQ ID NO: 2826 - DNA, 2605 bp, Artificial Sequence
  Description of Artificial Sequence: Synthetic DNA sequence of Thermus Rt41A DNA Polymerase L764Q
atgaaatacctgctgccgaccgctgctgctggtctgctgctcctcgctgcccagccggcgatggccatggatatcggaattaattcggatccgaattccccactttttgacctggaggaaccccccaagcgggtgcttctggtggacggccaccacctggcctaccgcaccttctacgccctgagcctcaccacctcccggggggagccggtgcagatggtctacggcttcgcccggagcctcctcaaggccttgaaggaggacgggcaggcggtggtcgtggtctttgacgccaaggccccctccttccgccacgaggcctacgaggcctacaaggcgggccgggcccccaccccggaggacttcccccgccagctcgccttggtcaagcggctggtggaccttctgggcctggtccgcctcgaggccccgggttacgaggcggacgacgtcctgggcaccctggccaagaaggccgaaagggaggggatggaggtgcgcatcctcacgggagaccgggacttcttccagctcctctccgagaaggtctcggtcctcctgccggacgggaccctggtcaccccaaaggacgtccaggagaagtacggggtgccgccggagcgctgggtggacttccgcgccctcacgggggaccgctcggacaacatccccggggtggcggggataggggagaagaccgcccttcgactcctcgcggagtgggggagcgtggagaacctcctgaagaacctggaccgggtgaagccggactcggtccggcgcaagatagaggcgcaccttgaggacctccgcctctccttggacctggcccgcatccgcaccgacctccccttggaggtggactttaaggccctgcgccgcaggacccccgacctggagggcctgagggcctttttggaggagctggagttcggaagcctccttcatgagttcggcctcctgggaggggagaagccccgggaggaggccccctggcccccgcccgaaggggccttcgtaggcttcctcctctcccgcaaggagcccatgtgggcggagcttctggccctggcggccgccgcagagggccgggtccaccgggcaacaagcccggttgaggccctggccgacctcaaggaggcccgggggttcctggccaaggacctggccgttttggccctgcgggagggggtggccctggaccccacggacgaccccctcctggtggcctacctcctggacccggccaacaccaaccccgagggggtggcccggcgctacgggggcgagttcacggaggacgcagcggagagggccctcctctccgagaggctcttccagaacctctttccccggctttccgagaagctcctctggctctaccaggaggtggagcggcccctctcccgggtcttggcccacatggaggcccggggggtgaggctggacgtcccccttctggaggccctctcctttgagctggagaaggagatggagcgcctggagggggaggtcttccgcttggccggccaccccttcaacctcaactcccgcgaccagctggaaagggtcctctttgacgagctgggccttaccccggtgggtcggacggagaagacgggcaagcgctccaccgcccagggggccctggaggccctccggggggcccaccccatcgtggagctcatcctccagtaccgggagctttccaagctcaaaagcacctacctggaccccctgccccggctcgtccacccgcggacgggccggcttcacacccgcttcaaccagacggccacggccacgggaaggctttccagctccgaccccaacctgcagaacatccccgtgcgcacccccttggggcagcgcatccgcaaggccttcgtggccgaggaggggtggctccttttggcggcggactactcccagatcgagcttcgggtcctggcccacctctcgggggacgagaacctgaagcgggtcttccgggaggggaaggacatccataccgaaaccgccgcctggatgttcggcttagaccccgctctagtggatccaaagatgcgccgggcggccaagacggtcaacttcggcgtcctctacgggatgtccgcccacaggctctcccaggagctcggcatagactacaaggaggcggaggcctttattgagcgctacttccagagcttccccaaggtgcgggcctggatagaaaggaccctggaggagggccggacgcggggctacgtggagaccctgttcggcaggaggcgctatgtgcccgaccaagcctcccgggtccgctcggtgcgggaggcggcggagcggatggccttcaacatgcccgtgcagggcaccgccgccgacctgatgaagatcgccatggtcaagctcttccccaggctaaagcccctgggggcccacctcctcctccaggtgcacgacgagctggtcctggaggtgcccgaggaccgggccgaggaggccaaggccctggtcaaggaggtcatggagaacacctaccccttggacgtgcccctcgaggtggaggtgggcgtgggtcgggactggctggaggcgaagggggattgaagcggtcgac

SEQ ID NO: 2827 - DNA, 2605 bp, Artificial Sequence
  Description of Artificial Sequence: Synthetic DNA sequence of Thermus Rt41A DNA Polymerase L764H
atgaaatacctgctgccgaccgctgctgctggtctgctgctcctcgctgcccagccggcgatggccatggatatcggaattaattcggatccgaattccccactttttgacctggaggaaccccccaagcgggtgcttctggtggacggccaccacctggcctaccgcaccttctacgccctgagcctcaccacctcccggggggagccggtgcagatggtctacggcttcgcccggagcctcctcaaggccttgaaggaggacgggcaggcggtggtcgtggtctttgacgccaaggccccctccttccgccacgaggcctacgaggcctacaaggcgggccgggcccccaccccggaggacttcccccgccagctcgccttggtcaagcggctggtggaccttctgggcctggtccgcctcgaggccccgggttacgaggcggacgacgtcctgggcaccctggccaagaaggccgaaagggaggggatggaggtgcgcatcctcacgggagaccgggacttcttccagctcctctccgagaaggtctcggtcctcctgccggacgggaccctggtcaccccaaaggacgtccaggagaagtacggggtgccgccggagcgctgggtggacttccgcgccctcacgggggaccgctcggacaacatccccggggtggcggggataggggagaagaccgcccttcgactcctcgcggagtgggggagcgtggagaacctcctgaagaacctggaccgggtgaagccggactcggtccggcgcaagatagaggcgcaccttgaggacctccgcctctccttggacctggcccgcatccgcaccgacctccccttggaggtggactttaaggccctgcgccgcaggacccccgacctggagggcctgagggcctttttggaggagctggagttcggaagcctccttcatgagttcggcctcctgggaggggagaagccccgggaggaggccccctggcccccgcccgaaggggccttcgtaggcttcctcctctcccgcaaggagcccatgtgggcggagcttctggccctggcggccgccgcagagggccgggtccaccgggcaacaagcccggttgaggccctggccgacctcaaggaggcccgggggttcctggccaaggacctggccgttttggccctgcgggagggggtggccctggaccccacggacgaccccctcctggtggcctacctcctggacccggccaacaccaaccccgagggggtggcccggcgctacgggggcgagttcacggaggacgcagcggagagggccctcctctccgagaggctcttccagaacctctttccccggctttccgagaagctcctctggctctaccaggaggtggagcggcccctctcccgggtcttggcccacatggaggcccggggggtgaggctggacgtcccccttctggaggccctctcctttgagctggagaaggagatggagcgcctggagggggaggtcttccgcttggccggccaccccttcaacctcaactcccgcgaccagctggaaagggtcctctttgacgagctgggccttaccccggtgggtcggacggagaagacgggcaagcgctccaccgcccagggggccctggaggccctccggggggcccaccccatcgtggagctcatcctccagtaccgggagctttccaagctcaaaagcacctacctggaccccctgccccggctcgtccacccgcggacgggccggcttcacacccgcttcaaccagacggccacggccacgggaaggctttccagctccgaccccaacctgcagaacatccccgtgcgcacccccttggggcagcgcatccgcaaggccttcgtggccgaggaggggtggctccttttggcggcggactactcccagatcgagcttcgggtcctggcccacctctcgggggacgagaacctgaagcgggtcttccgggaggggaaggacatccataccgaaaccgccgcctggatgttcggcttagaccccgctctagtggatccaaagatgcgccgggcggccaagacggtcaacttcggcgtcctctacgggatgtccgcccacaggctctcccaggagctcggcatagactacaaggaggcggaggcctttattgagcgctacttccagagcttccccaaggtgcgggcctggatagaaaggaccctggaggagggccggacgcggggctacgtggagaccctgttcggcaggaggcgctatgtgcccgaccatgcctcccgggtccgctcggtgcgggaggcggcggagcggatggccttcaacatgcccgtgcagggcaccgccgccgacctgatgaagatcgccatggtcaagctcttccccaggctaaagcccctgggggcccacctcctcctccaggtgcacgacgagctggtcctggaggtgcccgaggaccgggccgaggaggccaaggccctggtcaaggaggtcatggagaacacctaccccttggacgtgcccctcgaggtggaggtgggcgtgggtcgggactggctggaggcgaagggggattgaagcggtcgac

SEQ ID NO: 2828 - DNA, 2605 bp, Artificial Sequence
  Description of Artificial Sequence: Synthetic DNA sequence of Thermus Rt41A DNA Polymerase L764I
atgaaatacctgctgccgaccgctgctgctggtctgctgctcctcgctgcccagccggcgatggccatggatatcggaattaattcggatccgaattccccactttttgacctggaggaaccccccaagcgggtgcttctggtggacggccaccacctggcctaccgcaccttctacgccctgagcctcaccacctcccggggggagccggtgcagatggtctacggcttcgcccggagcctcctcaaggccttgaaggaggacgggcaggcggtggtcgtggtctttgacgccaaggccccctccttccgccacgaggcctacgaggcctacaaggcgggccgggcccccaccccggaggacttcccccgccagctcgccttggtcaagcggctggtggaccttctgggcctggtccgcctcgaggccccgggttacgaggcggacgacgtcctgggcaccctggccaagaaggccgaaagggaggggatggaggtgcgcatcctcacgggagaccgggacttcttccagctcctctccgagaaggtctcggtcctcctgccggacgggaccctggtcaccccaaaggacgtccaggagaagtacggggtgccgccggagcgctgggtggacttccgcgccctcacgggggaccgctcggacaacatccccggggtggcggggataggggagaagaccgcccttcgactcctcgcggagtgggggagcgtggagaacctcctgaagaacctggaccgggtgaagccggactcggtccggcgcaagatagaggcgcaccttgaggacctccgcctctccttggacctggcccgcatccgcaccgacctccccttggaggtggactttaaggccctgcgccgcaggacccccgacctggagggcctgagggcctttttggaggagctggagttcggaagcctccttcatgagttcggcctcctgggaggggagaagccccgggaggaggccccctggcccccgcccgaaggggccttcgtaggcttcctcctctcccgcaaggagcccatgtgggcggagcttctggccctggcggccgccgcagagggccgggtccaccgggcaacaagcccggttgaggccctggccgacctcaaggaggcccgggggttcctggccaaggacctggccgttttggccctgcgggagggggtggccctggaccccacggacgaccccctcctggtggcctacctcctggacccggccaacaccaaccccgagggggtggcccggcgctacgggggcgagttcacggaggacgcagcggagagggccctcctctccgagaggctcttccagaacctctttccccggctttccgagaagctcctctggctctaccaggaggtggagcggcccctctcccgggtcttggcccacatggaggcccggggggtgaggctggacgtcccccttctggaggccctctcctttgagctggagaaggagatggagcgcctggagggggaggtcttccgcttggccggccaccccttcaacctcaactcccgcgaccagctggaaagggtcctctttgacgagctgggccttaccccggtgggtcggacggagaagacgggcaagcgctccaccgcccagggggccctggaggccctccggggggcccaccccatcgtggagctcatcctccagtaccgggagctttccaagctcaaaagcacctacctggaccccctgccccggctcgtccacccgcggacgggccggcttcacacccgcttcaaccagacggccacggccacgggaaggctttccagctccgaccccaacctgcagaacatccccgtgcgcacccccttggggcagcgcatccgcaaggccttcgtggccgaggaggggtggctccttttggcggcggactactcccagatcgagcttcgggtcctggcccacctctcgggggacgagaacctgaagcgggtcttccgggaggggaaggacatccataccgaaaccgccgcctggatgttcggcttagaccccgctctagtggatccaaagatgcgccgggcggccaagacggtcaacttcggcgtcctctacgggatgtccgcccacaggctctcccaggagctcggcatagactacaaggaggcggaggcctttattgagcgctacttccagagcttccccaaggtgcgggcctggatagaaaggaccctggaggagggccggacgcggggctacgtggagaccctgttcggcaggaggcgctatgtgcccgacattgcctcccgggtccgctcggtgcgggaggcggcggagcggatggccttcaacatgcccgtgcagggcaccgccgccgacctgatgaagatcgccatggtcaagctcttccccaggctaaagcccctgggggcccacctcctcctccaggtgcacgacgagctggtcctggaggtgcccgaggaccgggccgaggaggccaaggccctggtcaaggaggtcatggagaacacctaccccttggacgtgcccctcgaggtggaggtgggcgtgggtcgggactggctggaggcgaagggggattgaagcggtcgac

SEQ ID NO: 2829 - DNA, 2605 bp, Artificial Sequence
  Description of Artificial Sequence: Synthetic DNA sequence of Thermus Rt41A DNA Polymerase L764K
atgaaatacctgctgccgaccgctgctgctggtctgctgctcctcgctgcccagccggcgatggccatggatatcggaattaattcggatccgaattccccactttttgacctggaggaaccccccaagcgggtgcttctggtggacggccaccacctggcctaccgcaccttctacgccctgagcctcaccacctcccggggggagccggtgcagatggtctacggcttcgcccggagcctcctcaaggccttgaaggaggacgggcaggcggtggtcgtggtctttgacgccaaggccccctccttccgccacgaggcctacgaggcctacaaggcgggccgggcccccaccccggaggacttcccccgccagctcgccttggtcaagcggctggtggaccttctgggcctggtccgcctcgaggccccgggttacgaggcggacgacgtcctgggcaccctggccaagaaggccgaaagggaggggatggaggtgcgcatcctcacgggagaccgggacttcttccagctcctctccgagaaggtctcggtcctcctgccggacgggaccctggtcaccccaaaggacgtccaggagaagtacggggtgccgccggagcgctgggtggacttccgcgccctcacgggggaccgctcggacaacatccccggggtggcggggataggggagaagaccgcccttcgactcctcgcggagtgggggagcgtggagaacctcctgaagaacctggaccgggtgaagccggactcggtccggcgcaagatagaggcgcaccttgaggacctccgcctctccttggacctggcccgcatccgcaccgacctccccttggaggtggactttaaggccctgcgccgcaggacccccgacctggagggcctgagggcctttttggaggagctggagttcggaagcctccttcatgagttcggcctcctgggaggggagaagccccgggaggaggccccctggcccccgcccgaaggggccttcgtaggcttcctcctctcccgcaaggagcccatgtgggcggagcttctggccctggcggccgccgcagagggccgggtccaccgggcaacaagcccggttgaggccctggccgacctcaaggaggcccgggggttcctggccaaggacctggccgttttggccctgcgggagggggtggccctggaccccacggacgaccccctcctggtggcctacctcctggacccggccaacaccaaccccgagggggtggcccggcgctacgggggcgagttcacggaggacgcagcggagagggccctcctctccgagaggctcttccagaacctctttccccggctttccgagaagctcctctggctctaccaggaggtggagcggcccctctcccgggtcttggcccacatggaggcccggggggtgaggctggacgtcccccttctggaggccctctcctttgagctggagaaggagatggagcgcctggagggggaggtcttccgcttggccggccaccccttcaacctcaactcccgcgaccagctggaaagggtcctctttgacgagctgggccttaccccggtgggtcggacggagaagacgggcaagcgctccaccgcccagggggccctggaggccctccggggggcccaccccatcgtggagctcatcctccagtaccgggagctttccaagctcaaaagcacctacctggaccccctgccccggctcgtccacccgcggacgggccggcttcacacccgcttcaaccagacggccacggccacgggaaggctttccagctccgaccccaacctgcagaacatccccgtgcgcacccccttggggcagcgcatccgcaaggccttcgtggccgaggaggggtggctccttttggcggcggactactcccagatcgagcttcgggtcctggcccacctctcgggggacgagaacctgaagcgggtcttccgggaggggaaggacatccataccgaaaccgccgcctggatgttcggcttagaccccgctctagtggatccaaagatgcgccgggcggccaagacggtcaacttcggcgtcctctacgggatgtccgcccacaggctctcccaggagctcggcatagactacaaggaggcggaggcctttattgagcgctacttccagagcttccccaaggtgcgggcctggatagaaaggaccctggaggagggccggacgcggggctacgtggagaccctgttcggcaggaggcgctatgtgcccgacaaagcctcccgggtccgctcggtgcgggaggcggcggagcggatggccttcaacatgcccgtgcagggcaccgccgccgacctgatgaagatcgccatggtcaagctcttccccaggctaaagcccctgggggcccacctcctcctccaggtgcacgacgagctggtcctggaggtgcccgaggaccgggccgaggaggccaaggccctggtcaaggaggtcatggagaacacctaccccttggacgtgcccctcgaggtggaggtgggcgtgggtcgggactggctggaggcgaagggggattgaagcggtcgac

SEQ ID NO: 2830 - DNA, 2605 bp, Artificial Sequence
  Description of Artificial Sequence: Synthetic DNA sequence of Thermus Rt41A DNA Polymerase L764E
atgaaatacctgctgccgaccgctgctgctggtctgctgctcctcgctgcccagccggcgatggccatggatatcggaattaattcggatccgaattccccactttttgacctggaggaaccccccaagcgggtgcttctggtggacggccaccacctggcctaccgcaccttctacgccctgagcctcaccacctcccggggggagccggtgcagatggtctacggcttcgcccggagcctcctcaaggccttgaaggaggacgggcaggcggtggtcgtggtctttgacgccaaggccccctccttccgccacgaggcctacgaggcctacaaggcgggccgggcccccaccccggaggacttcccccgccagctcgccttggtcaagcggctggtggaccttctgggcctggtccgcctcgaggccccgggttacgaggcggacgacgtcctgggcaccctggccaagaaggccgaaagggaggggatggaggtgcgcatcctcacgggagaccgggacttcttccagctcctctccgagaaggtctcggtcctcctgccggacgggaccctggtcaccccaaaggacgtccaggagaagtacggggtgccgccggagcgctgggtggacttccgcgccctcacgggggaccgctcggacaacatccccggggtggcggggataggggagaagaccgcccttcgactcctcgcggagtgggggagcgtggagaacctcctgaagaacctggaccgggtgaagccggactcggtccggcgcaagatagaggcgcaccttgaggacctccgcctctccttggacctggcccgcatccgcaccgacctccccttggaggtggactttaaggccctgcgccgcaggacccccgacctggagggcctgagggcctttttggaggagctggagttcggaagcctccttcatgagttcggcctcctgggaggggagaagccccgggaggaggccccctggcccccgcccgaaggggccttcgtaggcttcctcctctcccgcaaggagcccatgtgggcggagcttctggccctggcggccgccgcagagggccgggtccaccgggcaacaagcccggttgaggccctggccgacctcaaggaggcccgggggttcctggccaaggacctggccgttttggccctgcgggagggggtggccctggaccccacggacgaccccctcctggtggcctacctcctggacccggccaacaccaaccccgagggggtggcccggcgctacgggggcgagttcacggaggacgcagcggagagggccctcctctccgagaggctcttccagaacctctttccccggctttccgagaagctcctctggctctaccaggaggtggagcggcccctctcccgggtcttggcccacatggaggcccggggggtgaggctggacgtcccccttctggaggccctctcctttgagctggagaaggagatggagcgcctggagggggaggtcttccgcttggccggccaccccttcaacctcaactcccgcgaccagctggaaagggtcctctttgacgagctgggccttaccccggtgggtcggacggagaagacgggcaagcgctccaccgcccagggggccctggaggccctccggggggcccaccccatcgtggagctcatcctccagtaccgggagctttccaagctcaaaagcacctacctggaccccctgccccggctcgtccacccgcggacgggccggcttcacacccgcttcaaccagacggccacggccacgggaaggctttccagctccgaccccaacctgcagaacatccccgtgcgcacccccttggggcagcgcatccgcaaggccttcgtggccgaggaggggtggctccttttggcggcggactactcccagatcgagcttcgggtcctggcccacctctcgggggacgagaacctgaagcgggtcttccgggaggggaaggacatccataccgaaaccgccgcctggatgttcggcttagaccccgctctagtggatccaaagatgcgccgggcggccaagacggtcaacttcggcgtcctctacgggatgtccgcccacaggctctcccaggagctcggcatagactacaaggaggcggaggcctttattgagcgctacttccagagcttccccaaggtgcgggcctggatagaaaggaccctggaggagggccggacgcggggctacgtggagaccctgttcggcaggaggcgctatgtgcccgacgaagcctcccgggtccgctcggtgcgggaggcggcggagcggatggccttcaacatgcccgtgcagggcaccgccgccgacctgatgaagatcgccatggtcaagctcttccccaggctaaagcccctgggggcccacctcctcctccaggtgcacgacgagctggtcctggaggtgcccgaggaccgggccgaggaggccaaggccctggtcaaggaggtcatggagaacacctaccccttggacgtgcccctcgaggtggaggtgggcgtgggtcgggactggctggaggcgaagggggattgaagcggtcgac

SEQ ID NO: 2831 - DNA, 2605 bp, Artificial Sequence
  Description of Artificial Sequence: Synthetic DNA sequence of Thermus Rt41A DNA Polymerase L764D
atgaaatacctgctgccgaccgctgctgctggtctgctgctcctcgctgcccagccggcgatggccatggatatcggaattaattcggatccgaattccccactttttgacctggaggaaccccccaagcgggtgcttctggtggacggccaccacctggcctaccgcaccttctacgccctgagcctcaccacctcccggggggagccggtgcagatggtctacggcttcgcccggagcctcctcaaggccttgaaggaggacgggcaggcggtggtcgtggtctttgacgccaaggccccctccttccgccacgaggcctacgaggcctacaaggcgggccgggcccccaccccggaggacttcccccgccagctcgccttggtcaagcggctggtggaccttctgggcctggtccgcctcgaggccccgggttacgaggcggacgacgtcctgggcaccctggccaagaaggccgaaagggaggggatggaggtgcgcatcctcacgggagaccgggacttcttccagctcctctccgagaaggtctcggtcctcctgccggacgggaccctggtcaccccaaaggacgtccaggagaagtacggggtgccgccggagcgctgggtggacttccgcgccctcacgggggaccgctcggacaacatccccggggtggcggggataggggagaagaccgcccttcgactcctcgcggagtgggggagcgtggagaacctcctgaagaacctggaccgggtgaagccggactcggtccggcgcaagatagaggcgcaccttgaggacctccgcctctccttggacctggcccgcatccgcaccgacctccccttggaggtggactttaaggccctgcgccgcaggacccccgacctggagggcctgagggcctttttggaggagctggagttcggaagcctccttcatgagttcggcctcctgggaggggagaagccccgggaggaggccccctggcccccgcccgaaggggccttcgtaggcttcctcctctcccgcaaggagcccatgtgggcggagcttctggccctggcggccgccgcagagggccgggtccaccgggcaacaagcccggttgaggccctggccgacctcaaggaggcccgggggttcctggccaaggacctggccgttttggccctgcgggagggggtggccctggaccccacggacgaccccctcctggtggcctacctcctggacccggccaacaccaaccccgagggggtggcccggcgctacgggggcgagttcacggaggacgcagcggagagggccctcctctccgagaggctcttccagaacctctttccccggctttccgagaagctcctctggctctaccaggaggtggagcggcccctctcccgggtcttggcccacatggaggcccggggggtgaggctggacgtcccccttctggaggccctctcctttgagctggagaaggagatggagcgcctggagggggaggtcttccgcttggccggccaccccttcaacctcaactcccgcgaccagctggaaagggtcctctttgacgagctgggccttaccccggtgggtcggacggagaagacgggcaagcgctccaccgcccagggggccctggaggccctccggggggcccaccccatcgtggagctcatcctccagtaccgggagctttccaagctcaaaagcacctacctggaccccctgccccggctcgtccacccgcggacgggccggcttcacacccgcttcaaccagacggccacggccacgggaaggctttccagctccgaccccaacctgcagaacatccccgtgcgcacccccttggggcagcgcatccgcaaggccttcgtggccgaggaggggtggctccttttggcggcggactactcccagatcgagcttcgggtcctggcccacctctcgggggacgagaacctgaagcgggtcttccgggaggggaaggacatccataccgaaaccgccgcctggatgttcggcttagaccccgctctagtggatccaaagatgcgccgggcggccaagacggtcaacttcggcgtcctctacgggatgtccgcccacaggctctcccaggagctcggcatagactacaaggaggcggaggcctttattgagcgctacttccagagcttccccaaggtgcgggcctggatagaaaggaccctggaggagggccggacgcggggctacgtggagaccctgttcggcaggaggcgctatgtgcccgacgatgcctcccgggtccgctcggtgcgggaggcggcggagcggatggccttcaacatgcccgtgcagggcaccgccgccgacctgatgaagatcgccatggtcaagctcttccccaggctaaagcccctgggggcccacctcctcctccaggtgcacgacgagctggtcctggaggtgcccgaggaccgggccgaggaggccaaggccctggtcaaggaggtcatggagaacacctaccccttggacgtgcccctcgaggtggaggtgggcgtgggtcgggactggctggaggcgaagggggattgaagcggtcgac

SEQ ID NO: 2832 - DNA, 2605 bp, Artificial Sequence
  Description of Artificial Sequence: Synthetic DNA sequence of Thermus Rt41A DNA Polymerase L764F
atgaaatacctgctgccgaccgctgctgctggtctgctgctcctcgctgcccagccggcgatggccatggatatcggaattaattcggatccgaattccccactttttgacctggaggaaccccccaagcgggtgcttctggtggacggccaccacctggcctaccgcaccttctacgccctgagcctcaccacctcccggggggagccggtgcagatggtctacggcttcgcccggagcctcctcaaggccttgaaggaggacgggcaggcggtggtcgtggtctttgacgccaaggccccctccttccgccacgaggcctacgaggcctacaaggcgggccgggcccccaccccggaggacttcccccgccagctcgccttggtcaagcggctggtggaccttctgggcctggtccgcctcgaggccccgggttacgaggcggacgacgtcctgggcaccctggccaagaaggccgaaagggaggggatggaggtgcgcatcctcacgggagaccgggacttcttccagctcctctccgagaaggtctcggtcctcctgccggacgggaccctggtcaccccaaaggacgtccaggagaagtacggggtgccgccggagcgctgggtggacttccgcgccctcacgggggaccgctcggacaacatccccggggtggcggggataggggagaagaccgcccttcgactcctcgcggagtgggggagcgtggagaacctcctgaagaacctggaccgggtgaagccggactcggtccggcgcaagatagaggcgcaccttgaggacctccgcctctccttggacctggcccgcatccgcaccgacctccccttggaggtggactttaaggccctgcgccgcaggacccccgacctggagggcctgagggcctttttggaggagctggagttcggaagcctccttcatgagttcggcctcctgggaggggagaagccccgggaggaggccccctggcccccgcccgaaggggccttcgtaggcttcctcctctcccgcaaggagcccatgtgggcggagcttctggccctggcggccgccgcagagggccgggtccaccgggcaacaagcccggttgaggccctggccgacctcaaggaggcccgggggttcctggccaaggacctggccgttttggccctgcgggagggggtggccctggaccccacggacgaccccctcctggtggcctacctcctggacccggccaacaccaaccccgagggggtggcccggcgctacgggggcgagttcacggaggacgcagcggagagggccctcctctccgagaggctcttccagaacctctttccccggctttccgagaagctcctctggctctaccaggaggtggagcggcccctctcccgggtcttggcccacatggaggcccggggggtgaggctggacgtcccccttctggaggccctctcctttgagctggagaaggagatggagcgcctggagggggaggtcttccgcttggccggccaccccttcaacctcaactcccgcgaccagctggaaagggtcctctttgacgagctgggccttaccccggtgggtcggacggagaagacgggcaagcgctccaccgcccagggggccctggaggccctccggggggcccaccccatcgtggagctcatcctccagtaccgggagctttccaagctcaaaagcacctacctggaccccctgccccggctcgtccacccgcggacgggccggcttcacacccgcttcaaccagacggccacggccacgggaaggctttccagctccgaccccaacctgcagaacatccccgtgcgcacccccttggggcagcgcatccgcaaggccttcgtggccgaggaggggtggctccttttggcggcggactactcccagatcgagcttcgggtcctggcccacctctcgggggacgagaacctgaagcgggtcttccgggaggggaaggacatccataccgaaaccgccgcctggatgttcggcttagaccccgctctagtggatccaaagatgcgccgggcggccaagacggtcaacttcggcgtcctctacgggatgtccgcccacaggctctcccaggagctcggcatagactacaaggaggcggaggcctttattgagcgctacttccagagcttccccaaggtgcgggcctggatagaaaggaccctggaggagggccggacgcggggctacgtggagaccctgttcggcaggaggcgctatgtgcccgactttgcctcccgggtccgctcggtgcgggaggcggcggagcggatggccttcaacatgcccgtgcagggcaccgccgccgacctgatgaagatcgccatggtcaagctcttccccaggctaaagcccctgggggcccacctcctcctccaggtgcacgacgagctggtcctggaggtgcccgaggaccgggccgaggaggccaaggccctggtcaaggaggtcatggagaacacctaccccttggacgtgcccctcgaggtggaggtgggcgtgggtcgggactggctggaggcgaagggggattgaagcggtcgac

SEQ ID NO: 2833 - DNA, 2605 bp, Artificial Sequence
  Description of Artificial Sequence: Synthetic DNA sequence of Thermus Rt41A DNA Polymerase L764S
atgaaatacctgctgccgaccgctgctgctggtctgctgctcctcgctgcccagccggcgatggccatggatatcggaattaattcggatccgaattccccactttttgacctggaggaaccccccaagcgggtgcttctggtggacggccaccacctggcctaccgcaccttctacgccctgagcctcaccacctcccggggggagccggtgcagatggtctacggcttcgcccggagcctcctcaaggccttgaaggaggacgggcaggcggtggtcgtggtctttgacgccaaggccccctccttccgccacgaggcctacgaggcctacaaggcgggccgggcccccaccccggaggacttcccccgccagctcgccttggtcaagcggctggtggaccttctgggcctggtccgcctcgaggccccgggttacgaggcggacgacgtcctgggcaccctggccaagaaggccgaaagggaggggatggaggtgcgcatcctcacgggagaccgggacttcttccagctcctctccgagaaggtctcggtcctcctgccggacgggaccctggtcaccccaaaggacgtccaggagaagtacggggtgccgccggagcgctgggtggacttccgcgccctcacgggggaccgctcggacaacatccccggggtggcggggataggggagaagaccgcccttcgactcctcgcggagtgggggagcgtggagaacctcctgaagaacctggaccgggtgaagccggactcggtccggcgcaagatagaggcgcaccttgaggacctccgcctctccttggacctggcccgcatccgcaccgacctccccttggaggtggactttaaggccctgcgccgcaggacccccgacctggagggcctgagggcctttttggaggagctggagttcggaagcctccttcatgagttcggcctcctgggaggggagaagccccgggaggaggccccctggcccccgcccgaaggggccttcgtaggcttcctcctctcccgcaaggagcccatgtgggcggagcttctggccctggcggccgccgcagagggccgggtccaccgggcaacaagcccggttgaggccctggccgacctcaaggaggcccgggggttcctggccaaggacctggccgttttggccctgcgggagggggtggccctggaccccacggacgaccccctcctggtggcctacctcctggacccggccaacaccaaccccgagggggtggcccggcgctacgggggcgagttcacggaggacgcagcggagagggccctcctctccgagaggctcttccagaacctctttccccggctttccgagaagctcctctggctctaccaggaggtggagcggcccctctcccgggtcttggcccacatggaggcccggggggtgaggctggacgtcccccttctggaggccctctcctttgagctggagaaggagatggagcgcctggagggggaggtcttccgcttggccggccaccccttcaacctcaactcccgcgaccagctggaaagggtcctctttgacgagctgggccttaccccggtgggtcggacggagaagacgggcaagcgctccaccgcccagggggccctggaggccctccggggggcccaccccatcgtggagctcatcctccagtaccgggagctttccaagctcaaaagcacctacctggaccccctgccccggctcgtccacccgcggacgggccggcttcacacccgcttcaaccagacggccacggccacgggaaggctttccagctccgaccccaacctgcagaacatccccgtgcgcacccccttggggcagcgcatccgcaaggccttcgtggccgaggaggggtggctccttttggcggcggactactcccagatcgagcttcgggtcctggcccacctctcgggggacgagaacctgaagcgggtcttccgggaggggaaggacatccataccgaaaccgccgcctggatgttcggcttagaccccgctctagtggatccaaagatgcgccgggcggccaagacggtcaacttcggcgtcctctacgggatgtccgcccacaggctctcccaggagctcggcatagactacaaggaggcggaggcctttattgagcgctacttccagagcttccccaaggtgcgggcctggatagaaaggaccctggaggagggccggacgcggggctacgtggagaccctgttcggcaggaggcgctatgtgcccgactctgcctcccgggtccgctcggtgcgggaggcggcggagcggatggccttcaacatgcccgtgcagggcaccgccgccgacctgatgaagatcgccatggtcaagctcttccccaggctaaagcccctgggggcccacctcctcctccaggtgcacgacgagctggtcctggaggtgcccgaggaccgggccgaggaggccaaggccctggtcaaggaggtcatggagaacacctaccccttggacgtgcccctcgaggtggaggtgggcgtgggtcgggactggctggaggcgaagggggattgaagcggtcgac

SEQ ID NO: 2834 - DNA, 2605 bp, Artificial Sequence
  Description of Artificial Sequence: Synthetic DNA sequence of Thermus Rt41A DNA Polymerase L764Y
atgaaatacctgctgccgaccgctgctgctggtctgctgctcctcgctgcccagccggcgatggccatggatatcggaattaattcggatccgaattccccactttttgacctggaggaaccccccaagcgggtgcttctggtggacggccaccacctggcctaccgcaccttctacgccctgagcctcaccacctcccggggggagccggtgcagatggtctacggcttcgcccggagcctcctcaaggccttgaaggaggacgggcaggcggtggtcgtggtctttgacgccaaggccccctccttccgccacgaggcctacgaggcctacaaggcgggccgggcccccaccccggaggacttcccccgccagctcgccttggtcaagcggctggtggaccttctgggcctggtccgcctcgaggccccgggttacgaggcggacgacgtcctgggcaccctggccaagaaggccgaaagggaggggatggaggtgcgcatcctcacgggagaccgggacttcttccagctcctctccgagaaggtctcggtcctcctgccggacgggaccctggtcaccccaaaggacgtccaggagaagtacggggtgccgccggagcgctgggtggacttccgcgccctcacgggggaccgctcggacaacatccccggggtggcggggataggggagaagaccgcccttcgactcctcgcggagtgggggagcgtggagaacctcctgaagaacctggaccgggtgaagccggactcggtccggcgcaagatagaggcgcaccttgaggacctccgcctctccttggacctggcccgcatccgcaccgacctccccttggaggtggactttaaggccctgcgccgcaggacccccgacctggagggcctgagggcctttttggaggagctggagttcggaagcctccttcatgagttcggcctcctgggaggggagaagccccgggaggaggccccctggcccccgcccgaaggggccttcgtaggcttcctcctctcccgcaaggagcccatgtgggcggagcttctggccctggcggccgccgcagagggccgggtccaccgggcaacaagcccggttgaggccctggccgacctcaaggaggcccgggggttcctggccaaggacctggccgttttggccctgcgggagggggtggccctggaccccacggacgaccccctcctggtggcctacctcctggacccggccaacaccaaccccgagggggtggcccggcgctacgggggcgagttcacggaggacgcagcggagagggccctcctctccgagaggctcttccagaacctctttccccggctttccgagaagctcctctggctctaccaggaggtggagcggcccctctcccgggtcttggcccacatggaggcccggggggtgaggctggacgtcccccttctggaggccctctcctttgagctggagaaggagatggagcgcctggagggggaggtcttccgcttggccggccaccccttcaacctcaactcccgcgaccagctggaaagggtcctctttgacgagctgggccttaccccggtgggtcggacggagaagacgggcaagcgctccaccgcccagggggccctggaggccctccggggggcccaccccatcgtggagctcatcctccagtaccgggagctttccaagctcaaaagcacctacctggaccccctgccccggctcgtccacccgcggacgggccggcttcacacccgcttcaaccagacggccacggccacgggaaggctttccagctccgaccccaacctgcagaacatccccgtgcgcacccccttggggcagcgcatccgcaaggccttcgtggccgaggaggggtggctccttttggcggcggactactcccagatcgagcttcgggtcctggcccacctctcgggggacgagaacctgaagcgggtcttccgggaggggaaggacatccataccgaaaccgccgcctggatgttcggcttagaccccgctctagtggatccaaagatgcgccgggcggccaagacggtcaacttcggcgtcctctacgggatgtccgcccacaggctctcccaggagctcggcatagactacaaggaggcggaggcctttattgagcgctacttccagagcttccccaaggtgcgggcctggatagaaaggaccctggaggagggccggacgcggggctacgtggagaccctgttcggcaggaggcgctatgtgcccgactatgcctcccgggtccgctcggtgcgggaggcggcggagcggatggccttcaacatgcccgtgcagggcaccgccgccgacctgatgaagatcgccatggtcaagctcttccccaggctaaagcccctgggggcccacctcctcctccaggtgcacgacgagctggtcctggaggtgcccgaggaccgggccgaggaggccaaggccctggtcaaggaggtcatggagaacacctaccccttggacgtgcccctcgaggtggaggtgggcgtgggtcgggactggctggaggcgaagggggattgaagcggtcgac

SEQ ID NO: 2835 - DNA, 2605 bp, Artificial Sequence
  Description of Artificial Sequence: Synthetic DNA sequence of Thermus Rt41A DNA Polymerase L764W
atgaaatacctgctgccgaccgctgctgctggtctgctgctcctcgctgcccagccggcgatggccatggatatcggaattaattcggatccgaattccccactttttgacctggaggaaccccccaagcgggtgcttctggtggacggccaccacctggcctaccgcaccttctacgccctgagcctcaccacctcccggggggagccggtgcagatggtctacggcttcgcccggagcctcctcaaggccttgaaggaggacgggcaggcggtggtcgtggtctttgacgccaaggccccctccttccgccacgaggcctacgaggcctacaaggcgggccgggcccccaccccggaggacttcccccgccagctcgccttggtcaagcggctggtggaccttctgggcctggtccgcctcgaggccccgggttacgaggcggacgacgtcctgggcaccctggccaagaaggccgaaagggaggggatggaggtgcgcatcctcacgggagaccgggacttcttccagctcctctccgagaaggtctcggtcctcctgccggacgggaccctggtcaccccaaaggacgtccaggagaagtacggggtgccgccggagcgctgggtggacttccgcgccctcacgggggaccgctcggacaacatccccggggtggcggggataggggagaagaccgcccttcgactcctcgcggagtgggggagcgtggagaacctcctgaagaacctggaccgggtgaagccggactcggtccggcgcaagatagaggcgcaccttgaggacctccgcctctccttggacctggcccgcatccgcaccgacctccccttggaggtggactttaaggccctgcgccgcaggacccccgacctggagggcctgagggcctttttggaggagctggagttcggaagcctccttcatgagttcggcctcctgggaggggagaagccccgggaggaggccccctggcccccgcccgaaggggccttcgtaggcttcctcctctcccgcaaggagcccatgtgggcggagcttctggccctggcggccgccgcagagggccgggtccaccgggcaacaagcccggttgaggccctggccgacctcaaggaggcccgggggttcctggccaaggacctggccgttttggccctgcgggagggggtggccctggaccccacggacgaccccctcctggtggcctacctcctggacccggccaacaccaaccccgagggggtggcccggcgctacgggggcgagttcacggaggacgcagcggagagggccctcctctccgagaggctcttccagaacctctttccccggctttccgagaagctcctctggctctaccaggaggtggagcggcccctctcccgggtcttggcccacatggaggcccggggggtgaggctggacgtcccccttctggaggccctctcctttgagctggagaaggagatggagcgcctggagggggaggtcttccgcttggccggccaccccttcaacctcaactcccgcgaccagctggaaagggtcctctttgacgagctgggccttaccccggtgggtcggacggagaagacgggcaagcgctccaccgcccagggggccctggaggccctccggggggcccaccccatcgtggagctcatcctccagtaccgggagctttccaagctcaaaagcacctacctggaccccctgccccggctcgtccacccgcggacgggccggcttcacacccgcttcaaccagacggccacggccacgggaaggctttccagctccgaccccaacctgcagaacatccccgtgcgcacccccttggggcagcgcatccgcaaggccttcgtggccgaggaggggtggctccttttggcggcggactactcccagatcgagcttcgggtcctggcccacctctcgggggacgagaacctgaagcgggtcttccgggaggggaaggacatccataccgaaaccgccgcctggatgttcggcttagaccccgctctagtggatccaaagatgcgccgggcggccaagacggtcaacttcggcgtcctctacgggatgtccgcccacaggctctcccaggagctcggcatagactacaaggaggcggaggcctttattgagcgctacttccagagcttccccaaggtgcgggcctggatagaaaggaccctggaggagggccggacgcggggctacgtggagaccctgttcggcaggaggcgctatgtgcccgactgggcctcccgggtccgctcggtgcgggaggcggcggagcggatggccttcaacatgcccgtgcagggcaccgccgccgacctgatgaagatcgccatggtcaagctcttccccaggctaaagcccctgggggcccacctcctcctccaggtgcacgacgagctggtcctggaggtgcccgaggaccgggccgaggaggccaaggccctggtcaaggaggtcatggagaacacctaccccttggacgtgcccctcgaggtggaggtgggcgtgggtcgggactggctggaggcgaagggggattgaagcggtcgac

SEQ ID NO: 2836 - DNA, 2605 bp, Artificial Sequence
  Description of Artificial Sequence: Synthetic DNA sequence of Thermus Rt41A DNA Polymerase L764P
atgaaatacctgctgccgaccgctgctgctggtctgctgctcctcgctgcccagccggcgatggccatggatatcggaattaattcggatccgaattccccactttttgacctggaggaaccccccaagcgggtgcttctggtggacggccaccacctggcctaccgcaccttctacgccctgagcctcaccacctcccggggggagccggtgcagatggtctacggcttcgcccggagcctcctcaaggccttgaaggaggacgggcaggcggtggtcgtggtctttgacgccaaggccccctccttccgccacgaggcctacgaggcctacaaggcgggccgggcccccaccccggaggacttcccccgccagctcgccttggtcaagcggctggtggaccttctgggcctggtccgcctcgaggccccgggttacgaggcggacgacgtcctgggcaccctggccaagaaggccgaaagggaggggatggaggtgcgcatcctcacgggagaccgggacttcttccagctcctctccgagaaggtctcggtcctcctgccggacgggaccctggtcaccccaaaggacgtccaggagaagtacggggtgccgccggagcgctgggtggacttccgcgccctcacgggggaccgctcggacaacatccccggggtggcggggataggggagaagaccgcccttcgactcctcgcggagtgggggagcgtggagaacctcctgaagaacctggaccgggtgaagccggactcggtccggcgcaagatagaggcgcaccttgaggacctccgcctctccttggacctggcccgcatccgcaccgacctccccttggaggtggactttaaggccctgcgccgcaggacccccgacctggagggcctgagggcctttttggaggagctggagttcggaagcctccttcatgagttcggcctcctgggaggggagaagccccgggaggaggccccctggcccccgcccgaaggggccttcgtaggcttcctcctctcccgcaaggagcccatgtgggcggagcttctggccctggcggccgccgcagagggccgggtccaccgggcaacaagcccggttgaggccctggccgacctcaaggaggcccgggggttcctggccaaggacctggccgttttggccctgcgggagggggtggccctggaccccacggacgaccccctcctggtggcctacctcctggacccggccaacaccaaccccgagggggtggcccggcgctacgggggcgagttcacggaggacgcagcggagagggccctcctctccgagaggctcttccagaacctctttccccggctttccgagaagctcctctggctctaccaggaggtggagcggcccctctcccgggtcttggcccacatggaggcccggggggtgaggctggacgtcccccttctggaggccctctcctttgagctggagaaggagatggagcgcctggagggggaggtcttccgcttggccggccaccccttcaacctcaactcccgcgaccagctggaaagggtcctctttgacgagctgggccttaccccggtgggtcggacggagaagacgggcaagcgctccaccgcccagggggccctggaggccctccggggggcccaccccatcgtggagctcatcctccagtaccgggagctttccaagctcaaaagcacctacctggaccccctgccccggctcgtccacccgcggacgggccggcttcacacccgcttcaaccagacggccacggccacgggaaggctttccagctccgaccccaacctgcagaacatccccgtgcgcacccccttggggcagcgcatccgcaaggccttcgtggccgaggaggggtggctccttttggcggcggactactcccagatcgagcttcgggtcctggcccacctctcgggggacgagaacctgaagcgggtcttccgggaggggaaggacatccataccgaaaccgccgcctggatgttcggcttagaccccgctctagtggatccaaagatgcgccgggcggccaagacggtcaacttcggcgtcctctacgggatgtccgcccacaggctctcccaggagctcggcatagactacaaggaggcggaggcctttattgagcgctacttccagagcttccccaaggtgcgggcctggatagaaaggaccctggaggagggccggacgcggggctacgtggagaccctgttcggcaggaggcgctatgtgcccgaccctgcctcccgggtccgctcggtgcgggaggcggcggagcggatggccttcaacatgcccgtgcagggcaccgccgccgacctgatgaagatcgccatggtcaagctcttccccaggctaaagcccctgggggcccacctcctcctccaggtgcacgacgagctggtcctggaggtgcccgaggaccgggccgaggaggccaaggccctggtcaaggaggtcatggagaacacctaccccttggacgtgcccctcgaggtggaggtgggcgtgggtcgggactggctggaggcgaagggggattgaagcggtcgac

SEQ ID NO: 2837 - DNA, 2605 bp, Artificial Sequence
  Description of Artificial Sequence: Synthetic DNA sequence of Thermus Rt41A DNA Polymerase L764M
atgaaatacctgctgccgaccgctgctgctggtctgctgctcctcgctgcccagccggcgatggccatggatatcggaattaattcggatccgaattccccactttttgacctggaggaaccccccaagcgggtgcttctggtggacggccaccacctggcctaccgcaccttctacgccctgagcctcaccacctcccggggggagccggtgcagatggtctacggcttcgcccggagcctcctcaaggccttgaaggaggacgggcaggcggtggtcgtggtctttgacgccaaggccccctccttccgccacgaggcctacgaggcctacaaggcgggccgggcccccaccccggaggacttcccccgccagctcgccttggtcaagcggctggtggaccttctgggcctggtccgcctcgaggccccgggttacgaggcggacgacgtcctgggcaccctggccaagaaggccgaaagggaggggatggaggtgcgcatcctcacgggagaccgggacttcttccagctcctctccgagaaggtctcggtcctcctgccggacgggaccctggtcaccccaaaggacgtccaggagaagtacggggtgccgccggagcgctgggtggacttccgcgccctcacgggggaccgctcggacaacatccccggggtggcggggataggggagaagaccgcccttcgactcctcgcggagtgggggagcgtggagaacctcctgaagaacctggaccgggtgaagccggactcggtccggcgcaagatagaggcgcaccttgaggacctccgcctctccttggacctggcccgcatccgcaccgacctccccttggaggtggactttaaggccctgcgccgcaggacccccgacctggagggcctgagggcctttttggaggagctggagttcggaagcctccttcatgagttcggcctcctgggaggggagaagccccgggaggaggccccctggcccccgcccgaaggggccttcgtaggcttcctcctctcccgcaaggagcccatgtgggcggagcttctggccctggcggccgccgcagagggccgggtccaccgggcaacaagcccggttgaggccctggccgacctcaaggaggcccgggggttcctggccaaggacctggccgttttggccctgcgggagggggtggccctggaccccacggacgaccccctcctggtggcctacctcctggacccggccaacaccaaccccgagggggtggcccggcgctacgggggcgagttcacggaggacgcagcggagagggccctcctctccgagaggctcttccagaacctctttccccggctttccgagaagctcctctggctctaccaggaggtggagcggcccctctcccgggtcttggcccacatggaggcccggggggtgaggctggacgtcccccttctggaggccctctcctttgagctggagaaggagatggagcgcctggagggggaggtcttccgcttggccggccaccccttcaacctcaactcccgcgaccagctggaaagggtcctctttgacgagctgggccttaccccggtgggtcggacggagaagacgggcaagcgctccaccgcccagggggccctggaggccctccggggggcccaccccatcgtggagctcatcctccagtaccgggagctttccaagctcaaaagcacctacctggaccccctgccccggctcgtccacccgcggacgggccggcttcacacccgcttcaaccagacggccacggccacgggaaggctttccagctccgaccccaacctgcagaacatccccgtgcgcacccccttggggcagcgcatccgcaaggccttcgtggccgaggaggggtggctccttttggcggcggactactcccagatcgagcttcgggtcctggcccacctctcgggggacgagaacctgaagcgggtcttccgggaggggaaggacatccataccgaaaccgccgcctggatgttcggcttagaccccgctctagtggatccaaagatgcgccgggcggccaagacggtcaacttcggcgtcctctacgggatgtccgcccacaggctctcccaggagctcggcatagactacaaggaggcggaggcctttattgagcgctacttccagagcttccccaaggtgcgggcctggatagaaaggaccctggaggagggccggacgcggggctacgtggagaccctgttcggcaggaggcgctatgtgcccgacatggcctcccgggtccgctcggtgcgggaggcggcggagcggatggccttcaacatgcccgtgcagggcaccgccgccgacctgatgaagatcgccatggtcaagctcttccccaggctaaagcccctgggggcccacctcctcctccaggtgcacgacgagctggtcctggaggtgcccgaggaccgggccgaggaggccaaggccctggtcaaggaggtcatggagaacacctaccccttggacgtgcccctcgaggtggaggtgggcgtgggtcgggactggctggaggcgaagggggattgaagcggtcgac

SEQ ID NO: 2838 - DNA, 2605 bp, Artificial Sequence
  Description of Artificial Sequence: Synthetic DNA sequence of Thermus Rt41A DNA Polymerase L764T
atgaaatacctgctgccgaccgctgctgctggtctgctgctcctcgctgcccagccggcgatggccatggatatcggaattaattcggatccgaattccccactttttgacctggaggaaccccccaagcgggtgcttctggtggacggccaccacctggcctaccgcaccttctacgccctgagcctcaccacctcccggggggagccggtgcagatggtctacggcttcgcccggagcctcctcaaggccttgaaggaggacgggcaggcggtggtcgtggtctttgacgccaaggccccctccttccgccacgaggcctacgaggcctacaaggcgggccgggcccccaccccggaggacttcccccgccagctcgccttggtcaagcggctggtggaccttctgggcctggtccgcctcgaggccccgggttacgaggcggacgacgtcctgggcaccctggccaagaaggccgaaagggaggggatggaggtgcgcatcctcacgggagaccgggacttcttccagctcctctccgagaaggtctcggtcctcctgccggacgggaccctggtcaccccaaaggacgtccaggagaagtacggggtgccgccggagcgctgggtggacttccgcgccctcacgggggaccgctcggacaacatccccggggtggcggggataggggagaagaccgcccttcgactcctcgcggagtgggggagcgtggagaacctcctgaagaacctggaccgggtgaagccggactcggtccggcgcaagatagaggcgcaccttgaggacctccgcctctccttggacctggcccgcatccgcaccgacctccccttggaggtggactttaaggccctgcgccgcaggacccccgacctggagggcctgagggcctttttggaggagctggagttcggaagcctccttcatgagttcggcctcctgggaggggagaagccccgggaggaggccccctggcccccgcccgaaggggccttcgtaggcttcctcctctcccgcaaggagcccatgtgggcggagcttctggccctggcggccgccgcagagggccgggtccaccgggcaacaagcccggttgaggccctggccgacctcaaggaggcccgggggttcctggccaaggacctggccgttttggccctgcgggagggggtggccctggaccccacggacgaccccctcctggtggcctacctcctggacccggccaacaccaaccccgagggggtggcccggcgctacgggggcgagttcacggaggacgcagcggagagggccctcctctccgagaggctcttccagaacctctttccccggctttccgagaagctcctctggctctaccaggaggtggagcggcccctctcccgggtcttggcccacatggaggcccggggggtgaggctggacgtcccccttctggaggccctctcctttgagctggagaaggagatggagcgcctggagggggaggtcttccgcttggccggccaccccttcaacctcaactcccgcgaccagctggaaagggtcctctttgacgagctgggccttaccccggtgggtcggacggagaagacgggcaagcgctccaccgcccagggggccctggaggccctccggggggcccaccccatcgtggagctcatcctccagtaccgggagctttccaagctcaaaagcacctacctggaccccctgccccggctcgtccacccgcggacgggccggcttcacacccgcttcaaccagacggccacggccacgggaaggctttccagctccgaccccaacctgcagaacatccccgtgcgcacccccttggggcagcgcatccgcaaggccttcgtggccgaggaggggtggctccttttggcggcggactactcccagatcgagcttcgggtcctggcccacctctcgggggacgagaacctgaagcgggtcttccgggaggggaaggacatccataccgaaaccgccgcctggatgttcggcttagaccccgctctagtggatccaaagatgcgccgggcggccaagacggtcaacttcggcgtcctctacgggatgtccgcccacaggctctcccaggagctcggcatagactacaaggaggcggaggcctttattgagcgctacttccagagcttccccaaggtgcgggcctggatagaaaggaccctggaggagggccggacgcggggctacgtggagaccctgttcggcaggaggcgctatgtgcccgacactgcctcccgggtccgctcggtgcgggaggcggcggagcggatggccttcaacatgcccgtgcagggcaccgccgccgacctgatgaagatcgccatggtcaagctcttccccaggctaaagcccctgggggcccacctcctcctccaggtgcacgacgagctggtcctggaggtgcccgaggaccgggccgaggaggccaaggccctggtcaaggaggtcatggagaacacctaccccttggacgtgcccctcgaggtggaggtgggcgtgggtcgggactggctggaggcgaagggggattgaagcggtcgac

SEQ ID NO: 2839 - DNA, 2605 bp, Artificial Sequence
  Description of Artificial Sequence: Synthetic DNA sequence of Thermus Rt41A DNA Polymerase L764N
atgaaatacctgctgccgaccgctgctgctggtctgctgctcctcgctgcccagccggcgatggccatggatatcggaattaattcggatccgaattccccactttttgacctggaggaaccccccaagcgggtgcttctggtggacggccaccacctggcctaccgcaccttctacgccctgagcctcaccacctcccggggggagccggtgcagatggtctacggcttcgcccggagcctcctcaaggccttgaaggaggacgggcaggcggtggtcgtggtctttgacgccaaggccccctccttccgccacgaggcctacgaggcctacaaggcgggccgggcccccaccccggaggacttcccccgccagctcgccttggtcaagcggctggtggaccttctgggcctggtccgcctcgaggccccgggttacgaggcggacgacgtcctgggcaccctggccaagaaggccgaaagggaggggatggaggtgcgcatcctcacgggagaccgggacttcttccagctcctctccgagaaggtctcggtcctcctgccggacgggaccctggtcaccccaaaggacgtccaggagaagtacggggtgccgccggagcgctgggtggacttccgcgccctcacgggggaccgctcggacaacatccccggggtggcggggataggggagaagaccgcccttcgactcctcgcggagtgggggagcgtggagaacctcctgaagaacctggaccgggtgaagccggactcggtccggcgcaagatagaggcgcaccttgaggacctccgcctctccttggacctggcccgcatccgcaccgacctccccttggaggtggactttaaggccctgcgccgcaggacccccgacctggagggcctgagggcctttttggaggagctggagttcggaagcctccttcatgagttcggcctcctgggaggggagaagccccgggaggaggccccctggcccccgcccgaaggggccttcgtaggcttcctcctctcccgcaaggagcccatgtgggcggagcttctggccctggcggccgccgcagagggccgggtccaccgggcaacaagcccggttgaggccctggccgacctcaaggaggcccgggggttcctggccaaggacctggccgttttggccctgcgggagggggtggccctggaccccacggacgaccccctcctggtggcctacctcctggacccggccaacaccaaccccgagggggtggcccggcgctacgggggcgagttcacggaggacgcagcggagagggccctcctctccgagaggctcttccagaacctctttccccggctttccgagaagctcctctggctctaccaggaggtggagcggcccctctcccgggtcttggcccacatggaggcccggggggtgaggctggacgtcccccttctggaggccctctcctttgagctggagaaggagatggagcgcctggagggggaggtcttccgcttggccggccaccccttcaacctcaactcccgcgaccagctggaaagggtcctctttgacgagctgggccttaccccggtgggtcggacggagaagacgggcaagcgctccaccgcccagggggccctggaggccctccggggggcccaccccatcgtggagctcatcctccagtaccgggagctttccaagctcaaaagcacctacctggaccccctgccccggctcgtccacccgcggacgggccggcttcacacccgcttcaaccagacggccacggccacgggaaggctttccagctccgaccccaacctgcagaacatccccgtgcgcacccccttggggcagcgcatccgcaaggccttcgtggccgaggaggggtggctccttttggcggcggactactcccagatcgagcttcgggtcctggcccacctctcgggggacgagaacctgaagcgggtcttccgggaggggaaggacatccataccgaaaccgccgcctggatgttcggcttagaccccgctctagtggatccaaagatgcgccgggcggccaagacggtcaacttcggcgtcctctacgggatgtccgcccacaggctctcccaggagctcggcatagactacaaggaggcggaggcctttattgagcgctacttccagagcttccccaaggtgcgggcctggatagaaaggaccctggaggagggccggacgcggggctacgtggagaccctgttcggcaggaggcgctatgtgcccgacaatgcctcccgggtccgctcggtgcgggaggcggcggagcggatggccttcaacatgcccgtgcagggcaccgccgccgacctgatgaagatcgccatggtcaagctcttccccaggctaaagcccctgggggcccacctcctcctccaggtgcacgacgagctggtcctggaggtgcccgaggaccgggccgaggaggccaaggccctggtcaaggaggtcatggagaacacctaccccttggacgtgcccctcgaggtggaggtgggcgtgggtcgggactggctggaggcgaagggggattgaagcggtcgac

SEQ ID NO: 2840 - DNA, 2605 bp, Artificial Sequence
  Description of Artificial Sequence: Synthetic DNA sequence of Thermus Rt41A DNA Polymerase L764V
atgaaatacctgctgccgaccgctgctgctggtctgctgctcctcgctgcccagccggcgatggccatggatatcggaattaattcggatccgaattccccactttttgacctggaggaaccccccaagcgggtgcttctggtggacggccaccacctggcctaccgcaccttctacgccctgagcctcaccacctcccggggggagccggtgcagatggtctacggcttcgcccggagcctcctcaaggccttgaaggaggacgggcaggcggtggtcgtggtctttgacgccaaggccccctccttccgccacgaggcctacgaggcctacaaggcgggccgggcccccaccccggaggacttcccccgccagctcgccttggtcaagcggctggtggaccttctgggcctggtccgcctcgaggccccgggttacgaggcggacgacgtcctgggcaccctggccaagaaggccgaaagggaggggatggaggtgcgcatcctcacgggagaccgggacttcttccagctcctctccgagaaggtctcggtcctcctgccggacgggaccctggtcaccccaaaggacgtccaggagaagtacggggtgccgccggagcgctgggtggacttccgcgccctcacgggggaccgctcggacaacatccccggggtggcggggataggggagaagaccgcccttcgactcctcgcggagtgggggagcgtggagaacctcctgaagaacctggaccgggtgaagccggactcggtccggcgcaagatagaggcgcaccttgaggacctccgcctctccttggacctggcccgcatccgcaccgacctccccttggaggtggactttaaggccctgcgccgcaggacccccgacctggagggcctgagggcctttttggaggagctggagttcggaagcctccttcatgagttcggcctcctgggaggggagaagccccgggaggaggccccctggcccccgcccgaaggggccttcgtaggcttcctcctctcccgcaaggagcccatgtgggcggagcttctggccctggcggccgccgcagagggccgggtccaccgggcaacaagcccggttgaggccctggccgacctcaaggaggcccgggggttcctggccaaggacctggccgttttggccctgcgggagggggtggccctggaccccacggacgaccccctcctggtggcctacctcctggacccggccaacaccaaccccgagggggtggcccggcgctacgggggcgagttcacggaggacgcagcggagagggccctcctctccgagaggctcttccagaacctctttccccggctttccgagaagctcctctggctctaccaggaggtggagcggcccctctcccgggtcttggcccacatggaggcccggggggtgaggctggacgtcccccttctggaggccctctcctttgagctggagaaggagatggagcgcctggagggggaggtcttccgcttggccggccaccccttcaacctcaactcccgcgaccagctggaaagggtcctctttgacgagctgggccttaccccggtgggtcggacggagaagacgggcaagcgctccaccgcccagggggccctggaggccctccggggggcccaccccatcgtggagctcatcctccagtaccgggagctttccaagctcaaaagcacctacctggaccccctgccccggctcgtccacccgcggacgggccggcttcacacccgcttcaaccagacggccacggccacgggaaggctttccagctccgaccccaacctgcagaacatccccgtgcgcacccccttggggcagcgcatccgcaaggccttcgtggccgaggaggggtggctccttttggcggcggactactcccagatcgagcttcgggtcctggcccacctctcgggggacgagaacctgaagcgggtcttccgggaggggaaggacatccataccgaaaccgccgcctggatgttcggcttagaccccgctctagtggatccaaagatgcgccgggcggccaagacggtcaacttcggcgtcctctacgggatgtccgcccacaggctctcccaggagctcggcatagactacaaggaggcggaggcctttattgagcgctacttccagagcttccccaaggtgcgggcctggatagaaaggaccctggaggagggccggacgcggggctacgtggagaccctgttcggcaggaggcgctatgtgcccgacgtcgcctcccgggtccgctcggtgcgggaggcggcggagcggatggccttcaacatgcccgtgcagggcaccgccgccgacctgatgaagatcgccatggtcaagctcttccccaggctaaagcccctgggggcccacctcctcctccaggtgcacgacgagctggtcctggaggtgcccgaggaccgggccgaggaggccaaggccctggtcaaggaggtcatggagaacacctaccccttggacgtgcccctcgaggtggaggtgggcgtgggtcgggactggctggaggcgaagggggattgaagcggtcgac

SEQ ID NO: 2841 - DNA, 2605 bp, Artificial Sequence
  Description of Artificial Sequence: Synthetic DNA sequence of Thermus Rt41A DNA Polymerase A765R
atgaaatacctgctgccgaccgctgctgctggtctgctgctcctcgctgcccagccggcgatggccatggatatcggaattaattcggatccgaattccccactttttgacctggaggaaccccccaagcgggtgcttctggtggacggccaccacctggcctaccgcaccttctacgccctgagcctcaccacctcccggggggagccggtgcagatggtctacggcttcgcccggagcctcctcaaggccttgaaggaggacgggcaggcggtggtcgtggtctttgacgccaaggccccctccttccgccacgaggcctacgaggcctacaaggcgggccgggcccccaccccggaggacttcccccgccagctcgccttggtcaagcggctggtggaccttctgggcctggtccgcctcgaggccccgggttacgaggcggacgacgtcctgggcaccctggccaagaaggccgaaagggaggggatggaggtgcgcatcctcacgggagaccgggacttcttccagctcctctccgagaaggtctcggtcctcctgccggacgggaccctggtcaccccaaaggacgtccaggagaagtacggggtgccgccggagcgctgggtggacttccgcgccctcacgggggaccgctcggacaacatccccggggtggcggggataggggagaagaccgcccttcgactcctcgcggagtgggggagcgtggagaacctcctgaagaacctggaccgggtgaagccggactcggtccggcgcaagatagaggcgcaccttgaggacctccgcctctccttggacctggcccgcatccgcaccgacctccccttggaggtggactttaaggccctgcgccgcaggacccccgacctggagggcctgagggcctttttggaggagctggagttcggaagcctccttcatgagttcggcctcctgggaggggagaagccccgggaggaggccccctggcccccgcccgaaggggccttcgtaggcttcctcctctcccgcaaggagcccatgtgggcggagcttctggccctggcggccgccgcagagggccgggtccaccgggcaacaagcccggttgaggccctggccgacctcaaggaggcccgggggttcctggccaaggacctggccgttttggccctgcgggagggggtggccctggaccccacggacgaccccctcctggtggcctacctcctggacccggccaacaccaaccccgagggggtggcccggcgctacgggggcgagttcacggaggacgcagcggagagggccctcctctccgagaggctcttccagaacctctttccccggctttccgagaagctcctctggctctaccaggaggtggagcggcccctctcccgggtcttggcccacatggaggcccggggggtgaggctggacgtcccccttctggaggccctctcctttgagctggagaaggagatggagcgcctggagggggaggtcttccgcttggccggccaccccttcaacctcaactcccgcgaccagctggaaagggtcctctttgacgagctgggccttaccccggtgggtcggacggagaagacgggcaagcgctccaccgcccagggggccctggaggccctccggggggcccaccccatcgtggagctcatcctccagtaccgggagctttccaagctcaaaagcacctacctggaccccctgccccggctcgtccacccgcggacgggccggcttcacacccgcttcaaccagacggccacggccacgggaaggctttccagctccgaccccaacctgcagaacatccccgtgcgcacccccttggggcagcgcatccgcaaggccttcgtggccgaggaggggtggctccttttggcggcggactactcccagatcgagcttcgggtcctggcccacctctcgggggacgagaacctgaagcgggtcttccgggaggggaaggacatccataccgaaaccgccgcctggatgttcggcttagaccccgctctagtggatccaaagatgcgccgggcggccaagacggtcaacttcggcgtcctctacgggatgtccgcccacaggctctcccaggagctcggcatagactacaaggaggcggaggcctttattgagcgctacttccagagcttccccaaggtgcgggcctggatagaaaggaccctggaggagggccggacgcggggctacgtggagaccctgttcggcaggaggcgctatgtgcccgacctgcgatcccgggtccgctcggtgcgggaggcggcggagcggatggccttcaacatgcccgtgcagggcaccgccgccgacctgatgaagatcgccatggtcaagctcttccccaggctaaagcccctgggggcccacctcctcctccaggtgcacgacgagctggtcctggaggtgcccgaggaccgggccgaggaggccaaggccctggtcaaggaggtcatggagaacacctaccccttggacgtgcccctcgaggtggaggtgggcgtgggtcgggactggctggaggcgaagggggattgaagcggtcgac

SEQ ID NO: 2842 - DNA, 2605 bp, Artificial Sequence
  Description of Artificial Sequence: Synthetic DNA sequence of Thermus Rt41A DNA Polymerase A765C
atgaaatacctgctgccgaccgctgctgctggtctgctgctcctcgctgcccagccggcgatggccatggatatcggaattaattcggatccgaattccccactttttgacctggaggaaccccccaagcgggtgcttctggtggacggccaccacctggcctaccgcaccttctacgccctgagcctcaccacctcccggggggagccggtgcagatggtctacggcttcgcccggagcctcctcaaggccttgaaggaggacgggcaggcggtggtcgtggtctttgacgccaaggccccctccttccgccacgaggcctacgaggcctacaaggcgggccgggcccccaccccggaggacttcccccgccagctcgccttggtcaagcggctggtggaccttctgggcctggtccgcctcgaggccccgggttacgaggcggacgacgtcctgggcaccctggccaagaaggccgaaagggaggggatggaggtgcgcatcctcacgggagaccgggacttcttccagctcctctccgagaaggtctcggtcctcctgccggacgggaccctggtcaccccaaaggacgtccaggagaagtacggggtgccgccggagcgctgggtggacttccgcgccctcacgggggaccgctcggacaacatccccggggtggcggggataggggagaagaccgcccttcgactcctcgcggagtgggggagcgtggagaacctcctgaagaacctggaccgggtgaagccggactcggtccggcgcaagatagaggcgcaccttgaggacctccgcctctccttggacctggcccgcatccgcaccgacctccccttggaggtggactttaaggccctgcgccgcaggacccccgacctggagggcctgagggcctttttggaggagctggagttcggaagcctccttcatgagttcggcctcctgggaggggagaagccccgggaggaggccccctggcccccgcccgaaggggccttcgtaggcttcctcctctcccgcaaggagcccatgtgggcggagcttctggccctggcggccgccgcagagggccgggtccaccgggcaacaagcccggttgaggccctggccgacctcaaggaggcccgggggttcctggccaaggacctggccgttttggccctgcgggagggggtggccctggaccccacggacgaccccctcctggtggcctacctcctggacccggccaacaccaaccccgagggggtggcccggcgctacgggggcgagttcacggaggacgcagcggagagggccctcctctccgagaggctcttccagaacctctttccccggctttccgagaagctcctctggctctaccaggaggtggagcggcccctctcccgggtcttggcccacatggaggcccggggggtgaggctggacgtcccccttctggaggccctctcctttgagctggagaaggagatggagcgcctggagggggaggtcttccgcttggccggccaccccttcaacctcaactcccgcgaccagctggaaagggtcctctttgacgagctgggccttaccccggtgggtcggacggagaagacgggcaagcgctccaccgcccagggggccctggaggccctccggggggcccaccccatcgtggagctcatcctccagtaccgggagctttccaagctcaaaagcacctacctggaccccctgccccggctcgtccacccgcggacgggccggcttcacacccgcttcaaccagacggccacggccacgggaaggctttccagctccgaccccaacctgcagaacatccccgtgcgcacccccttggggcagcgcatccgcaaggccttcgtggccgaggaggggtggctccttttggcggcggactactcccagatcgagcttcgggtcctggcccacctctcgggggacgagaacctgaagcgggtcttccgggaggggaaggacatccataccgaaaccgccgcctggatgttcggcttagaccccgctctagtggatccaaagatgcgccgggcggccaagacggtcaacttcggcgtcctctacgggatgtccgcccacaggctctcccaggagctcggcatagactacaaggaggcggaggcctttattgagcgctacttccagagcttccccaaggtgcgggcctggatagaaaggaccctggaggagggccggacgcggggctacgtggagaccctgttcggcaggaggcgctatgtgcccgacctgtgttcccgggtccgctcggtgcgggaggcggcggagcggatggccttcaacatgcccgtgcagggcaccgccgccgacctgatgaagatcgccatggtcaagctcttccccaggctaaagcccctgggggcccacctcctcctccaggtgcacgacgagctggtcctggaggtgcccgaggaccgggccgaggaggccaaggccctggtcaaggaggtcatggagaacacctaccccttggacgtgcccctcgaggtggaggtgggcgtgggtcgggactggctggaggcgaagggggattgaagcggtcgac

SEQ ID NO: 2843 - DNA, 2605 bp, Artificial Sequence
  Description of Artificial Sequence: Synthetic DNA sequence of Thermus Rt41A DNA Polymerase A765G
atgaaatacctgctgccgaccgctgctgctggtctgctgctcctcgctgcccagccggcgatggccatggatatcggaattaattcggatccgaattccccactttttgacctggaggaaccccccaagcgggtgcttctggtggacggccaccacctggcctaccgcaccttctacgccctgagcctcaccacctcccggggggagccggtgcagatggtctacggcttcgcccggagcctcctcaaggccttgaaggaggacgggcaggcggtggtcgtggtctttgacgccaaggccccctccttccgccacgaggcctacgaggcctacaaggcgggccgggcccccaccccggaggacttcccccgccagctcgccttggtcaagcggctggtggaccttctgggcctggtccgcctcgaggccccgggttacgaggcggacgacgtcctgggcaccctggccaagaaggccgaaagggaggggatggaggtgcgcatcctcacgggagaccgggacttcttccagctcctctccgagaaggtctcggtcctcctgccggacgggaccctggtcaccccaaaggacgtccaggagaagtacggggtgccgccggagcgctgggtggacttccgcgccctcacgggggaccgctcggacaacatccccggggtggcggggataggggagaagaccgcccttcgactcctcgcggagtgggggagcgtggagaacctcctgaagaacctggaccgggtgaagccggactcggtccggcgcaagatagaggcgcaccttgaggacctccgcctctccttggacctggcccgcatccgcaccgacctccccttggaggtggactttaaggccctgcgccgcaggacccccgacctggagggcctgagggcctttttggaggagctggagttcggaagcctccttcatgagttcggcctcctgggaggggagaagccccgggaggaggccccctggcccccgcccgaaggggccttcgtaggcttcctcctctcccgcaaggagcccatgtgggcggagcttctggccctggcggccgccgcagagggccgggtccaccgggcaacaagcccggttgaggccctggccgacctcaaggaggcccgggggttcctggccaaggacctggccgttttggccctgcgggagggggtggccctggaccccacggacgaccccctcctggtggcctacctcctggacccggccaacaccaaccccgagggggtggcccggcgctacgggggcgagttcacggaggacgcagcggagagggccctcctctccgagaggctcttccagaacctctttccccggctttccgagaagctcctctggctctaccaggaggtggagcggcccctctcccgggtcttggcccacatggaggcccggggggtgaggctggacgtcccccttctggaggccctctcctttgagctggagaaggagatggagcgcctggagggggaggtcttccgcttggccggccaccccttcaacctcaactcccgcgaccagctggaaagggtcctctttgacgagctgggccttaccccggtgggtcggacggagaagacgggcaagcgctccaccgcccagggggccctggaggccctccggggggcccaccccatcgtggagctcatcctccagtaccgggagctttccaagctcaaaagcacctacctggaccccctgccccggctcgtccacccgcggacgggccggcttcacacccgcttcaaccagacggccacggccacgggaaggctttccagctccgaccccaacctgcagaacatccccgtgcgcacccccttggggcagcgcatccgcaaggccttcgtggccgaggaggggtggctccttttggcggcggactactcccagatcgagcttcgggtcctggcccacctctcgggggacgagaacctgaagcgggtcttccgggaggggaaggacatccataccgaaaccgccgcctggatgttcggcttagaccccgctctagtggatccaaagatgcgccgggcggccaagacggtcaacttcggcgtcctctacgggatgtccgcccacaggctctcccaggagctcggcatagactacaaggaggcggaggcctttattgagcgctacttccagagcttccccaaggtgcgggcctggatagaaaggaccctggaggagggccggacgcggggctacgtggagaccctgttcggcaggaggcgctatgtgcccgacctgggttcccgggtccgctcggtgcgggaggcggcggagcggatggccttcaacatgcccgtgcagggcaccgccgccgacctgatgaagatcgccatggtcaagctcttccccaggctaaagcccctgggggcccacctcctcctccaggtgcacgacgagctggtcctggaggtgcccgaggaccgggccgaggaggccaaggccctggtcaaggaggtcatggagaacacctaccccttggacgtgcccctcgaggtggaggtgggcgtgggtcgggactggctggaggcgaagggggattgaagcggtcgac

SEQ ID NO: 2844 - DNA, 2605 bp, Artificial Sequence
  Description of Artificial Sequence: Synthetic DNA sequence of Thermus Rt41A DNA Polymerase A765Q
atgaaatacctgctgccgaccgctgctgctggtctgctgctcctcgctgcccagccggcgatggccatggatatcggaattaattcggatccgaattccccactttttgacctggaggaaccccccaagcgggtgcttctggtggacggccaccacctggcctaccgcaccttctacgccctgagcctcaccacctcccggggggagccggtgcagatggtctacggcttcgcccggagcctcctcaaggccttgaaggaggacgggcaggcggtggtcgtggtctttgacgccaaggccccctccttccgccacgaggcctacgaggcctacaaggcgggccgggcccccaccccggaggacttcccccgccagctcgccttggtcaagcggctggtggaccttctgggcctggtccgcctcgaggccccgggttacgaggcggacgacgtcctgggcaccctggccaagaaggccgaaagggaggggatggaggtgcgcatcctcacgggagaccgggacttcttccagctcctctccgagaaggtctcggtcctcctgccggacgggaccctggtcaccccaaaggacgtccaggagaagtacggggtgccgccggagcgctgggtggacttccgcgccctcacgggggaccgctcggacaacatccccggggtggcggggataggggagaagaccgcccttcgactcctcgcggagtgggggagcgtggagaacctcctgaagaacctggaccgggtgaagccggactcggtccggcgcaagatagaggcgcaccttgaggacctccgcctctccttggacctggcccgcatccgcaccgacctccccttggaggtggactttaaggccctgcgccgcaggacccccgacctggagggcctgagggcctttttggaggagctggagttcggaagcctccttcatgagttcggcctcctgggaggggagaagccccgggaggaggccccctggcccccgcccgaaggggccttcgtaggcttcctcctctcccgcaaggagcccatgtgggcggagcttctggccctggcggccgccgcagagggccgggtccaccgggcaacaagcccggttgaggccctggccgacctcaaggaggcccgggggttcctggccaaggacctggccgttttggccctgcgggagggggtggccctggaccccacggacgaccccctcctggtggcctacctcctggacccggccaacaccaaccccgagggggtggcccggcgctacgggggcgagttcacggaggacgcagcggagagggccctcctctccgagaggctcttccagaacctctttccccggctttccgagaagctcctctggctctaccaggaggtggagcggcccctctcccgggtcttggcccacatggaggcccggggggtgaggctggacgtcccccttctggaggccctctcctttgagctggagaaggagatggagcgcctggagggggaggtcttccgcttggccggccaccccttcaacctcaactcccgcgaccagctggaaagggtcctctttgacgagctgggccttaccccggtgggtcggacggagaagacgggcaagcgctccaccgcccagggggccctggaggccctccggggggcccaccccatcgtggagctcatcctccagtaccgggagctttccaagctcaaaagcacctacctggaccccctgccccggctcgtccacccgcggacgggccggcttcacacccgcttcaaccagacggccacggccacgggaaggctttccagctccgaccccaacctgcagaacatccccgtgcgcacccccttggggcagcgcatccgcaaggccttcgtggccgaggaggggtggctccttttggcggcggactactcccagatcgagcttcgggtcctggcccacctctcgggggacgagaacctgaagcgggtcttccgggaggggaaggacatccataccgaaaccgccgcctggatgttcggcttagaccccgctctagtggatccaaagatgcgccgggcggccaagacggtcaacttcggcgtcctctacgggatgtccgcccacaggctctcccaggagctcggcatagactacaaggaggcggaggcctttattgagcgctacttccagagcttccccaaggtgcgggcctggatagaaaggaccctggaggagggccggacgcggggctacgtggagaccctgttcggcaggaggcgctatgtgcccgacctgcaatcccgggtccgctcggtgcgggaggcggcggagcggatggccttcaacatgcccgtgcagggcaccgccgccgacctgatgaagatcgccatggtcaagctcttccccaggctaaagcccctgggggcccacctcctcctccaggtgcacgacgagctggtcctggaggtgcccgaggaccgggccgaggaggccaaggccctggtcaaggaggtcatggagaacacctaccccttggacgtgcccctcgaggtggaggtgggcgtgggtcgggactggctggaggcgaagggggattgaagcggtcgac

SEQ ID NO: 2845 - DNA, 2605 bp, Artificial Sequence
  Description of Artificial Sequence: Synthetic DNA sequence of Thermus Rt41A DNA Polymerase A765H
atgaaatacctgctgccgaccgctgctgctggtctgctgctcctcgctgcccagccggcgatggccatggatatcggaattaattcggatccgaattccccactttttgacctggaggaaccccccaagcgggtgcttctggtggacggccaccacctggcctaccgcaccttctacgccctgagcctcaccacctcccggggggagccggtgcagatggtctacggcttcgcccggagcctcctcaaggccttgaaggaggacgggcaggcggtggtcgtggtctttgacgccaaggccccctccttccgccacgaggcctacgaggcctacaaggcgggccgggcccccaccccggaggacttcccccgccagctcgccttggtcaagcggctggtggaccttctgggcctggtccgcctcgaggccccgggttacgaggcggacgacgtcctgggcaccctggccaagaaggccgaaagggaggggatggaggtgcgcatcctcacgggagaccgggacttcttccagctcctctccgagaaggtctcggtcctcctgccggacgggaccctggtcaccccaaaggacgtccaggagaagtacggggtgccgccggagcgctgggtggacttccgcgccctcacgggggaccgctcggacaacatccccggggtggcggggataggggagaagaccgcccttcgactcctcgcggagtgggggagcgtggagaacctcctgaagaacctggaccgggtgaagccggactcggtccggcgcaagatagaggcgcaccttgaggacctccgcctctccttggacctggcccgcatccgcaccgacctccccttggaggtggactttaaggccctgcgccgcaggacccccgacctggagggcctgagggcctttttggaggagctggagttcggaagcctccttcatgagttcggcctcctgggaggggagaagccccgggaggaggccccctggcccccgcccgaaggggccttcgtaggcttcctcctctcccgcaaggagcccatgtgggcggagcttctggccctggcggccgccgcagagggccgggtccaccgggcaacaagcccggttgaggccctggccgacctcaaggaggcccgggggttcctggccaaggacctggccgttttggccctgcgggagggggtggccctggaccccacggacgaccccctcctggtggcctacctcctggacccggccaacaccaaccccgagggggtggcccggcgctacgggggcgagttcacggaggacgcagcggagagggccctcctctccgagaggctcttccagaacctctttccccggctttccgagaagctcctctggctctaccaggaggtggagcggcccctctcccgggtcttggcccacatggaggcccggggggtgaggctggacgtcccccttctggaggccctctcctttgagctggagaaggagatggagcgcctggagggggaggtcttccgcttggccggccaccccttcaacctcaactcccgcgaccagctggaaagggtcctctttgacgagctgggccttaccccggtgggtcggacggagaagacgggcaagcgctccaccgcccagggggccctggaggccctccggggggcccaccccatcgtggagctcatcctccagtaccgggagctttccaagctcaaaagcacctacctggaccccctgccccggctcgtccacccgcggacgggccggcttcacacccgcttcaaccagacggccacggccacgggaaggctttccagctccgaccccaacctgcagaacatccccgtgcgcacccccttggggcagcgcatccgcaaggccttcgtggccgaggaggggtggctccttttggcggcggactactcccagatcgagcttcgggtcctggcccacctctcgggggacgagaacctgaagcgggtcttccgggaggggaaggacatccataccgaaaccgccgcctggatgttcggcttagaccccgctctagtggatccaaagatgcgccgggcggccaagacggtcaacttcggcgtcctctacgggatgtccgcccacaggctctcccaggagctcggcatagactacaaggaggcggaggcctttattgagcgctacttccagagcttccccaaggtgcgggcctggatagaaaggaccctggaggagggccggacgcggggctacgtggagaccctgttcggcaggaggcgctatgtgcccgacctgcattcccgggtccgctcggtgcgggaggcggcggagcggatggccttcaacatgcccgtgcagggcaccgccgccgacctgatgaagatcgccatggtcaagctcttccccaggctaaagcccctgggggcccacctcctcctccaggtgcacgacgagctggtcctggaggtgcccgaggaccgggccgaggaggccaaggccctggtcaaggaggtcatggagaacacctaccccttggacgtgcccctcgaggtggaggtgggcgtgggtcgggactggctggaggcgaagggggattgaagcggtcgac

SEQ ID NO: 2846 - DNA, 2605 bp, Artificial Sequence
  Description of Artificial Sequence: Synthetic DNA sequence of Thermus Rt41A DNA Polymerase A765I
atgaaatacctgctgccgaccgctgctgctggtctgctgctcctcgctgcccagccggcgatggccatggatatcggaattaattcggatccgaattccccactttttgacctggaggaaccccccaagcgggtgcttctggtggacggccaccacctggcctaccgcaccttctacgccctgagcctcaccacctcccggggggagccggtgcagatggtctacggcttcgcccggagcctcctcaaggccttgaaggaggacgggcaggcggtggtcgtggtctttgacgccaaggccccctccttccgccacgaggcctacgaggcctacaaggcgggccgggcccccaccccggaggacttcccccgccagctcgccttggtcaagcggctggtggaccttctgggcctggtccgcctcgaggccccgggttacgaggcggacgacgtcctgggcaccctggccaagaaggccgaaagggaggggatggaggtgcgcatcctcacgggagaccgggacttcttccagctcctctccgagaaggtctcggtcctcctgccggacgggaccctggtcaccccaaaggacgtccaggagaagtacggggtgccgccggagcgctgggtggacttccgcgccctcacgggggaccgctcggacaacatccccggggtggcggggataggggagaagaccgcccttcgactcctcgcggagtgggggagcgtggagaacctcctgaagaacctggaccgggtgaagccggactcggtccggcgcaagatagaggcgcaccttgaggacctccgcctctccttggacctggcccgcatccgcaccgacctccccttggaggtggactttaaggccctgcgccgcaggacccccgacctggagggcctgagggcctttttggaggagctggagttcggaagcctccttcatgagttcggcctcctgggaggggagaagccccgggaggaggccccctggcccccgcccgaaggggccttcgtaggcttcctcctctcccgcaaggagcccatgtgggcggagcttctggccctggcggccgccgcagagggccgggtccaccgggcaacaagcccggttgaggccctggccgacctcaaggaggcccgggggttcctggccaaggacctggccgttttggccctgcgggagggggtggccctggaccccacggacgaccccctcctggtggcctacctcctggacccggccaacaccaaccccgagggggtggcccggcgctacgggggcgagttcacggaggacgcagcggagagggccctcctctccgagaggctcttccagaacctctttccccggctttccgagaagctcctctggctctaccaggaggtggagcggcccctctcccgggtcttggcccacatggaggcccggggggtgaggctggacgtcccccttctggaggccctctcctttgagctggagaaggagatggagcgcctggagggggaggtcttccgcttggccggccaccccttcaacctcaactcccgcgaccagctggaaagggtcctctttgacgagctgggccttaccccggtgggtcggacggagaagacgggcaagcgctccaccgcccagggggccctggaggccctccggggggcccaccccatcgtggagctcatcctccagtaccgggagctttccaagctcaaaagcacctacctggaccccctgccccggctcgtccacccgcggacgggccggcttcacacccgcttcaaccagacggccacggccacgggaaggctttccagctccgaccccaacctgcagaacatccccgtgcgcacccccttggggcagcgcatccgcaaggccttcgtggccgaggaggggtggctccttttggcggcggactactcccagatcgagcttcgggtcctggcccacctctcgggggacgagaacctgaagcgggtcttccgggaggggaaggacatccataccgaaaccgccgcctggatgttcggcttagaccccgctctagtggatccaaagatgcgccgggcggccaagacggtcaacttcggcgtcctctacgggatgtccgcccacaggctctcccaggagctcggcatagactacaaggaggcggaggcctttattgagcgctacttccagagcttccccaaggtgcgggcctggatagaaaggaccctggaggagggccggacgcggggctacgtggagaccctgttcggcaggaggcgctatgtgcccgacctgatttcccgggtccgctcggtgcgggaggcggcggagcggatggccttcaacatgcccgtgcagggcaccgccgccgacctgatgaagatcgccatggtcaagctcttccccaggctaaagcccctgggggcccacctcctcctccaggtgcacgacgagctggtcctggaggtgcccgaggaccgggccgaggaggccaaggccctggtcaaggaggtcatggagaacacctaccccttggacgtgcccctcgaggtggaggtgggcgtgggtcgggactggctggaggcgaagggggattgaagcggtcgac

SEQ ID NO: 2847 - DNA, 2605 bp, Artificial Sequence
  Description of Artificial Sequence: Synthetic DNA sequence of Thermus Rt41A DNA Polymerase A765L
atgaaatacctgctgccgaccgctgctgctggtctgctgctcctcgctgcccagccggcgatggccatggatatcggaattaattcggatccgaattccccactttttgacctggaggaaccccccaagcgggtgcttctggtggacggccaccacctggcctaccgcaccttctacgccctgagcctcaccacctcccggggggagccggtgcagatggtctacggcttcgcccggagcctcctcaaggccttgaaggaggacgggcaggcggtggtcgtggtctttgacgccaaggccccctccttccgccacgaggcctacgaggcctacaaggcgggccgggcccccaccccggaggacttcccccgccagctcgccttggtcaagcggctggtggaccttctgggcctggtccgcctcgaggccccgggttacgaggcggacgacgtcctgggcaccctggccaagaaggccgaaagggaggggatggaggtgcgcatcctcacgggagaccgggacttcttccagctcctctccgagaaggtctcggtcctcctgccggacgggaccctggtcaccccaaaggacgtccaggagaagtacggggtgccgccggagcgctgggtggacttccgcgccctcacgggggaccgctcggacaacatccccggggtggcggggataggggagaagaccgcccttcgactcctcgcggagtgggggagcgtggagaacctcctgaagaacctggaccgggtgaagccggactcggtccggcgcaagatagaggcgcaccttgaggacctccgcctctccttggacctggcccgcatccgcaccgacctccccttggaggtggactttaaggccctgcgccgcaggacccccgacctggagggcctgagggcctttttggaggagctggagttcggaagcctccttcatgagttcggcctcctgggaggggagaagccccgggaggaggccccctggcccccgcccgaaggggccttcgtaggcttcctcctctcccgcaaggagcccatgtgggcggagcttctggccctggcggccgccgcagagggccgggtccaccgggcaacaagcccggttgaggccctggccgacctcaaggaggcccgggggttcctggccaaggacctggccgttttggccctgcgggagggggtggccctggaccccacggacgaccccctcctggtggcctacctcctggacccggccaacaccaaccccgagggggtggcccggcgctacgggggcgagttcacggaggacgcagcggagagggccctcctctccgagaggctcttccagaacctctttccccggctttccgagaagctcctctggctctaccaggaggtggagcggcccctctcccgggtcttggcccacatggaggcccggggggtgaggctggacgtcccccttctggaggccctctcctttgagctggagaaggagatggagcgcctggagggggaggtcttccgcttggccggccaccccttcaacctcaactcccgcgaccagctggaaagggtcctctttgacgagctgggccttaccccggtgggtcggacggagaagacgggcaagcgctccaccgcccagggggccctggaggccctccggggggcccaccccatcgtggagctcatcctccagtaccgggagctttccaagctcaaaagcacctacctggaccccctgccccggctcgtccacccgcggacgggccggcttcacacccgcttcaaccagacggccacggccacgggaaggctttccagctccgaccccaacctgcagaacatccccgtgcgcacccccttggggcagcgcatccgcaaggccttcgtggccgaggaggggtggctccttttggcggcggactactcccagatcgagcttcgggtcctggcccacctctcgggggacgagaacctgaagcgggtcttccgggaggggaaggacatccataccgaaaccgccgcctggatgttcggcttagaccccgctctagtggatccaaagatgcgccgggcggccaagacggtcaacttcggcgtcctctacgggatgtccgcccacaggctctcccaggagctcggcatagactacaaggaggcggaggcctttattgagcgctacttccagagcttccccaaggtgcgggcctggatagaaaggaccctggaggagggccggacgcggggctacgtggagaccctgttcggcaggaggcgctatgtgcccgacctgttatcccgggtccgctcggtgcgggaggcggcggagcggatggccttcaacatgcccgtgcagggcaccgccgccgacctgatgaagatcgccatggtcaagctcttccccaggctaaagcccctgggggcccacctcctcctccaggtgcacgacgagctggtcctggaggtgcccgaggaccgggccgaggaggccaaggccctggtcaaggaggtcatggagaacacctaccccttggacgtgcccctcgaggtggaggtgggcgtgggtcgggactggctggaggcgaagggggattgaagcggtcgac

SEQ ID NO: 2848 - DNA, 2605 bp, Artificial Sequence
  Description of Artificial Sequence: Synthetic DNA sequence of Thermus Rt41A DNA Polymerase A765K
atgaaatacctgctgccgaccgctgctgctggtctgctgctcctcgctgcccagccggcgatggccatggatatcggaattaattcggatccgaattccccactttttgacctggaggaaccccccaagcgggtgcttctggtggacggccaccacctggcctaccgcaccttctacgccctgagcctcaccacctcccggggggagccggtgcagatggtctacggcttcgcccggagcctcctcaaggccttgaaggaggacgggcaggcggtggtcgtggtctttgacgccaaggccccctccttccgccacgaggcctacgaggcctacaaggcgggccgggcccccaccccggaggacttcccccgccagctcgccttggtcaagcggctggtggaccttctgggcctggtccgcctcgaggccccgggttacgaggcggacgacgtcctgggcaccctggccaagaaggccgaaagggaggggatggaggtgcgcatcctcacgggagaccgggacttcttccagctcctctccgagaaggtctcggtcctcctgccggacgggaccctggtcaccccaaaggacgtccaggagaagtacggggtgccgccggagcgctgggtggacttccgcgccctcacgggggaccgctcggacaacatccccggggtggcggggataggggagaagaccgcccttcgactcctcgcggagtgggggagcgtggagaacctcctgaagaacctggaccgggtgaagccggactcggtccggcgcaagatagaggcgcaccttgaggacctccgcctctccttggacctggcccgcatccgcaccgacctccccttggaggtggactttaaggccctgcgccgcaggacccccgacctggagggcctgagggcctttttggaggagctggagttcggaagcctccttcatgagttcggcctcctgggaggggagaagccccgggaggaggccccctggcccccgcccgaaggggccttcgtaggcttcctcctctcccgcaaggagcccatgtgggcggagcttctggccctggcggccgccgcagagggccgggtccaccgggcaacaagcccggttgaggccctggccgacctcaaggaggcccgggggttcctggccaaggacctggccgttttggccctgcgggagggggtggccctggaccccacggacgaccccctcctggtggcctacctcctggacccggccaacaccaaccccgagggggtggcccggcgctacgggggcgagttcacggaggacgcagcggagagggccctcctctccgagaggctcttccagaacctctttccccggctttccgagaagctcctctggctctaccaggaggtggagcggcccctctcccgggtcttggcccacatggaggcccggggggtgaggctggacgtcccccttctggaggccctctcctttgagctggagaaggagatggagcgcctggagggggaggtcttccgcttggccggccaccccttcaacctcaactcccgcgaccagctggaaagggtcctctttgacgagctgggccttaccccggtgggtcggacggagaagacgggcaagcgctccaccgcccagggggccctggaggccctccggggggcccaccccatcgtggagctcatcctccagtaccgggagctttccaagctcaaaagcacctacctggaccccctgccccggctcgtccacccgcggacgggccggcttcacacccgcttcaaccagacggccacggccacgggaaggctttccagctccgaccccaacctgcagaacatccccgtgcgcacccccttggggcagcgcatccgcaaggccttcgtggccgaggaggggtggctccttttggcggcggactactcccagatcgagcttcgggtcctggcccacctctcgggggacgagaacctgaagcgggtcttccgggaggggaaggacatccataccgaaaccgccgcctggatgttcggcttagaccccgctctagtggatccaaagatgcgccgggcggccaagacggtcaacttcggcgtcctctacgggatgtccgcccacaggctctcccaggagctcggcatagactacaaggaggcggaggcctttattgagcgctacttccagagcttccccaaggtgcgggcctggatagaaaggaccctggaggagggccggacgcggggctacgtggagaccctgttcggcaggaggcgctatgtgcccgacctgaaatcccgggtccgctcggtgcgggaggcggcggagcggatggccttcaacatgcccgtgcagggcaccgccgccgacctgatgaagatcgccatggtcaagctcttccccaggctaaagcccctgggggcccacctcctcctccaggtgcacgacgagctggtcctggaggtgcccgaggaccgggccgaggaggccaaggccctggtcaaggaggtcatggagaacacctaccccttggacgtgcccctcgaggtggaggtgggcgtgggtcgggactggctggaggcgaagggggattgaagcggtcgac

SEQ ID NO: 2849 - DNA, 2605 bp, Artificial Sequence
  Description of Artificial Sequence: Synthetic DNA sequence of Thermus Rt41A DNA Polymerase A765E
atgaaatacctgctgccgaccgctgctgctggtctgctgctcctcgctgcccagccggcgatggccatggatatcggaattaattcggatccgaattccccactttttgacctggaggaaccccccaagcgggtgcttctggtggacggccaccacctggcctaccgcaccttctacgccctgagcctcaccacctcccggggggagccggtgcagatggtctacggcttcgcccggagcctcctcaaggccttgaaggaggacgggcaggcggtggtcgtggtctttgacgccaaggccccctccttccgccacgaggcctacgaggcctacaaggcgggccgggcccccaccccggaggacttcccccgccagctcgccttggtcaagcggctggtggaccttctgggcctggtccgcctcgaggccccgggttacgaggcggacgacgtcctgggcaccctggccaagaaggccgaaagggaggggatggaggtgcgcatcctcacgggagaccgggacttcttccagctcctctccgagaaggtctcggtcctcctgccggacgggaccctggtcaccccaaaggacgtccaggagaagtacggggtgccgccggagcgctgggtggacttccgcgccctcacgggggaccgctcggacaacatccccggggtggcggggataggggagaagaccgcccttcgactcctcgcggagtgggggagcgtggagaacctcctgaagaacctggaccgggtgaagccggactcggtccggcgcaagatagaggcgcaccttgaggacctccgcctctccttggacctggcccgcatccgcaccgacctccccttggaggtggactttaaggccctgcgccgcaggacccccgacctggagggcctgagggcctttttggaggagctggagttcggaagcctccttcatgagttcggcctcctgggaggggagaagccccgggaggaggccccctggcccccgcccgaaggggccttcgtaggcttcctcctctcccgcaaggagcccatgtgggcggagcttctggccctggcggccgccgcagagggccgggtccaccgggcaacaagcccggttgaggccctggccgacctcaaggaggcccgggggttcctggccaaggacctggccgttttggccctgcgggagggggtggccctggaccccacggacgaccccctcctggtggcctacctcctggacccggccaacaccaaccccgagggggtggcccggcgctacgggggcgagttcacggaggacgcagcggagagggccctcctctccgagaggctcttccagaacctctttccccggctttccgagaagctcctctggctctaccaggaggtggagcggcccctctcccgggtcttggcccacatggaggcccggggggtgaggctggacgtcccccttctggaggccctctcctttgagctggagaaggagatggagcgcctggagggggaggtcttccgcttggccggccaccccttcaacctcaactcccgcgaccagctggaaagggtcctctttgacgagctgggccttaccccggtgggtcggacggagaagacgggcaagcgctccaccgcccagggggccctggaggccctccggggggcccaccccatcgtggagctcatcctccagtaccgggagctttccaagctcaaaagcacctacctggaccccctgccccggctcgtccacccgcggacgggccggcttcacacccgcttcaaccagacggccacggccacgggaaggctttccagctccgaccccaacctgcagaacatccccgtgcgcacccccttggggcagcgcatccgcaaggccttcgtggccgaggaggggtggctccttttggcggcggactactcccagatcgagcttcgggtcctggcccacctctcgggggacgagaacctgaagcgggtcttccgggaggggaaggacatccataccgaaaccgccgcctggatgttcggcttagaccccgctctagtggatccaaagatgcgccgggcggccaagacggtcaacttcggcgtcctctacgggatgtccgcccacaggctctcccaggagctcggcatagactacaaggaggcggaggcctttattgagcgctacttccagagcttccccaaggtgcgggcctggatagaaaggaccctggaggagggccggacgcggggctacgtggagaccctgttcggcaggaggcgctatgtgcccgacctggaatcccgggtccgctcggtgcgggaggcggcggagcggatggccttcaacatgcccgtgcagggcaccgccgccgacctgatgaagatcgccatggtcaagctcttccccaggctaaagcccctgggggcccacctcctcctccaggtgcacgacgagctggtcctggaggtgcccgaggaccgggccgaggaggccaaggccctggtcaaggaggtcatggagaacacctaccccttggacgtgcccctcgaggtggaggtgggcgtgggtcgggactggctggaggcgaagggggattgaagcggtcgac

SEQ ID NO: 2850 - DNA, 2605 bp, Artificial Sequence
  Description of Artificial Sequence: Synthetic DNA sequence of Thermus Rt41A DNA Polymerase A765D
atgaaatacctgctgccgaccgctgctgctggtctgctgctcctcgctgcccagccggcgatggccatggatatcggaattaattcggatccgaattccccactttttgacctggaggaaccccccaagcgggtgcttctggtggacggccaccacctggcctaccgcaccttctacgccctgagcctcaccacctcccggggggagccggtgcagatggtctacggcttcgcccggagcctcctcaaggccttgaaggaggacgggcaggcggtggtcgtggtctttgacgccaaggccccctccttccgccacgaggcctacgaggcctacaaggcgggccgggcccccaccccggaggacttcccccgccagctcgccttggtcaagcggctggtggaccttctgggcctggtccgcctcgaggccccgggttacgaggcggacgacgtcctgggcaccctggccaagaaggccgaaagggaggggatggaggtgcgcatcctcacgggagaccgggacttcttccagctcctctccgagaaggtctcggtcctcctgccggacgggaccctggtcaccccaaaggacgtccaggagaagtacggggtgccgccggagcgctgggtggacttccgcgccctcacgggggaccgctcggacaacatccccggggtggcggggataggggagaagaccgcccttcgactcctcgcggagtgggggagcgtggagaacctcctgaagaacctggaccgggtgaagccggactcggtccggcgcaagatagaggcgcaccttgaggacctccgcctctccttggacctggcccgcatccgcaccgacctccccttggaggtggactttaaggccctgcgccgcaggacccccgacctggagggcctgagggcctttttggaggagctggagttcggaagcctccttcatgagttcggcctcctgggaggggagaagccccgggaggaggccccctggcccccgcccgaaggggccttcgtaggcttcctcctctcccgcaaggagcccatgtgggcggagcttctggccctggcggccgccgcagagggccgggtccaccgggcaacaagcccggttgaggccctggccgacctcaaggaggcccgggggttcctggccaaggacctggccgttttggccctgcgggagggggtggccctggaccccacggacgaccccctcctggtggcctacctcctggacccggccaacaccaaccccgagggggtggcccggcgctacgggggcgagttcacggaggacgcagcggagagggccctcctctccgagaggctcttccagaacctctttccccggctttccgagaagctcctctggctctaccaggaggtggagcggcccctctcccgggtcttggcccacatggaggcccggggggtgaggctggacgtcccccttctggaggccctctcctttgagctggagaaggagatggagcgcctggagggggaggtcttccgcttggccggccaccccttcaacctcaactcccgcgaccagctggaaagggtcctctttgacgagctgggccttaccccggtgggtcggacggagaagacgggcaagcgctccaccgcccagggggccctggaggccctccggggggcccaccccatcgtggagctcatcctccagtaccgggagctttccaagctcaaaagcacctacctggaccccctgccccggctcgtccacccgcggacgggccggcttcacacccgcttcaaccagacggccacggccacgggaaggctttccagctccgaccccaacctgcagaacatccccgtgcgcacccccttggggcagcgcatccgcaaggccttcgtggccgaggaggggtggctccttttggcggcggactactcccagatcgagcttcgggtcctggcccacctctcgggggacgagaacctgaagcgggtcttccgggaggggaaggacatccataccgaaaccgccgcctggatgttcggcttagaccccgctctagtggatccaaagatgcgccgggcggccaagacggtcaacttcggcgtcctctacgggatgtccgcccacaggctctcccaggagctcggcatagactacaaggaggcggaggcctttattgagcgctacttccagagcttccccaaggtgcgggcctggatagaaaggaccctggaggagggccggacgcggggctacgtggagaccctgttcggcaggaggcgctatgtgcccgacctggattcccgggtccgctcggtgcgggaggcggcggagcggatggccttcaacatgcccgtgcagggcaccgccgccgacctgatgaagatcgccatggtcaagctcttccccaggctaaagcccctgggggcccacctcctcctccaggtgcacgacgagctggtcctggaggtgcccgaggaccgggccgaggaggccaaggccctggtcaaggaggtcatggagaacacctaccccttggacgtgcccctcgaggtggaggtgggcgtgggtcgggactggctggaggcgaagggggattgaagcggtcgac

SEQ ID NO: 2851 - DNA, 2605 bp, Artificial Sequence
  Description of Artificial Sequence: Synthetic DNA sequence of Thermus Rt41A DNA Polymerase A765F
atgaaatacctgctgccgaccgctgctgctggtctgctgctcctcgctgcccagccggcgatggccatggatatcggaattaattcggatccgaattccccactttttgacctggaggaaccccccaagcgggtgcttctggtggacggccaccacctggcctaccgcaccttctacgccctgagcctcaccacctcccggggggagccggtgcagatggtctacggcttcgcccggagcctcctcaaggccttgaaggaggacgggcaggcggtggtcgtggtctttgacgccaaggccccctccttccgccacgaggcctacgaggcctacaaggcgggccgggcccccaccccggaggacttcccccgccagctcgccttggtcaagcggctggtggaccttctgggcctggtccgcctcgaggccccgggttacgaggcggacgacgtcctgggcaccctggccaagaaggccgaaagggaggggatggaggtgcgcatcctcacgggagaccgggacttcttccagctcctctccgagaaggtctcggtcctcctgccggacgggaccctggtcaccccaaaggacgtccaggagaagtacggggtgccgccggagcgctgggtggacttccgcgccctcacgggggaccgctcggacaacatccccggggtggcggggataggggagaagaccgcccttcgactcctcgcggagtgggggagcgtggagaacctcctgaagaacctggaccgggtgaagccggactcggtccggcgcaagatagaggcgcaccttgaggacctccgcctctccttggacctggcccgcatccgcaccgacctccccttggaggtggactttaaggccctgcgccgcaggacccccgacctggagggcctgagggcctttttggaggagctggagttcggaagcctccttcatgagttcggcctcctgggaggggagaagccccgggaggaggccccctggcccccgcccgaaggggccttcgtaggcttcctcctctcccgcaaggagcccatgtgggcggagcttctggccctggcggccgccgcagagggccgggtccaccgggcaacaagcccggttgaggccctggccgacctcaaggaggcccgggggttcctggccaaggacctggccgttttggccctgcgggagggggtggccctggaccccacggacgaccccctcctggtggcctacctcctggacccggccaacaccaaccccgagggggtggcccggcgctacgggggcgagttcacggaggacgcagcggagagggccctcctctccgagaggctcttccagaacctctttccccggctttccgagaagctcctctggctctaccaggaggtggagcggcccctctcccgggtcttggcccacatggaggcccggggggtgaggctggacgtcccccttctggaggccctctcctttgagctggagaaggagatggagcgcctggagggggaggtcttccgcttggccggccaccccttcaacctcaactcccgcgaccagctggaaagggtcctctttgacgagctgggccttaccccggtgggtcggacggagaagacgggcaagcgctccaccgcccagggggccctggaggccctccggggggcccaccccatcgtggagctcatcctccagtaccgggagctttccaagctcaaaagcacctacctggaccccctgccccggctcgtccacccgcggacgggccggcttcacacccgcttcaaccagacggccacggccacgggaaggctttccagctccgaccccaacctgcagaacatccccgtgcgcacccccttggggcagcgcatccgcaaggccttcgtggccgaggaggggtggctccttttggcggcggactactcccagatcgagcttcgggtcctggcccacctctcgggggacgagaacctgaagcgggtcttccgggaggggaaggacatccataccgaaaccgccgcctggatgttcggcttagaccccgctctagtggatccaaagatgcgccgggcggccaagacggtcaacttcggcgtcctctacgggatgtccgcccacaggctctcccaggagctcggcatagactacaaggaggcggaggcctttattgagcgctacttccagagcttccccaaggtgcgggcctggatagaaaggaccctggaggagggccggacgcggggctacgtggagaccctgttcggcaggaggcgctatgtgcccgacctgttttcccgggtccgctcggtgcgggaggcggcggagcggatggccttcaacatgcccgtgcagggcaccgccgccgacctgatgaagatcgccatggtcaagctcttccccaggctaaagcccctgggggcccacctcctcctccaggtgcacgacgagctggtcctggaggtgcccgaggaccgggccgaggaggccaaggccctggtcaaggaggtcatggagaacacctaccccttggacgtgcccctcgaggtggaggtgggcgtgggtcgggactggctggaggcgaagggggattgaagcggtcgac

SEQ ID NO: 2852 - DNA, 2605 bp, Artificial Sequence
  Description of Artificial Sequence: Synthetic DNA sequence of Thermus Rt41A DNA Polymerase A765S
atgaaatacctgctgccgaccgctgctgctggtctgctgctcctcgctgcccagccggcgatggccatggatatcggaattaattcggatccgaattccccactttttgacctggaggaaccccccaagcgggtgcttctggtggacggccaccacctggcctaccgcaccttctacgccctgagcctcaccacctcccggggggagccggtgcagatggtctacggcttcgcccggagcctcctcaaggccttgaaggaggacgggcaggcggtggtcgtggtctttgacgccaaggccccctccttccgccacgaggcctacgaggcctacaaggcgggccgggcccccaccccggaggacttcccccgccagctcgccttggtcaagcggctggtggaccttctgggcctggtccgcctcgaggccccgggttacgaggcggacgacgtcctgggcaccctggccaagaaggccgaaagggaggggatggaggtgcgcatcctcacgggagaccgggacttcttccagctcctctccgagaaggtctcggtcctcctgccggacgggaccctggtcaccccaaaggacgtccaggagaagtacggggtgccgccggagcgctgggtggacttccgcgccctcacgggggaccgctcggacaacatccccggggtggcggggataggggagaagaccgcccttcgactcctcgcggagtgggggagcgtggagaacctcctgaagaacctggaccgggtgaagccggactcggtccggcgcaagatagaggcgcaccttgaggacctccgcctctccttggacctggcccgcatccgcaccgacctccccttggaggtggactttaaggccctgcgccgcaggacccccgacctggagggcctgagggcctttttggaggagctggagttcggaagcctccttcatgagttcggcctcctgggaggggagaagccccgggaggaggccccctggcccccgcccgaaggggccttcgtaggcttcctcctctcccgcaaggagcccatgtgggcggagcttctggccctggcggccgccgcagagggccgggtccaccgggcaacaagcccggttgaggccctggccgacctcaaggaggcccgggggttcctggccaaggacctggccgttttggccctgcgggagggggtggccctggaccccacggacgaccccctcctggtggcctacctcctggacccggccaacaccaaccccgagggggtggcccggcgctacgggggcgagttcacggaggacgcagcggagagggccctcctctccgagaggctcttccagaacctctttccccggctttccgagaagctcctctggctctaccaggaggtggagcggcccctctcccgggtcttggcccacatggaggcccggggggtgaggctggacgtcccccttctggaggccctctcctttgagctggagaaggagatggagcgcctggagggggaggtcttccgcttggccggccaccccttcaacctcaactcccgcgaccagctggaaagggtcctctttgacgagctgggccttaccccggtgggtcggacggagaagacgggcaagcgctccaccgcccagggggccctggaggccctccggggggcccaccccatcgtggagctcatcctccagtaccgggagctttccaagctcaaaagcacctacctggaccccctgccccggctcgtccacccgcggacgggccggcttcacacccgcttcaaccagacggccacggccacgggaaggctttccagctccgaccccaacctgcagaacatccccgtgcgcacccccttggggcagcgcatccgcaaggccttcgtggccgaggaggggtggctccttttggcggcggactactcccagatcgagcttcgggtcctggcccacctctcgggggacgagaacctgaagcgggtcttccgggaggggaaggacatccataccgaaaccgccgcctggatgttcggcttagaccccgctctagtggatccaaagatgcgccgggcggccaagacggtcaacttcggcgtcctctacgggatgtccgcccacaggctctcccaggagctcggcatagactacaaggaggcggaggcctttattgagcgctacttccagagcttccccaaggtgcgggcctggatagaaaggaccctggaggagggccggacgcggggctacgtggagaccctgttcggcaggaggcgctatgtgcccgacctgtcttcccgggtccgctcggtgcgggaggcggcggagcggatggccttcaacatgcccgtgcagggcaccgccgccgacctgatgaagatcgccatggtcaagctcttccccaggctaaagcccctgggggcccacctcctcctccaggtgcacgacgagctggtcctggaggtgcccgaggaccgggccgaggaggccaaggccctggtcaaggaggtcatggagaacacctaccccttggacgtgcccctcgaggtggaggtgggcgtgggtcgggactggctggaggcgaagggggattgaagcggtcgac

SEQ ID NO: 2853 - DNA, 2605 bp, Artificial Sequence
  Description of Artificial Sequence: Synthetic DNA sequence of Thermus Rt41A DNA Polymerase A765Y
atgaaatacctgctgccgaccgctgctgctggtctgctgctcctcgctgcccagccggcgatggccatggatatcggaattaattcggatccgaattccccactttttgacctggaggaaccccccaagcgggtgcttctggtggacggccaccacctggcctaccgcaccttctacgccctgagcctcaccacctcccggggggagccggtgcagatggtctacggcttcgcccggagcctcctcaaggccttgaaggaggacgggcaggcggtggtcgtggtctttgacgccaaggccccctccttccgccacgaggcctacgaggcctacaaggcgggccgggcccccaccccggaggacttcccccgccagctcgccttggtcaagcggctggtggaccttctgggcctggtccgcctcgaggccccgggttacgaggcggacgacgtcctgggcaccctggccaagaaggccgaaagggaggggatggaggtgcgcatcctcacgggagaccgggacttcttccagctcctctccgagaaggtctcggtcctcctgccggacgggaccctggtcaccccaaaggacgtccaggagaagtacggggtgccgccggagcgctgggtggacttccgcgccctcacgggggaccgctcggacaacatccccggggtggcggggataggggagaagaccgcccttcgactcctcgcggagtgggggagcgtggagaacctcctgaagaacctggaccgggtgaagccggactcggtccggcgcaagatagaggcgcaccttgaggacctccgcctctccttggacctggcccgcatccgcaccgacctccccttggaggtggactttaaggccctgcgccgcaggacccccgacctggagggcctgagggcctttttggaggagctggagttcggaagcctccttcatgagttcggcctcctgggaggggagaagccccgggaggaggccccctggcccccgcccgaaggggccttcgtaggcttcctcctctcccgcaaggagcccatgtgggcggagcttctggccctggcggccgccgcagagggccgggtccaccgggcaacaagcccggttgaggccctggccgacctcaaggaggcccgggggttcctggccaaggacctggccgttttggccctgcgggagggggtggccctggaccccacggacgaccccctcctggtggcctacctcctggacccggccaacaccaaccccgagggggtggcccggcgctacgggggcgagttcacggaggacgcagcggagagggccctcctctccgagaggctcttccagaacctctttccccggctttccgagaagctcctctggctctaccaggaggtggagcggcccctctcccgggtcttggcccacatggaggcccggggggtgaggctggacgtcccccttctggaggccctctcctttgagctggagaaggagatggagcgcctggagggggaggtcttccgcttggccggccaccccttcaacctcaactcccgcgaccagctggaaagggtcctctttgacgagctgggccttaccccggtgggtcggacggagaagacgggcaagcgctccaccgcccagggggccctggaggccctccggggggcccaccccatcgtggagctcatcctccagtaccgggagctttccaagctcaaaagcacctacctggaccccctgccccggctcgtccacccgcggacgggccggcttcacacccgcttcaaccagacggccacggccacgggaaggctttccagctccgaccccaacctgcagaacatccccgtgcgcacccccttggggcagcgcatccgcaaggccttcgtggccgaggaggggtggctccttttggcggcggactactcccagatcgagcttcgggtcctggcccacctctcgggggacgagaacctgaagcgggtcttccgggaggggaaggacatccataccgaaaccgccgcctggatgttcggcttagaccccgctctagtggatccaaagatgcgccgggcggccaagacggtcaacttcggcgtcctctacgggatgtccgcccacaggctctcccaggagctcggcatagactacaaggaggcggaggcctttattgagcgctacttccagagcttccccaaggtgcgggcctggatagaaaggaccctggaggagggccggacgcggggctacgtggagaccctgttcggcaggaggcgctatgtgcccgacctgtattcccgggtccgctcggtgcgggaggcggcggagcggatggccttcaacatgcccgtgcagggcaccgccgccgacctgatgaagatcgccatggtcaagctcttccccaggctaaagcccctgggggcccacctcctcctccaggtgcacgacgagctggtcctggaggtgcccgaggaccgggccgaggaggccaaggccctggtcaaggaggtcatggagaacacctaccccttggacgtgcccctcgaggtggaggtgggcgtgggtcgggactggctggaggcgaagggggattgaagcggtcgac

SEQ ID NO: 2854 - DNA, 2605 bp, Artificial Sequence
  Description of Artificial Sequence: Synthetic DNA sequence of Thermus Rt41A DNA Polymerase A765W
atgaaatacctgctgccgaccgctgctgctggtctgctgctcctcgctgcccagccggcgatggccatggatatcggaattaattcggatccgaattccccactttttgacctggaggaaccccccaagcgggtgcttctggtggacggccaccacctggcctaccgcaccttctacgccctgagcctcaccacctcccggggggagccggtgcagatggtctacggcttcgcccggagcctcctcaaggccttgaaggaggacgggcaggcggtggtcgtggtctttgacgccaaggccccctccttccgccacgaggcctacgaggcctacaaggcgggccgggcccccaccccggaggacttcccccgccagctcgccttggtcaagcggctggtggaccttctgggcctggtccgcctcgaggccccgggttacgaggcggacgacgtcctgggcaccctggccaagaaggccgaaagggaggggatggaggtgcgcatcctcacgggagaccgggacttcttccagctcctctccgagaaggtctcggtcctcctgccggacgggaccctggtcaccccaaaggacgtccaggagaagtacggggtgccgccggagcgctgggtggacttccgcgccctcacgggggaccgctcggacaacatccccggggtggcggggataggggagaagaccgcccttcgactcctcgcggagtgggggagcgtggagaacctcctgaagaacctggaccgggtgaagccggactcggtccggcgcaagatagaggcgcaccttgaggacctccgcctctccttggacctggcccgcatccgcaccgacctccccttggaggtggactttaaggccctgcgccgcaggacccccgacctggagggcctgagggcctttttggaggagctggagttcggaagcctccttcatgagttcggcctcctgggaggggagaagccccgggaggaggccccctggcccccgcccgaaggggccttcgtaggcttcctcctctcccgcaaggagcccatgtgggcggagcttctggccctggcggccgccgcagagggccgggtccaccgggcaacaagcccggttgaggccctggccgacctcaaggaggcccgggggttcctggccaaggacctggccgttttggccctgcgggagggggtggccctggaccccacggacgaccccctcctggtggcctacctcctggacccggccaacaccaaccccgagggggtggcccggcgctacgggggcgagttcacggaggacgcagcggagagggccctcctctccgagaggctcttccagaacctctttccccggctttccgagaagctcctctggctctaccaggaggtggagcggcccctctcccgggtcttggcccacatggaggcccggggggtgaggctggacgtcccccttctggaggccctctcctttgagctggagaaggagatggagcgcctggagggggaggtcttccgcttggccggccaccccttcaacctcaactcccgcgaccagctggaaagggtcctctttgacgagctgggccttaccccggtgggtcggacggagaagacgggcaagcgctccaccgcccagggggccctggaggccctccggggggcccaccccatcgtggagctcatcctccagtaccgggagctttccaagctcaaaagcacctacctggaccccctgccccggctcgtccacccgcggacgggccggcttcacacccgcttcaaccagacggccacggccacgggaaggctttccagctccgaccccaacctgcagaacatccccgtgcgcacccccttggggcagcgcatccgcaaggccttcgtggccgaggaggggtggctccttttggcggcggactactcccagatcgagcttcgggtcctggcccacctctcgggggacgagaacctgaagcgggtcttccgggaggggaaggacatccataccgaaaccgccgcctggatgttcggcttagaccccgctctagtggatccaaagatgcgccgggcggccaagacggtcaacttcggcgtcctctacgggatgtccgcccacaggctctcccaggagctcggcatagactacaaggaggcggaggcctttattgagcgctacttccagagcttccccaaggtgcgggcctggatagaaaggaccctggaggagggccggacgcggggctacgtggagaccctgttcggcaggaggcgctatgtgcccgacctgtggtcccgggtccgctcggtgcgggaggcggcggagcggatggccttcaacatgcccgtgcagggcaccgccgccgacctgatgaagatcgccatggtcaagctcttccccaggctaaagcccctgggggcccacctcctcctccaggtgcacgacgagctggtcctggaggtgcccgaggaccgggccgaggaggccaaggccctggtcaaggaggtcatggagaacacctaccccttggacgtgcccctcgaggtggaggtgggcgtgggtcgggactggctggaggcgaagggggattgaagcggtcgac

SEQ ID NO: 2855 - DNA, 2605 bp, Artificial Sequence
  Description of Artificial Sequence: Synthetic DNA sequence of Thermus Rt41A DNA Polymerase A765P
atgaaatacctgctgccgaccgctgctgctggtctgctgctcctcgctgcccagccggcgatggccatggatatcggaattaattcggatccgaattccccactttttgacctggaggaaccccccaagcgggtgcttctggtggacggccaccacctggcctaccgcaccttctacgccctgagcctcaccacctcccggggggagccggtgcagatggtctacggcttcgcccggagcctcctcaaggccttgaaggaggacgggcaggcggtggtcgtggtctttgacgccaaggccccctccttccgccacgaggcctacgaggcctacaaggcgggccgggcccccaccccggaggacttcccccgccagctcgccttggtcaagcggctggtggaccttctgggcctggtccgcctcgaggccccgggttacgaggcggacgacgtcctgggcaccctggccaagaaggccgaaagggaggggatggaggtgcgcatcctcacgggagaccgggacttcttccagctcctctccgagaaggtctcggtcctcctgccggacgggaccctggtcaccccaaaggacgtccaggagaagtacggggtgccgccggagcgctgggtggacttccgcgccctcacgggggaccgctcggacaacatccccggggtggcggggataggggagaagaccgcccttcgactcctcgcggagtgggggagcgtggagaacctcctgaagaacctggaccgggtgaagccggactcggtccggcgcaagatagaggcgcaccttgaggacctccgcctctccttggacctggcccgcatccgcaccgacctccccttggaggtggactttaaggccctgcgccgcaggacccccgacctggagggcctgagggcctttttggaggagctggagttcggaagcctccttcatgagttcggcctcctgggaggggagaagccccgggaggaggccccctggcccccgcccgaaggggccttcgtaggcttcctcctctcccgcaaggagcccatgtgggcggagcttctggccctggcggccgccgcagagggccgggtccaccgggcaacaagcccggttgaggccctggccgacctcaaggaggcccgggggttcctggccaaggacctggccgttttggccctgcgggagggggtggccctggaccccacggacgaccccctcctggtggcctacctcctggacccggccaacaccaaccccgagggggtggcccggcgctacgggggcgagttcacggaggacgcagcggagagggccctcctctccgagaggctcttccagaacctctttccccggctttccgagaagctcctctggctctaccaggaggtggagcggcccctctcccgggtcttggcccacatggaggcccggggggtgaggctggacgtcccccttctggaggccctctcctttgagctggagaaggagatggagcgcctggagggggaggtcttccgcttggccggccaccccttcaacctcaactcccgcgaccagctggaaagggtcctctttgacgagctgggccttaccccggtgggtcggacggagaagacgggcaagcgctccaccgcccagggggccctggaggccctccggggggcccaccccatcgtggagctcatcctccagtaccgggagctttccaagctcaaaagcacctacctggaccccctgccccggctcgtccacccgcggacgggccggcttcacacccgcttcaaccagacggccacggccacgggaaggctttccagctccgaccccaacctgcagaacatccccgtgcgcacccccttggggcagcgcatccgcaaggccttcgtggccgaggaggggtggctccttttggcggcggactactcccagatcgagcttcgggtcctggcccacctctcgggggacgagaacctgaagcgggtcttccgggaggggaaggacatccataccgaaaccgccgcctggatgttcggcttagaccccgctctagtggatccaaagatgcgccgggcggccaagacggtcaacttcggcgtcctctacgggatgtccgcccacaggctctcccaggagctcggcatagactacaaggaggcggaggcctttattgagcgctacttccagagcttccccaaggtgcgggcctggatagaaaggaccctggaggagggccggacgcggggctacgtggagaccctgttcggcaggaggcgctatgtgcccgacctgccttcccgggtccgctcggtgcgggaggcggcggagcggatggccttcaacatgcccgtgcagggcaccgccgccgacctgatgaagatcgccatggtcaagctcttccccaggctaaagcccctgggggcccacctcctcctccaggtgcacgacgagctggtcctggaggtgcccgaggaccgggccgaggaggccaaggccctggtcaaggaggtcatggagaacacctaccccttggacgtgcccctcgaggtggaggtgggcgtgggtcgggactggctggaggcgaagggggattgaagcggtcgac

SEQ ID NO: 2856 - DNA, 2605 bp, Artificial Sequence
  Description of Artificial Sequence: Synthetic DNA sequence of Thermus Rt41A DNA Polymerase A765M
atgaaatacctgctgccgaccgctgctgctggtctgctgctcctcgctgcccagccggcgatggccatggatatcggaattaattcggatccgaattccccactttttgacctggaggaaccccccaagcgggtgcttctggtggacggccaccacctggcctaccgcaccttctacgccctgagcctcaccacctcccggggggagccggtgcagatggtctacggcttcgcccggagcctcctcaaggccttgaaggaggacgggcaggcggtggtcgtggtctttgacgccaaggccccctccttccgccacgaggcctacgaggcctacaaggcgggccgggcccccaccccggaggacttcccccgccagctcgccttggtcaagcggctggtggaccttctgggcctggtccgcctcgaggccccgggttacgaggcggacgacgtcctgggcaccctggccaagaaggccgaaagggaggggatggaggtgcgcatcctcacgggagaccgggacttcttccagctcctctccgagaaggtctcggtcctcctgccggacgggaccctggtcaccccaaaggacgtccaggagaagtacggggtgccgccggagcgctgggtggacttccgcgccctcacgggggaccgctcggacaacatccccggggtggcggggataggggagaagaccgcccttcgactcctcgcggagtgggggagcgtggagaacctcctgaagaacctggaccgggtgaagccggactcggtccggcgcaagatagaggcgcaccttgaggacctccgcctctccttggacctggcccgcatccgcaccgacctccccttggaggtggactttaaggccctgcgccgcaggacccccgacctggagggcctgagggcctttttggaggagctggagttcggaagcctccttcatgagttcggcctcctgggaggggagaagccccgggaggaggccccctggcccccgcccgaaggggccttcgtaggcttcctcctctcccgcaaggagcccatgtgggcggagcttctggccctggcggccgccgcagagggccgggtccaccgggcaacaagcccggttgaggccctggccgacctcaaggaggcccgggggttcctggccaaggacctggccgttttggccctgcgggagggggtggccctggaccccacggacgaccccctcctggtggcctacctcctggacccggccaacaccaaccccgagggggtggcccggcgctacgggggcgagttcacggaggacgcagcggagagggccctcctctccgagaggctcttccagaacctctttccccggctttccgagaagctcctctggctctaccaggaggtggagcggcccctctcccgggtcttggcccacatggaggcccggggggtgaggctggacgtcccccttctggaggccctctcctttgagctggagaaggagatggagcgcctggagggggaggtcttccgcttggccggccaccccttcaacctcaactcccgcgaccagctggaaagggtcctctttgacgagctgggccttaccccggtgggtcggacggagaagacgggcaagcgctccaccgcccagggggccctggaggccctccggggggcccaccccatcgtggagctcatcctccagtaccgggagctttccaagctcaaaagcacctacctggaccccctgccccggctcgtccacccgcggacgggccggcttcacacccgcttcaaccagacggccacggccacgggaaggctttccagctccgaccccaacctgcagaacatccccgtgcgcacccccttggggcagcgcatccgcaaggccttcgtggccgaggaggggtggctccttttggcggcggactactcccagatcgagcttcgggtcctggcccacctctcgggggacgagaacctgaagcgggtcttccgggaggggaaggacatccataccgaaaccgccgcctggatgttcggcttagaccccgctctagtggatccaaagatgcgccgggcggccaagacggtcaacttcggcgtcctctacgggatgtccgcccacaggctctcccaggagctcggcatagactacaaggaggcggaggcctttattgagcgctacttccagagcttccccaaggtgcgggcctggatagaaaggaccctggaggagggccggacgcggggctacgtggagaccctgttcggcaggaggcgctatgtgcccgacctgatgtcccgggtccgctcggtgcgggaggcggcggagcggatggccttcaacatgcccgtgcagggcaccgccgccgacctgatgaagatcgccatggtcaagctcttccccaggctaaagcccctgggggcccacctcctcctccaggtgcacgacgagctggtcctggaggtgcccgaggaccgggccgaggaggccaaggccctggtcaaggaggtcatggagaacacctaccccttggacgtgcccctcgaggtggaggtgggcgtgggtcgggactggctggaggcgaagggggattgaagcggtcgac

SEQ ID NO: 2857 - DNA, 2605 bp, Artificial Sequence
  Description of Artificial Sequence: Synthetic DNA sequence of Thermus Rt41A DNA Polymerase A765T
atgaaatacctgctgccgaccgctgctgctggtctgctgctcctcgctgcccagccggcgatggccatggatatcggaattaattcggatccgaattccccactttttgacctggaggaaccccccaagcgggtgcttctggtggacggccaccacctggcctaccgcaccttctacgccctgagcctcaccacctcccggggggagccggtgcagatggtctacggcttcgcccggagcctcctcaaggccttgaaggaggacgggcaggcggtggtcgtggtctttgacgccaaggccccctccttccgccacgaggcctacgaggcctacaaggcgggccgggcccccaccccggaggacttcccccgccagctcgccttggtcaagcggctggtggaccttctgggcctggtccgcctcgaggccccgggttacgaggcggacgacgtcctgggcaccctggccaagaaggccgaaagggaggggatggaggtgcgcatcctcacgggagaccgggacttcttccagctcctctccgagaaggtctcggtcctcctgccggacgggaccctggtcaccccaaaggacgtccaggagaagtacggggtgccgccggagcgctgggtggacttccgcgccctcacgggggaccgctcggacaacatccccggggtggcggggataggggagaagaccgcccttcgactcctcgcggagtgggggagcgtggagaacctcctgaagaacctggaccgggtgaagccggactcggtccggcgcaagatagaggcgcaccttgaggacctccgcctctccttggacctggcccgcatccgcaccgacctccccttggaggtggactttaaggccctgcgccgcaggacccccgacctggagggcctgagggcctttttggaggagctggagttcggaagcctccttcatgagttcggcctcctgggaggggagaagccccgggaggaggccccctggcccccgcccgaaggggccttcgtaggcttcctcctctcccgcaaggagcccatgtgggcggagcttctggccctggcggccgccgcagagggccgggtccaccgggcaacaagcccggttgaggccctggccgacctcaaggaggcccgggggttcctggccaaggacctggccgttttggccctgcgggagggggtggccctggaccccacggacgaccccctcctggtggcctacctcctggacccggccaacaccaaccccgagggggtggcccggcgctacgggggcgagttcacggaggacgcagcggagagggccctcctctccgagaggctcttccagaacctctttccccggctttccgagaagctcctctggctctaccaggaggtggagcggcccctctcccgggtcttggcccacatggaggcccggggggtgaggctggacgtcccccttctggaggccctctcctttgagctggagaaggagatggagcgcctggagggggaggtcttccgcttggccggccaccccttcaacctcaactcccgcgaccagctggaaagggtcctctttgacgagctgggccttaccccggtgggtcggacggagaagacgggcaagcgctccaccgcccagggggccctggaggccctccggggggcccaccccatcgtggagctcatcctccagtaccgggagctttccaagctcaaaagcacctacctggaccccctgccccggctcgtccacccgcggacgggccggcttcacacccgcttcaaccagacggccacggccacgggaaggctttccagctccgaccccaacctgcagaacatccccgtgcgcacccccttggggcagcgcatccgcaaggccttcgtggccgaggaggggtggctccttttggcggcggactactcccagatcgagcttcgggtcctggcccacctctcgggggacgagaacctgaagcgggtcttccgggaggggaaggacatccataccgaaaccgccgcctggatgttcggcttagaccccgctctagtggatccaaagatgcgccgggcggccaagacggtcaacttcggcgtcctctacgggatgtccgcccacaggctctcccaggagctcggcatagactacaaggaggcggaggcctttattgagcgctacttccagagcttccccaaggtgcgggcctggatagaaaggaccctggaggagggccggacgcggggctacgtggagaccctgttcggcaggaggcgctatgtgcccgacctgacttcccgggtccgctcggtgcgggaggcggcggagcggatggccttcaacatgcccgtgcagggcaccgccgccgacctgatgaagatcgccatggtcaagctcttccccaggctaaagcccctgggggcccacctcctcctccaggtgcacgacgagctggtcctggaggtgcccgaggaccgggccgaggaggccaaggccctggtcaaggaggtcatggagaacacctaccccttggacgtgcccctcgaggtggaggtgggcgtgggtcgggactggctggaggcgaagggggattgaagcggtcgac

SEQ ID NO: 2858 - DNA, 2605 bp, Artificial Sequence
  Description of Artificial Sequence: Synthetic DNA sequence of Thermus Rt41A DNA Polymerase A765N
atgaaatacctgctgccgaccgctgctgctggtctgctgctcctcgctgcccagccggcgatggccatggatatcggaattaattcggatccgaattccccactttttgacctggaggaaccccccaagcgggtgcttctggtggacggccaccacctggcctaccgcaccttctacgccctgagcctcaccacctcccggggggagccggtgcagatggtctacggcttcgcccggagcctcctcaaggccttgaaggaggacgggcaggcggtggtcgtggtctttgacgccaaggccccctccttccgccacgaggcctacgaggcctacaaggcgggccgggcccccaccccggaggacttcccccgccagctcgccttggtcaagcggctggtggaccttctgggcctggtccgcctcgaggccccgggttacgaggcggacgacgtcctgggcaccctggccaagaaggccgaaagggaggggatggaggtgcgcatcctcacgggagaccgggacttcttccagctcctctccgagaaggtctcggtcctcctgccggacgggaccctggtcaccccaaaggacgtccaggagaagtacggggtgccgccggagcgctgggtggacttccgcgccctcacgggggaccgctcggacaacatccccggggtggcggggataggggagaagaccgcccttcgactcctcgcggagtgggggagcgtggagaacctcctgaagaacctggaccgggtgaagccggactcggtccggcgcaagatagaggcgcaccttgaggacctccgcctctccttggacctggcccgcatccgcaccgacctccccttggaggtggactttaaggccctgcgccgcaggacccccgacctggagggcctgagggcctttttggaggagctggagttcggaagcctccttcatgagttcggcctcctgggaggggagaagccccgggaggaggccccctggcccccgcccgaaggggccttcgtaggcttcctcctctcccgcaaggagcccatgtgggcggagcttctggccctggcggccgccgcagagggccgggtccaccgggcaacaagcccggttgaggccctggccgacctcaaggaggcccgggggttcctggccaaggacctggccgttttggccctgcgggagggggtggccctggaccccacggacgaccccctcctggtggcctacctcctggacccggccaacaccaaccccgagggggtggcccggcgctacgggggcgagttcacggaggacgcagcggagagggccctcctctccgagaggctcttccagaacctctttccccggctttccgagaagctcctctggctctaccaggaggtggagcggcccctctcccgggtcttggcccacatggaggcccggggggtgaggctggacgtcccccttctggaggccctctcctttgagctggagaaggagatggagcgcctggagggggaggtcttccgcttggccggccaccccttcaacctcaactcccgcgaccagctggaaagggtcctctttgacgagctgggccttaccccggtgggtcggacggagaagacgggcaagcgctccaccgcccagggggccctggaggccctccggggggcccaccccatcgtggagctcatcctccagtaccgggagctttccaagctcaaaagcacctacctggaccccctgccccggctcgtccacccgcggacgggccggcttcacacccgcttcaaccagacggccacggccacgggaaggctttccagctccgaccccaacctgcagaacatccccgtgcgcacccccttggggcagcgcatccgcaaggccttcgtggccgaggaggggtggctccttttggcggcggactactcccagatcgagcttcgggtcctggcccacctctcgggggacgagaacctgaagcgggtcttccgggaggggaaggacatccataccgaaaccgccgcctggatgttcggcttagaccccgctctagtggatccaaagatgcgccgggcggccaagacggtcaacttcggcgtcctctacgggatgtccgcccacaggctctcccaggagctcggcatagactacaaggaggcggaggcctttattgagcgctacttccagagcttccccaaggtgcgggcctggatagaaaggaccctggaggagggccggacgcggggctacgtggagaccctgttcggcaggaggcgctatgtgcccgacctgaattcccgggtccgctcggtgcgggaggcggcggagcggatggccttcaacatgcccgtgcagggcaccgccgccgacctgatgaagatcgccatggtcaagctcttccccaggctaaagcccctgggggcccacctcctcctccaggtgcacgacgagctggtcctggaggtgcccgaggaccgggccgaggaggccaaggccctggtcaaggaggtcatggagaacacctaccccttggacgtgcccctcgaggtggaggtgggcgtgggtcgggactggctggaggcgaagggggattgaagcggtcgac

SEQ ID NO: 2859 - DNA, 2605 bp, Artificial Sequence
  Description of Artificial Sequence: Synthetic DNA sequence of Thermus Rt41A DNA Polymerase A765V
atgaaatacctgctgccgaccgctgctgctggtctgctgctcctcgctgcccagccggcgatggccatggatatcggaattaattcggatccgaattccccactttttgacctggaggaaccccccaagcgggtgcttctggtggacggccaccacctggcctaccgcaccttctacgccctgagcctcaccacctcccggggggagccggtgcagatggtctacggcttcgcccggagcctcctcaaggccttgaaggaggacgggcaggcggtggtcgtggtctttgacgccaaggccccctccttccgccacgaggcctacgaggcctacaaggcgggccgggcccccaccccggaggacttcccccgccagctcgccttggtcaagcggctggtggaccttctgggcctggtccgcctcgaggccccgggttacgaggcggacgacgtcctgggcaccctggccaagaaggccgaaagggaggggatggaggtgcgcatcctcacgggagaccgggacttcttccagctcctctccgagaaggtctcggtcctcctgccggacgggaccctggtcaccccaaaggacgtccaggagaagtacggggtgccgccggagcgctgggtggacttccgcgccctcacgggggaccgctcggacaacatccccggggtggcggggataggggagaagaccgcccttcgactcctcgcggagtgggggagcgtggagaacctcctgaagaacctggaccgggtgaagccggactcggtccggcgcaagatagaggcgcaccttgaggacctccgcctctccttggacctggcccgcatccgcaccgacctccccttggaggtggactttaaggccctgcgccgcaggacccccgacctggagggcctgagggcctttttggaggagctggagttcggaagcctccttcatgagttcggcctcctgggaggggagaagccccgggaggaggccccctggcccccgcccgaaggggccttcgtaggcttcctcctctcccgcaaggagcccatgtgggcggagcttctggccctggcggccgccgcagagggccgggtccaccgggcaacaagcccggttgaggccctggccgacctcaaggaggcccgggggttcctggccaaggacctggccgttttggccctgcgggagggggtggccctggaccccacggacgaccccctcctggtggcctacctcctggacccggccaacaccaaccccgagggggtggcccggcgctacgggggcgagttcacggaggacgcagcggagagggccctcctctccgagaggctcttccagaacctctttccccggctttccgagaagctcctctggctctaccaggaggtggagcggcccctctcccgggtcttggcccacatggaggcccggggggtgaggctggacgtcccccttctggaggccctctcctttgagctggagaaggagatggagcgcctggagggggaggtcttccgcttggccggccaccccttcaacctcaactcccgcgaccagctggaaagggtcctctttgacgagctgggccttaccccggtgggtcggacggagaagacgggcaagcgctccaccgcccagggggccctggaggccctccggggggcccaccccatcgtggagctcatcctccagtaccgggagctttccaagctcaaaagcacctacctggaccccctgccccggctcgtccacccgcggacgggccggcttcacacccgcttcaaccagacggccacggccacgggaaggctttccagctccgaccccaacctgcagaacatccccgtgcgcacccccttggggcagcgcatccgcaaggccttcgtggccgaggaggggtggctccttttggcggcggactactcccagatcgagcttcgggtcctggcccacctctcgggggacgagaacctgaagcgggtcttccgggaggggaaggacatccataccgaaaccgccgcctggatgttcggcttagaccccgctctagtggatccaaagatgcgccgggcggccaagacggtcaacttcggcgtcctctacgggatgtccgcccacaggctctcccaggagctcggcatagactacaaggaggcggaggcctttattgagcgctacttccagagcttccccaaggtgcgggcctggatagaaaggaccctggaggagggccggacgcggggctacgtggagaccctgttcggcaggaggcgctatgtgcccgacctggtctcccgggtccgctcggtgcgggaggcggcggagcggatggccttcaacatgcccgtgcagggcaccgccgccgacctgatgaagatcgccatggtcaagctcttccccaggctaaagcccctgggggcccacctcctcctccaggtgcacgacgagctggtcctggaggtgcccgaggaccgggccgaggaggccaaggccctggtcaaggaggtcatggagaacacctaccccttggacgtgcccctcgaggtggaggtgggcgtgggtcgggactggctggaggcgaagggggattgaagcggtcgac

SEQ ID NO: 2860 - DNA, 2605 bp, Artificial Sequence
  Description of Artificial Sequence: Synthetic DNA sequence of Thermus Rt41A DNA Polymerase S766A
atgaaatacctgctgccgaccgctgctgctggtctgctgctcctcgctgcccagccggcgatggccatggatatcggaattaattcggatccgaattccccactttttgacctggaggaaccccccaagcgggtgcttctggtggacggccaccacctggcctaccgcaccttctacgccctgagcctcaccacctcccggggggagccggtgcagatggtctacggcttcgcccggagcctcctcaaggccttgaaggaggacgggcaggcggtggtcgtggtctttgacgccaaggccccctccttccgccacgaggcctacgaggcctacaaggcgggccgggcccccaccccggaggacttcccccgccagctcgccttggtcaagcggctggtggaccttctgggcctggtccgcctcgaggccccgggttacgaggcggacgacgtcctgggcaccctggccaagaaggccgaaagggaggggatggaggtgcgcatcctcacgggagaccgggacttcttccagctcctctccgagaaggtctcggtcctcctgccggacgggaccctggtcaccccaaaggacgtccaggagaagtacggggtgccgccggagcgctgggtggacttccgcgccctcacgggggaccgctcggacaacatccccggggtggcggggataggggagaagaccgcccttcgactcctcgcggagtgggggagcgtggagaacctcctgaagaacctggaccgggtgaagccggactcggtccggcgcaagatagaggcgcaccttgaggacctccgcctctccttggacctggcccgcatccgcaccgacctccccttggaggtggactttaaggccctgcgccgcaggacccccgacctggagggcctgagggcctttttggaggagctggagttcggaagcctccttcatgagttcggcctcctgggaggggagaagccccgggaggaggccccctggcccccgcccgaaggggccttcgtaggcttcctcctctcccgcaaggagcccatgtgggcggagcttctggccctggcggccgccgcagagggccgggtccaccgggcaacaagcccggttgaggccctggccgacctcaaggaggcccgggggttcctggccaaggacctggccgttttggccctgcgggagggggtggccctggaccccacggacgaccccctcctggtggcctacctcctggacccggccaacaccaaccccgagggggtggcccggcgctacgggggcgagttcacggaggacgcagcggagagggccctcctctccgagaggctcttccagaacctctttccccggctttccgagaagctcctctggctctaccaggaggtggagcggcccctctcccgggtcttggcccacatggaggcccggggggtgaggctggacgtcccccttctggaggccctctcctttgagctggagaaggagatggagcgcctggagggggaggtcttccgcttggccggccaccccttcaacctcaactcccgcgaccagctggaaagggtcctctttgacgagctgggccttaccccggtgggtcggacggagaagacgggcaagcgctccaccgcccagggggccctggaggccctccggggggcccaccccatcgtggagctcatcctccagtaccgggagctttccaagctcaaaagcacctacctggaccccctgccccggctcgtccacccgcggacgggccggcttcacacccgcttcaaccagacggccacggccacgggaaggctttccagctccgaccccaacctgcagaacatccccgtgcgcacccccttggggcagcgcatccgcaaggccttcgtggccgaggaggggtggctccttttggcggcggactactcccagatcgagcttcgggtcctggcccacctctcgggggacgagaacctgaagcgggtcttccgggaggggaaggacatccataccgaaaccgccgcctggatgttcggcttagaccccgctctagtggatccaaagatgcgccgggcggccaagacggtcaacttcggcgtcctctacgggatgtccgcccacaggctctcccaggagctcggcatagactacaaggaggcggaggcctttattgagcgctacttccagagcttccccaaggtgcgggcctggatagaaaggaccctggaggagggccggacgcggggctacgtggagaccctgttcggcaggaggcgctatgtgcccgacctggccgctcgggtccgctcggtgcgggaggcggcggagcggatggccttcaacatgcccgtgcagggcaccgccgccgacctgatgaagatcgccatggtcaagctcttccccaggctaaagcccctgggggcccacctcctcctccaggtgcacgacgagctggtcctggaggtgcccgaggaccgggccgaggaggccaaggccctggtcaaggaggtcatggagaacacctaccccttggacgtgcccctcgaggtggaggtgggcgtgggtcgggactggctggaggcgaagggggattgaagcggtcgac

SEQ ID NO: 2861 - DNA, 2605 bp, Artificial Sequence
  Description of Artificial Sequence: Synthetic DNA sequence of Thermus Rt41A DNA Polymerase S766R
atgaaatacctgctgccgaccgctgctgctggtctgctgctcctcgctgcccagccggcgatggccatggatatcggaattaattcggatccgaattccccactttttgacctggaggaaccccccaagcgggtgcttctggtggacggccaccacctggcctaccgcaccttctacgccctgagcctcaccacctcccggggggagccggtgcagatggtctacggcttcgcccggagcctcctcaaggccttgaaggaggacgggcaggcggtggtcgtggtctttgacgccaaggccccctccttccgccacgaggcctacgaggcctacaaggcgggccgggcccccaccccggaggacttcccccgccagctcgccttggtcaagcggctggtggaccttctgggcctggtccgcctcgaggccccgggttacgaggcggacgacgtcctgggcaccctggccaagaaggccgaaagggaggggatggaggtgcgcatcctcacgggagaccgggacttcttccagctcctctccgagaaggtctcggtcctcctgccggacgggaccctggtcaccccaaaggacgtccaggagaagtacggggtgccgccggagcgctgggtggacttccgcgccctcacgggggaccgctcggacaacatccccggggtggcggggataggggagaagaccgcccttcgactcctcgcggagtgggggagcgtggagaacctcctgaagaacctggaccgggtgaagccggactcggtccggcgcaagatagaggcgcaccttgaggacctccgcctctccttggacctggcccgcatccgcaccgacctccccttggaggtggactttaaggccctgcgccgcaggacccccgacctggagggcctgagggcctttttggaggagctggagttcggaagcctccttcatgagttcggcctcctgggaggggagaagccccgggaggaggccccctggcccccgcccgaaggggccttcgtaggcttcctcctctcccgcaaggagcccatgtgggcggagcttctggccctggcggccgccgcagagggccgggtccaccgggcaacaagcccggttgaggccctggccgacctcaaggaggcccgggggttcctggccaaggacctggccgttttggccctgcgggagggggtggccctggaccccacggacgaccccctcctggtggcctacctcctggacccggccaacaccaaccccgagggggtggcccggcgctacgggggcgagttcacggaggacgcagcggagagggccctcctctccgagaggctcttccagaacctctttccccggctttccgagaagctcctctggctctaccaggaggtggagcggcccctctcccgggtcttggcccacatggaggcccggggggtgaggctggacgtcccccttctggaggccctctcctttgagctggagaaggagatggagcgcctggagggggaggtcttccgcttggccggccaccccttcaacctcaactcccgcgaccagctggaaagggtcctctttgacgagctgggccttaccccggtgggtcggacggagaagacgggcaagcgctccaccgcccagggggccctggaggccctccggggggcccaccccatcgtggagctcatcctccagtaccgggagctttccaagctcaaaagcacctacctggaccccctgccccggctcgtccacccgcggacgggccggcttcacacccgcttcaaccagacggccacggccacgggaaggctttccagctccgaccccaacctgcagaacatccccgtgcgcacccccttggggcagcgcatccgcaaggccttcgtggccgaggaggggtggctccttttggcggcggactactcccagatcgagcttcgggtcctggcccacctctcgggggacgagaacctgaagcgggtcttccgggaggggaaggacatccataccgaaaccgccgcctggatgttcggcttagaccccgctctagtggatccaaagatgcgccgggcggccaagacggtcaacttcggcgtcctctacgggatgtccgcccacaggctctcccaggagctcggcatagactacaaggaggcggaggcctttattgagcgctacttccagagcttccccaaggtgcgggcctggatagaaaggaccctggaggagggccggacgcggggctacgtggagaccctgttcggcaggaggcgctatgtgcccgacctggcccgacgggtccgctcggtgcgggaggcggcggagcggatggccttcaacatgcccgtgcagggcaccgccgccgacctgatgaagatcgccatggtcaagctcttccccaggctaaagcccctgggggcccacctcctcctccaggtgcacgacgagctggtcctggaggtgcccgaggaccgggccgaggaggccaaggccctggtcaaggaggtcatggagaacacctaccccttggacgtgcccctcgaggtggaggtgggcgtgggtcgggactggctggaggcgaagggggattgaagcggtcgac

SEQ ID NO: 2862 - DNA, 2605 bp, Artificial Sequence
  Description of Artificial Sequence: Synthetic DNA sequence of Thermus Rt41A DNA Polymerase S766C
atgaaatacctgctgccgaccgctgctgctggtctgctgctcctcgctgcccagccggcgatggccatggatatcggaattaattcggatccgaattccccactttttgacctggaggaaccccccaagcgggtgcttctggtggacggccaccacctggcctaccgcaccttctacgccctgagcctcaccacctcccggggggagccggtgcagatggtctacggcttcgcccggagcctcctcaaggccttgaaggaggacgggcaggcggtggtcgtggtctttgacgccaaggccccctccttccgccacgaggcctacgaggcctacaaggcgggccgggcccccaccccggaggacttcccccgccagctcgccttggtcaagcggctggtggaccttctgggcctggtccgcctcgaggccccgggttacgaggcggacgacgtcctgggcaccctggccaagaaggccgaaagggaggggatggaggtgcgcatcctcacgggagaccgggacttcttccagctcctctccgagaaggtctcggtcctcctgccggacgggaccctggtcaccccaaaggacgtccaggagaagtacggggtgccgccggagcgctgggtggacttccgcgccctcacgggggaccgctcggacaacatccccggggtggcggggataggggagaagaccgcccttcgactcctcgcggagtgggggagcgtggagaacctcctgaagaacctggaccgggtgaagccggactcggtccggcgcaagatagaggcgcaccttgaggacctccgcctctccttggacctggcccgcatccgcaccgacctccccttggaggtggactttaaggccctgcgccgcaggacccccgacctggagggcctgagggcctttttggaggagctggagttcggaagcctccttcatgagttcggcctcctgggaggggagaagccccgggaggaggccccctggcccccgcccgaaggggccttcgtaggcttcctcctctcccgcaaggagcccatgtgggcggagcttctggccctggcggccgccgcagagggccgggtccaccgggcaacaagcccggttgaggccctggccgacctcaaggaggcccgggggttcctggccaaggacctggccgttttggccctgcgggagggggtggccctggaccccacggacgaccccctcctggtggcctacctcctggacccggccaacaccaaccccgagggggtggcccggcgctacgggggcgagttcacggaggacgcagcggagagggccctcctctccgagaggctcttccagaacctctttccccggctttccgagaagctcctctggctctaccaggaggtggagcggcccctctcccgggtcttggcccacatggaggcccggggggtgaggctggacgtcccccttctggaggccctctcctttgagctggagaaggagatggagcgcctggagggggaggtcttccgcttggccggccaccccttcaacctcaactcccgcgaccagctggaaagggtcctctttgacgagctgggccttaccccggtgggtcggacggagaagacgggcaagcgctccaccgcccagggggccctggaggccctccggggggcccaccccatcgtggagctcatcctccagtaccgggagctttccaagctcaaaagcacctacctggaccccctgccccggctcgtccacccgcggacgggccggcttcacacccgcttcaaccagacggccacggccacgggaaggctttccagctccgaccccaacctgcagaacatccccgtgcgcacccccttggggcagcgcatccgcaaggccttcgtggccgaggaggggtggctccttttggcggcggactactcccagatcgagcttcgggtcctggcccacctctcgggggacgagaacctgaagcgggtcttccgggaggggaaggacatccataccgaaaccgccgcctggatgttcggcttagaccccgctctagtggatccaaagatgcgccgggcggccaagacggtcaacttcggcgtcctctacgggatgtccgcccacaggctctcccaggagctcggcatagactacaaggaggcggaggcctttattgagcgctacttccagagcttccccaaggtgcgggcctggatagaaaggaccctggaggagggccggacgcggggctacgtggagaccctgttcggcaggaggcgctatgtgcccgacctggcctgtcgggtccgctcggtgcgggaggcggcggagcggatggccttcaacatgcccgtgcagggcaccgccgccgacctgatgaagatcgccatggtcaagctcttccccaggctaaagcccctgggggcccacctcctcctccaggtgcacgacgagctggtcctggaggtgcccgaggaccgggccgaggaggccaaggccctggtcaaggaggtcatggagaacacctaccccttggacgtgcccctcgaggtggaggtgggcgtgggtcgggactggctggaggcgaagggggattgaagcggtcgac

SEQ ID NO: 2863 - DNA, 2605 bp, Artificial Sequence
  Description of Artificial Sequence: Synthetic DNA sequence of Thermus Rt41A DNA Polymerase S766G
atgaaatacctgctgccgaccgctgctgctggtctgctgctcctcgctgcccagccggcgatggccatggatatcggaattaattcggatccgaattccccactttttgacctggaggaaccccccaagcgggtgcttctggtggacggccaccacctggcctaccgcaccttctacgccctgagcctcaccacctcccggggggagccggtgcagatggtctacggcttcgcccggagcctcctcaaggccttgaaggaggacgggcaggcggtggtcgtggtctttgacgccaaggccccctccttccgccacgaggcctacgaggcctacaaggcgggccgggcccccaccccggaggacttcccccgccagctcgccttggtcaagcggctggtggaccttctgggcctggtccgcctcgaggccccgggttacgaggcggacgacgtcctgggcaccctggccaagaaggccgaaagggaggggatggaggtgcgcatcctcacgggagaccgggacttcttccagctcctctccgagaaggtctcggtcctcctgccggacgggaccctggtcaccccaaaggacgtccaggagaagtacggggtgccgccggagcgctgggtggacttccgcgccctcacgggggaccgctcggacaacatccccggggtggcggggataggggagaagaccgcccttcgactcctcgcggagtgggggagcgtggagaacctcctgaagaacctggaccgggtgaagccggactcggtccggcgcaagatagaggcgcaccttgaggacctccgcctctccttggacctggcccgcatccgcaccgacctccccttggaggtggactttaaggccctgcgccgcaggacccccgacctggagggcctgagggcctttttggaggagctggagttcggaagcctccttcatgagttcggcctcctgggaggggagaagccccgggaggaggccccctggcccccgcccgaaggggccttcgtaggcttcctcctctcccgcaaggagcccatgtgggcggagcttctggccctggcggccgccgcagagggccgggtccaccgggcaacaagcccggttgaggccctggccgacctcaaggaggcccgggggttcctggccaaggacctggccgttttggccctgcgggagggggtggccctggaccccacggacgaccccctcctggtggcctacctcctggacccggccaacaccaaccccgagggggtggcccggcgctacgggggcgagttcacggaggacgcagcggagagggccctcctctccgagaggctcttccagaacctctttccccggctttccgagaagctcctctggctctaccaggaggtggagcggcccctctcccgggtcttggcccacatggaggcccggggggtgaggctggacgtcccccttctggaggccctctcctttgagctggagaaggagatggagcgcctggagggggaggtcttccgcttggccggccaccccttcaacctcaactcccgcgaccagctggaaagggtcctctttgacgagctgggccttaccccggtgggtcggacggagaagacgggcaagcgctccaccgcccagggggccctggaggccctccggggggcccaccccatcgtggagctcatcctccagtaccgggagctttccaagctcaaaagcacctacctggaccccctgccccggctcgtccacccgcggacgggccggcttcacacccgcttcaaccagacggccacggccacgggaaggctttccagctccgaccccaacctgcagaacatccccgtgcgcacccccttggggcagcgcatccgcaaggccttcgtggccgaggaggggtggctccttttggcggcggactactcccagatcgagcttcgggtcctggcccacctctcgggggacgagaacctgaagcgggtcttccgggaggggaaggacatccataccgaaaccgccgcctggatgttcggcttagaccccgctctagtggatccaaagatgcgccgggcggccaagacggtcaacttcggcgtcctctacgggatgtccgcccacaggctctcccaggagctcggcatagactacaaggaggcggaggcctttattgagcgctacttccagagcttccccaaggtgcgggcctggatagaaaggaccctggaggagggccggacgcggggctacgtggagaccctgttcggcaggaggcgctatgtgcccgacctggccggtcgggtccgctcggtgcgggaggcggcggagcggatggccttcaacatgcccgtgcagggcaccgccgccgacctgatgaagatcgccatggtcaagctcttccccaggctaaagcccctgggggcccacctcctcctccaggtgcacgacgagctggtcctggaggtgcccgaggaccgggccgaggaggccaaggccctggtcaaggaggtcatggagaacacctaccccttggacgtgcccctcgaggtggaggtgggcgtgggtcgggactggctggaggcgaagggggattgaagcggtcgac

SEQ ID NO: 2864 - DNA, 2605 bp, Artificial Sequence
  Description of Artificial Sequence: Synthetic DNA sequence of Thermus Rt41A DNA Polymerase S766Q
atgaaatacctgctgccgaccgctgctgctggtctgctgctcctcgctgcccagccggcgatggccatggatatcggaattaattcggatccgaattccccactttttgacctggaggaaccccccaagcgggtgcttctggtggacggccaccacctggcctaccgcaccttctacgccctgagcctcaccacctcccggggggagccggtgcagatggtctacggcttcgcccggagcctcctcaaggccttgaaggaggacgggcaggcggtggtcgtggtctttgacgccaaggccccctccttccgccacgaggcctacgaggcctacaaggcgggccgggcccccaccccggaggacttcccccgccagctcgccttggtcaagcggctggtggaccttctgggcctggtccgcctcgaggccccgggttacgaggcggacgacgtcctgggcaccctggccaagaaggccgaaagggaggggatggaggtgcgcatcctcacgggagaccgggacttcttccagctcctctccgagaaggtctcggtcctcctgccggacgggaccctggtcaccccaaaggacgtccaggagaagtacggggtgccgccggagcgctgggtggacttccgcgccctcacgggggaccgctcggacaacatccccggggtggcggggataggggagaagaccgcccttcgactcctcgcggagtgggggagcgtggagaacctcctgaagaacctggaccgggtgaagccggactcggtccggcgcaagatagaggcgcaccttgaggacctccgcctctccttggacctggcccgcatccgcaccgacctccccttggaggtggactttaaggccctgcgccgcaggacccccgacctggagggcctgagggcctttttggaggagctggagttcggaagcctccttcatgagttcggcctcctgggaggggagaagccccgggaggaggccccctggcccccgcccgaaggggccttcgtaggcttcctcctctcccgcaaggagcccatgtgggcggagcttctggccctggcggccgccgcagagggccgggtccaccgggcaacaagcccggttgaggccctggccgacctcaaggaggcccgggggttcctggccaaggacctggccgttttggccctgcgggagggggtggccctggaccccacggacgaccccctcctggtggcctacctcctggacccggccaacaccaaccccgagggggtggcccggcgctacgggggcgagttcacggaggacgcagcggagagggccctcctctccgagaggctcttccagaacctctttccccggctttccgagaagctcctctggctctaccaggaggtggagcggcccctctcccgggtcttggcccacatggaggcccggggggtgaggctggacgtcccccttctggaggccctctcctttgagctggagaaggagatggagcgcctggagggggaggtcttccgcttggccggccaccccttcaacctcaactcccgcgaccagctggaaagggtcctctttgacgagctgggccttaccccggtgggtcggacggagaagacgggcaagcgctccaccgcccagggggccctggaggccctccggggggcccaccccatcgtggagctcatcctccagtaccgggagctttccaagctcaaaagcacctacctggaccccctgccccggctcgtccacccgcggacgggccggcttcacacccgcttcaaccagacggccacggccacgggaaggctttccagctccgaccccaacctgcagaacatccccgtgcgcacccccttggggcagcgcatccgcaaggccttcgtggccgaggaggggtggctccttttggcggcggactactcccagatcgagcttcgggtcctggcccacctctcgggggacgagaacctgaagcgggtcttccgggaggggaaggacatccataccgaaaccgccgcctggatgttcggcttagaccccgctctagtggatccaaagatgcgccgggcggccaagacggtcaacttcggcgtcctctacgggatgtccgcccacaggctctcccaggagctcggcatagactacaaggaggcggaggcctttattgagcgctacttccagagcttccccaaggtgcgggcctggatagaaaggaccctggaggagggccggacgcggggctacgtggagaccctgttcggcaggaggcgctatgtgcccgacctggcccaacgggtccgctcggtgcgggaggcggcggagcggatggccttcaacatgcccgtgcagggcaccgccgccgacctgatgaagatcgccatggtcaagctcttccccaggctaaagcccctgggggcccacctcctcctccaggtgcacgacgagctggtcctggaggtgcccgaggaccgggccgaggaggccaaggccctggtcaaggaggtcatggagaacacctaccccttggacgtgcccctcgaggtggaggtgggcgtgggtcgggactggctggaggcgaagggggattgaagcggtcgac

SEQ ID NO: 2865 - DNA, 2605 bp, Artificial Sequence
  Description of Artificial Sequence: Synthetic DNA sequence of Thermus Rt41A DNA Polymerase S766H
atgaaatacctgctgccgaccgctgctgctggtctgctgctcctcgctgcccagccggcgatggccatggatatcggaattaattcggatccgaattccccactttttgacctggaggaaccccccaagcgggtgcttctggtggacggccaccacctggcctaccgcaccttctacgccctgagcctcaccacctcccggggggagccggtgcagatggtctacggcttcgcccggagcctcctcaaggccttgaaggaggacgggcaggcggtggtcgtggtctttgacgccaaggccccctccttccgccacgaggcctacgaggcctacaaggcgggccgggcccccaccccggaggacttcccccgccagctcgccttggtcaagcggctggtggaccttctgggcctggtccgcctcgaggccccgggttacgaggcggacgacgtcctgggcaccctggccaagaaggccgaaagggaggggatggaggtgcgcatcctcacgggagaccgggacttcttccagctcctctccgagaaggtctcggtcctcctgccggacgggaccctggtcaccccaaaggacgtccaggagaagtacggggtgccgccggagcgctgggtggacttccgcgccctcacgggggaccgctcggacaacatccccggggtggcggggataggggagaagaccgcccttcgactcctcgcggagtgggggagcgtggagaacctcctgaagaacctggaccgggtgaagccggactcggtccggcgcaagatagaggcgcaccttgaggacctccgcctctccttggacctggcccgcatccgcaccgacctccccttggaggtggactttaaggccctgcgccgcaggacccccgacctggagggcctgagggcctttttggaggagctggagttcggaagcctccttcatgagttcggcctcctgggaggggagaagccccgggaggaggccccctggcccccgcccgaaggggccttcgtaggcttcctcctctcccgcaaggagcccatgtgggcggagcttctggccctggcggccgccgcagagggccgggtccaccgggcaacaagcccggttgaggccctggccgacctcaaggaggcccgggggttcctggccaaggacctggccgttttggccctgcgggagggggtggccctggaccccacggacgaccccctcctggtggcctacctcctggacccggccaacaccaaccccgagggggtggcccggcgctacgggggcgagttcacggaggacgcagcggagagggccctcctctccgagaggctcttccagaacctctttccccggctttccgagaagctcctctggctctaccaggaggtggagcggcccctctcccgggtcttggcccacatggaggcccggggggtgaggctggacgtcccccttctggaggccctctcctttgagctggagaaggagatggagcgcctggagggggaggtcttccgcttggccggccaccccttcaacctcaactcccgcgaccagctggaaagggtcctctttgacgagctgggccttaccccggtgggtcggacggagaagacgggcaagcgctccaccgcccagggggccctggaggccctccggggggcccaccccatcgtggagctcatcctccagtaccgggagctttccaagctcaaaagcacctacctggaccccctgccccggctcgtccacccgcggacgggccggcttcacacccgcttcaaccagacggccacggccacgggaaggctttccagctccgaccccaacctgcagaacatccccgtgcgcacccccttggggcagcgcatccgcaaggccttcgtggccgaggaggggtggctccttttggcggcggactactcccagatcgagcttcgggtcctggcccacctctcgggggacgagaacctgaagcgggtcttccgggaggggaaggacatccataccgaaaccgccgcctggatgttcggcttagaccccgctctagtggatccaaagatgcgccgggcggccaagacggtcaacttcggcgtcctctacgggatgtccgcccacaggctctcccaggagctcggcatagactacaaggaggcggaggcctttattgagcgctacttccagagcttccccaaggtgcgggcctggatagaaaggaccctggaggagggccggacgcggggctacgtggagaccctgttcggcaggaggcgctatgtgcccgacctggcccatcgggtccgctcggtgcgggaggcggcggagcggatggccttcaacatgcccgtgcagggcaccgccgccgacctgatgaagatcgccatggtcaagctcttccccaggctaaagcccctgggggcccacctcctcctccaggtgcacgacgagctggtcctggaggtgcccgaggaccgggccgaggaggccaaggccctggtcaaggaggtcatggagaacacctaccccttggacgtgcccctcgaggtggaggtgggcgtgggtcgggactggctggaggcgaagggggattgaagcggtcgac

SEQ ID NO: 2866 - DNA, 2605 bp, Artificial Sequence
  Description of Artificial Sequence: Synthetic DNA sequence of Thermus Rt41A DNA Polymerase S766I
atgaaatacctgctgccgaccgctgctgctggtctgctgctcctcgctgcccagccggcgatggccatggatatcggaattaattcggatccgaattccccactttttgacctggaggaaccccccaagcgggtgcttctggtggacggccaccacctggcctaccgcaccttctacgccctgagcctcaccacctcccggggggagccggtgcagatggtctacggcttcgcccggagcctcctcaaggccttgaaggaggacgggcaggcggtggtcgtggtctttgacgccaaggccccctccttccgccacgaggcctacgaggcctacaaggcgggccgggcccccaccccggaggacttcccccgccagctcgccttggtcaagcggctggtggaccttctgggcctggtccgcctcgaggccccgggttacgaggcggacgacgtcctgggcaccctggccaagaaggccgaaagggaggggatggaggtgcgcatcctcacgggagaccgggacttcttccagctcctctccgagaaggtctcggtcctcctgccggacgggaccctggtcaccccaaaggacgtccaggagaagtacggggtgccgccggagcgctgggtggacttccgcgccctcacgggggaccgctcggacaacatccccggggtggcggggataggggagaagaccgcccttcgactcctcgcggagtgggggagcgtggagaacctcctgaagaacctggaccgggtgaagccggactcggtccggcgcaagatagaggcgcaccttgaggacctccgcctctccttggacctggcccgcatccgcaccgacctccccttggaggtggactttaaggccctgcgccgcaggacccccgacctggagggcctgagggcctttttggaggagctggagttcggaagcctccttcatgagttcggcctcctgggaggggagaagccccgggaggaggccccctggcccccgcccgaaggggccttcgtaggcttcctcctctcccgcaaggagcccatgtgggcggagcttctggccctggcggccgccgcagagggccgggtccaccgggcaacaagcccggttgaggccctggccgacctcaaggaggcccgggggttcctggccaaggacctggccgttttggccctgcgggagggggtggccctggaccccacggacgaccccctcctggtggcctacctcctggacccggccaacaccaaccccgagggggtggcccggcgctacgggggcgagttcacggaggacgcagcggagagggccctcctctccgagaggctcttccagaacctctttccccggctttccgagaagctcctctggctctaccaggaggtggagcggcccctctcccgggtcttggcccacatggaggcccggggggtgaggctggacgtcccccttctggaggccctctcctttgagctggagaaggagatggagcgcctggagggggaggtcttccgcttggccggccaccccttcaacctcaactcccgcgaccagctggaaagggtcctctttgacgagctgggccttaccccggtgggtcggacggagaagacgggcaagcgctccaccgcccagggggccctggaggccctccggggggcccaccccatcgtggagctcatcctccagtaccgggagctttccaagctcaaaagcacctacctggaccccctgccccggctcgtccacccgcggacgggccggcttcacacccgcttcaaccagacggccacggccacgggaaggctttccagctccgaccccaacctgcagaacatccccgtgcgcacccccttggggcagcgcatccgcaaggccttcgtggccgaggaggggtggctccttttggcggcggactactcccagatcgagcttcgggtcctggcccacctctcgggggacgagaacctgaagcgggtcttccgggaggggaaggacatccataccgaaaccgccgcctggatgttcggcttagaccccgctctagtggatccaaagatgcgccgggcggccaagacggtcaacttcggcgtcctctacgggatgtccgcccacaggctctcccaggagctcggcatagactacaaggaggcggaggcctttattgagcgctacttccagagcttccccaaggtgcgggcctggatagaaaggaccctggaggagggccggacgcggggctacgtggagaccctgttcggcaggaggcgctatgtgcccgacctggccattcgggtccgctcggtgcgggaggcggcggagcggatggccttcaacatgcccgtgcagggcaccgccgccgacctgatgaagatcgccatggtcaagctcttccccaggctaaagcccctgggggcccacctcctcctccaggtgcacgacgagctggtcctggaggtgcccgaggaccgggccgaggaggccaaggccctggtcaaggaggtcatggagaacacctaccccttggacgtgcccctcgaggtggaggtgggcgtgggtcgggactggctggaggcgaagggggattgaagcggtcgac

SEQ ID NO: 2867 - DNA, 2605 bp, Artificial Sequence
  Description of Artificial Sequence: Synthetic DNA sequence of Thermus Rt41A DNA Polymerase S766L
atgaaatacctgctgccgaccgctgctgctggtctgctgctcctcgctgcccagccggcgatggccatggatatcggaattaattcggatccgaattccccactttttgacctggaggaaccccccaagcgggtgcttctggtggacggccaccacctggcctaccgcaccttctacgccctgagcctcaccacctcccggggggagccggtgcagatggtctacggcttcgcccggagcctcctcaaggccttgaaggaggacgggcaggcggtggtcgtggtctttgacgccaaggccccctccttccgccacgaggcctacgaggcctacaaggcgggccgggcccccaccccggaggacttcccccgccagctcgccttggtcaagcggctggtggaccttctgggcctggtccgcctcgaggccccgggttacgaggcggacgacgtcctgggcaccctggccaagaaggccgaaagggaggggatggaggtgcgcatcctcacgggagaccgggacttcttccagctcctctccgagaaggtctcggtcctcctgccggacgggaccctggtcaccccaaaggacgtccaggagaagtacggggtgccgccggagcgctgggtggacttccgcgccctcacgggggaccgctcggacaacatccccggggtggcggggataggggagaagaccgcccttcgactcctcgcggagtgggggagcgtggagaacctcctgaagaacctggaccgggtgaagccggactcggtccggcgcaagatagaggcgcaccttgaggacctccgcctctccttggacctggcccgcatccgcaccgacctccccttggaggtggactttaaggccctgcgccgcaggacccccgacctggagggcctgagggcctttttggaggagctggagttcggaagcctccttcatgagttcggcctcctgggaggggagaagccccgggaggaggccccctggcccccgcccgaaggggccttcgtaggcttcctcctctcccgcaaggagcccatgtgggcggagcttctggccctggcggccgccgcagagggccgggtccaccgggcaacaagcccggttgaggccctggccgacctcaaggaggcccgggggttcctggccaaggacctggccgttttggccctgcgggagggggtggccctggaccccacggacgaccccctcctggtggcctacctcctggacccggccaacaccaaccccgagggggtggcccggcgctacgggggcgagttcacggaggacgcagcggagagggccctcctctccgagaggctcttccagaacctctttccccggctttccgagaagctcctctggctctaccaggaggtggagcggcccctctcccgggtcttggcccacatggaggcccggggggtgaggctggacgtcccccttctggaggccctctcctttgagctggagaaggagatggagcgcctggagggggaggtcttccgcttggccggccaccccttcaacctcaactcccgcgaccagctggaaagggtcctctttgacgagctgggccttaccccggtgggtcggacggagaagacgggcaagcgctccaccgcccagggggccctggaggccctccggggggcccaccccatcgtggagctcatcctccagtaccgggagctttccaagctcaaaagcacctacctggaccccctgccccggctcgtccacccgcggacgggccggcttcacacccgcttcaaccagacggccacggccacgggaaggctttccagctccgaccccaacctgcagaacatccccgtgcgcacccccttggggcagcgcatccgcaaggccttcgtggccgaggaggggtggctccttttggcggcggactactcccagatcgagcttcgggtcctggcccacctctcgggggacgagaacctgaagcgggtcttccgggaggggaaggacatccataccgaaaccgccgcctggatgttcggcttagaccccgctctagtggatccaaagatgcgccgggcggccaagacggtcaacttcggcgtcctctacgggatgtccgcccacaggctctcccaggagctcggcatagactacaaggaggcggaggcctttattgagcgctacttccagagcttccccaaggtgcgggcctggatagaaaggaccctggaggagggccggacgcggggctacgtggagaccctgttcggcaggaggcgctatgtgcccgacctggccttacgggtccgctcggtgcgggaggcggcggagcggatggccttcaacatgcccgtgcagggcaccgccgccgacctgatgaagatcgccatggtcaagctcttccccaggctaaagcccctgggggcccacctcctcctccaggtgcacgacgagctggtcctggaggtgcccgaggaccgggccgaggaggccaaggccctggtcaaggaggtcatggagaacacctaccccttggacgtgcccctcgaggtggaggtgggcgtgggtcgggactggctggaggcgaagggggattgaagcggtcgac

SEQ ID NO: 2868 - DNA, 2605 bp, Artificial Sequence
  Description of Artificial Sequence: Synthetic DNA sequence of Thermus Rt41A DNA Polymerase S766K
atgaaatacctgctgccgaccgctgctgctggtctgctgctcctcgctgcccagccggcgatggccatggatatcggaattaattcggatccgaattccccactttttgacctggaggaaccccccaagcgggtgcttctggtggacggccaccacctggcctaccgcaccttctacgccctgagcctcaccacctcccggggggagccggtgcagatggtctacggcttcgcccggagcctcctcaaggccttgaaggaggacgggcaggcggtggtcgtggtctttgacgccaaggccccctccttccgccacgaggcctacgaggcctacaaggcgggccgggcccccaccccggaggacttcccccgccagctcgccttggtcaagcggctggtggaccttctgggcctggtccgcctcgaggccccgggttacgaggcggacgacgtcctgggcaccctggccaagaaggccgaaagggaggggatggaggtgcgcatcctcacgggagaccgggacttcttccagctcctctccgagaaggtctcggtcctcctgccggacgggaccctggtcaccccaaaggacgtccaggagaagtacggggtgccgccggagcgctgggtggacttccgcgccctcacgggggaccgctcggacaacatccccggggtggcggggataggggagaagaccgcccttcgactcctcgcggagtgggggagcgtggagaacctcctgaagaacctggaccgggtgaagccggactcggtccggcgcaagatagaggcgcaccttgaggacctccgcctctccttggacctggcccgcatccgcaccgacctccccttggaggtggactttaaggccctgcgccgcaggacccccgacctggagggcctgagggcctttttggaggagctggagttcggaagcctccttcatgagttcggcctcctgggaggggagaagccccgggaggaggccccctggcccccgcccgaaggggccttcgtaggcttcctcctctcccgcaaggagcccatgtgggcggagcttctggccctggcggccgccgcagagggccgggtccaccgggcaacaagcccggttgaggccctggccgacctcaaggaggcccgggggttcctggccaaggacctggccgttttggccctgcgggagggggtggccctggaccccacggacgaccccctcctggtggcctacctcctggacccggccaacaccaaccccgagggggtggcccggcgctacgggggcgagttcacggaggacgcagcggagagggccctcctctccgagaggctcttccagaacctctttccccggctttccgagaagctcctctggctctaccaggaggtggagcggcccctctcccgggtcttggcccacatggaggcccggggggtgaggctggacgtcccccttctggaggccctctcctttgagctggagaaggagatggagcgcctggagggggaggtcttccgcttggccggccaccccttcaacctcaactcccgcgaccagctggaaagggtcctctttgacgagctgggccttaccccggtgggtcggacggagaagacgggcaagcgctccaccgcccagggggccctggaggccctccggggggcccaccccatcgtggagctcatcctccagtaccgggagctttccaagctcaaaagcacctacctggaccccctgccccggctcgtccacccgcggacgggccggcttcacacccgcttcaaccagacggccacggccacgggaaggctttccagctccgaccccaacctgcagaacatccccgtgcgcacccccttggggcagcgcatccgcaaggccttcgtggccgaggaggggtggctccttttggcggcggactactcccagatcgagcttcgggtcctggcccacctctcgggggacgagaacctgaagcgggtcttccgggaggggaaggacatccataccgaaaccgccgcctggatgttcggcttagaccccgctctagtggatccaaagatgcgccgggcggccaagacggtcaacttcggcgtcctctacgggatgtccgcccacaggctctcccaggagctcggcatagactacaaggaggcggaggcctttattgagcgctacttccagagcttccccaaggtgcgggcctggatagaaaggaccctggaggagggccggacgcggggctacgtggagaccctgttcggcaggaggcgctatgtgcccgacctggccaaacgggtccgctcggtgcgggaggcggcggagcggatggccttcaacatgcccgtgcagggcaccgccgccgacctgatgaagatcgccatggtcaagctcttccccaggctaaagcccctgggggcccacctcctcctccaggtgcacgacgagctggtcctggaggtgcccgaggaccgggccgaggaggccaaggccctggtcaaggaggtcatggagaacacctaccccttggacgtgcccctcgaggtggaggtgggcgtgggtcgggactggctggaggcgaagggggattgaagcggtcgac

SEQ ID NO: 2869 - DNA, 2605 bp, Artificial Sequence
  Description of Artificial Sequence: Synthetic DNA sequence of Thermus Rt41A DNA Polymerase S766E
atgaaatacctgctgccgaccgctgctgctggtctgctgctcctcgctgcccagccggcgatggccatggatatcggaattaattcggatccgaattccccactttttgacctggaggaaccccccaagcgggtgcttctggtggacggccaccacctggcctaccgcaccttctacgccctgagcctcaccacctcccggggggagccggtgcagatggtctacggcttcgcccggagcctcctcaaggccttgaaggaggacgggcaggcggtggtcgtggtctttgacgccaaggccccctccttccgccacgaggcctacgaggcctacaaggcgggccgggcccccaccccggaggacttcccccgccagctcgccttggtcaagcggctggtggaccttctgggcctggtccgcctcgaggccccgggttacgaggcggacgacgtcctgggcaccctggccaagaaggccgaaagggaggggatggaggtgcgcatcctcacgggagaccgggacttcttccagctcctctccgagaaggtctcggtcctcctgccggacgggaccctggtcaccccaaaggacgtccaggagaagtacggggtgccgccggagcgctgggtggacttccgcgccctcacgggggaccgctcggacaacatccccggggtggcggggataggggagaagaccgcccttcgactcctcgcggagtgggggagcgtggagaacctcctgaagaacctggaccgggtgaagccggactcggtccggcgcaagatagaggcgcaccttgaggacctccgcctctccttggacctggcccgcatccgcaccgacctccccttggaggtggactttaaggccctgcgccgcaggacccccgacctggagggcctgagggcctttttggaggagctggagttcggaagcctccttcatgagttcggcctcctgggaggggagaagccccgggaggaggccccctggcccccgcccgaaggggccttcgtaggcttcctcctctcccgcaaggagcccatgtgggcggagcttctggccctggcggccgccgcagagggccgggtccaccgggcaacaagcccggttgaggccctggccgacctcaaggaggcccgggggttcctggccaaggacctggccgttttggccctgcgggagggggtggccctggaccccacggacgaccccctcctggtggcctacctcctggacccggccaacaccaaccccgagggggtggcccggcgctacgggggcgagttcacggaggacgcagcggagagggccctcctctccgagaggctcttccagaacctctttccccggctttccgagaagctcctctggctctaccaggaggtggagcggcccctctcccgggtcttggcccacatggaggcccggggggtgaggctggacgtcccccttctggaggccctctcctttgagctggagaaggagatggagcgcctggagggggaggtcttccgcttggccggccaccccttcaacctcaactcccgcgaccagctggaaagggtcctctttgacgagctgggccttaccccggtgggtcggacggagaagacgggcaagcgctccaccgcccagggggccctggaggccctccggggggcccaccccatcgtggagctcatcctccagtaccgggagctttccaagctcaaaagcacctacctggaccccctgccccggctcgtccacccgcggacgggccggcttcacacccgcttcaaccagacggccacggccacgggaaggctttccagctccgaccccaacctgcagaacatccccgtgcgcacccccttggggcagcgcatccgcaaggccttcgtggccgaggaggggtggctccttttggcggcggactactcccagatcgagcttcgggtcctggcccacctctcgggggacgagaacctgaagcgggtcttccgggaggggaaggacatccataccgaaaccgccgcctggatgttcggcttagaccccgctctagtggatccaaagatgcgccgggcggccaagacggtcaacttcggcgtcctctacgggatgtccgcccacaggctctcccaggagctcggcatagactacaaggaggcggaggcctttattgagcgctacttccagagcttccccaaggtgcgggcctggatagaaaggaccctggaggagggccggacgcggggctacgtggagaccctgttcggcaggaggcgctatgtgcccgacctggccgaacgggtccgctcggtgcgggaggcggcggagcggatggccttcaacatgcccgtgcagggcaccgccgccgacctgatgaagatcgccatggtcaagctcttccccaggctaaagcccctgggggcccacctcctcctccaggtgcacgacgagctggtcctggaggtgcccgaggaccgggccgaggaggccaaggccctggtcaaggaggtcatggagaacacctaccccttggacgtgcccctcgaggtggaggtgggcgtgggtcgggactggctggaggcgaagggggattgaagcggtcgac

SEQ ID NO: 2870 - DNA, 2605 bp, Artificial Sequence
  Description of Artificial Sequence: Synthetic DNA sequence of Thermus Rt41A DNA Polymerase S766D
atgaaatacctgctgccgaccgctgctgctggtctgctgctcctcgctgcccagccggcgatggccatggatatcggaattaattcggatccgaattccccactttttgacctggaggaaccccccaagcgggtgcttctggtggacggccaccacctggcctaccgcaccttctacgccctgagcctcaccacctcccggggggagccggtgcagatggtctacggcttcgcccggagcctcctcaaggccttgaaggaggacgggcaggcggtggtcgtggtctttgacgccaaggccccctccttccgccacgaggcctacgaggcctacaaggcgggccgggcccccaccccggaggacttcccccgccagctcgccttggtcaagcggctggtggaccttctgggcctggtccgcctcgaggccccgggttacgaggcggacgacgtcctgggcaccctggccaagaaggccgaaagggaggggatggaggtgcgcatcctcacgggagaccgggacttcttccagctcctctccgagaaggtctcggtcctcctgccggacgggaccctggtcaccccaaaggacgtccaggagaagtacggggtgccgccggagcgctgggtggacttccgcgccctcacgggggaccgctcggacaacatccccggggtggcggggataggggagaagaccgcccttcgactcctcgcggagtgggggagcgtggagaacctcctgaagaacctggaccgggtgaagccggactcggtccggcgcaagatagaggcgcaccttgaggacctccgcctctccttggacctggcccgcatccgcaccgacctccccttggaggtggactttaaggccctgcgccgcaggacccccgacctggagggcctgagggcctttttggaggagctggagttcggaagcctccttcatgagttcggcctcctgggaggggagaagccccgggaggaggccccctggcccccgcccgaaggggccttcgtaggcttcctcctctcccgcaaggagcccatgtgggcggagcttctggccctggcggccgccgcagagggccgggtccaccgggcaacaagcccggttgaggccctggccgacctcaaggaggcccgggggttcctggccaaggacctggccgttttggccctgcgggagggggtggccctggaccccacggacgaccccctcctggtggcctacctcctggacccggccaacaccaaccccgagggggtggcccggcgctacgggggcgagttcacggaggacgcagcggagagggccctcctctccgagaggctcttccagaacctctttccccggctttccgagaagctcctctggctctaccaggaggtggagcggcccctctcccgggtcttggcccacatggaggcccggggggtgaggctggacgtcccccttctggaggccctctcctttgagctggagaaggagatggagcgcctggagggggaggtcttccgcttggccggccaccccttcaacctcaactcccgcgaccagctggaaagggtcctctttgacgagctgggccttaccccggtgggtcggacggagaagacgggcaagcgctccaccgcccagggggccctggaggccctccggggggcccaccccatcgtggagctcatcctccagtaccgggagctttccaagctcaaaagcacctacctggaccccctgccccggctcgtccacccgcggacgggccggcttcacacccgcttcaaccagacggccacggccacgggaaggctttccagctccgaccccaacctgcagaacatccccgtgcgcacccccttggggcagcgcatccgcaaggccttcgtggccgaggaggggtggctccttttggcggcggactactcccagatcgagcttcgggtcctggcccacctctcgggggacgagaacctgaagcgggtcttccgggaggggaaggacatccataccgaaaccgccgcctggatgttcggcttagaccccgctctagtggatccaaagatgcgccgggcggccaagacggtcaacttcggcgtcctctacgggatgtccgcccacaggctctcccaggagctcggcatagactacaaggaggcggaggcctttattgagcgctacttccagagcttccccaaggtgcgggcctggatagaaaggaccctggaggagggccggacgcggggctacgtggagaccctgttcggcaggaggcgctatgtgcccgacctggccgatcgggtccgctcggtgcgggaggcggcggagcggatggccttcaacatgcccgtgcagggcaccgccgccgacctgatgaagatcgccatggtcaagctcttccccaggctaaagcccctgggggcccacctcctcctccaggtgcacgacgagctggtcctggaggtgcccgaggaccgggccgaggaggccaaggccctggtcaaggaggtcatggagaacacctaccccttggacgtgcccctcgaggtggaggtgggcgtgggtcgggactggctggaggcgaagggggattgaagcggtcgac

SEQ ID NO: 2871 - DNA, 2605 bp, Artificial Sequence
  Description of Artificial Sequence: Synthetic DNA sequence of Thermus Rt41A DNA Polymerase S766F
atgaaatacctgctgccgaccgctgctgctggtctgctgctcctcgctgcccagccggcgatggccatggatatcggaattaattcggatccgaattccccactttttgacctggaggaaccccccaagcgggtgcttctggtggacggccaccacctggcctaccgcaccttctacgccctgagcctcaccacctcccggggggagccggtgcagatggtctacggcttcgcccggagcctcctcaaggccttgaaggaggacgggcaggcggtggtcgtggtctttgacgccaaggccccctccttccgccacgaggcctacgaggcctacaaggcgggccgggcccccaccccggaggacttcccccgccagctcgccttggtcaagcggctggtggaccttctgggcctggtccgcctcgaggccccgggttacgaggcggacgacgtcctgggcaccctggccaagaaggccgaaagggaggggatggaggtgcgcatcctcacgggagaccgggacttcttccagctcctctccgagaaggtctcggtcctcctgccggacgggaccctggtcaccccaaaggacgtccaggagaagtacggggtgccgccggagcgctgggtggacttccgcgccctcacgggggaccgctcggacaacatccccggggtggcggggataggggagaagaccgcccttcgactcctcgcggagtgggggagcgtggagaacctcctgaagaacctggaccgggtgaagccggactcggtccggcgcaagatagaggcgcaccttgaggacctccgcctctccttggacctggcccgcatccgcaccgacctccccttggaggtggactttaaggccctgcgccgcaggacccccgacctggagggcctgagggcctttttggaggagctggagttcggaagcctccttcatgagttcggcctcctgggaggggagaagccccgggaggaggccccctggcccccgcccgaaggggccttcgtaggcttcctcctctcccgcaaggagcccatgtgggcggagcttctggccctggcggccgccgcagagggccgggtccaccgggcaacaagcccggttgaggccctggccgacctcaaggaggcccgggggttcctggccaaggacctggccgttttggccctgcgggagggggtggccctggaccccacggacgaccccctcctggtggcctacctcctggacccggccaacaccaaccccgagggggtggcccggcgctacgggggcgagttcacggaggacgcagcggagagggccctcctctccgagaggctcttccagaacctctttccccggctttccgagaagctcctctggctctaccaggaggtggagcggcccctctcccgggtcttggcccacatggaggcccggggggtgaggctggacgtcccccttctggaggccctctcctttgagctggagaaggagatggagcgcctggagggggaggtcttccgcttggccggccaccccttcaacctcaactcccgcgaccagctggaaagggtcctctttgacgagctgggccttaccccggtgggtcggacggagaagacgggcaagcgctccaccgcccagggggccctggaggccctccggggggcccaccccatcgtggagctcatcctccagtaccgggagctttccaagctcaaaagcacctacctggaccccctgccccggctcgtccacccgcggacgggccggcttcacacccgcttcaaccagacggccacggccacgggaaggctttccagctccgaccccaacctgcagaacatccccgtgcgcacccccttggggcagcgcatccgcaaggccttcgtggccgaggaggggtggctccttttggcggcggactactcccagatcgagcttcgggtcctggcccacctctcgggggacgagaacctgaagcgggtcttccgggaggggaaggacatccataccgaaaccgccgcctggatgttcggcttagaccccgctctagtggatccaaagatgcgccgggcggccaagacggtcaacttcggcgtcctctacgggatgtccgcccacaggctctcccaggagctcggcatagactacaaggaggcggaggcctttattgagcgctacttccagagcttccccaaggtgcgggcctggatagaaaggaccctggaggagggccggacgcggggctacgtggagaccctgttcggcaggaggcgctatgtgcccgacctggcctttcgggtccgctcggtgcgggaggcggcggagcggatggccttcaacatgcccgtgcagggcaccgccgccgacctgatgaagatcgccatggtcaagctcttccccaggctaaagcccctgggggcccacctcctcctccaggtgcacgacgagctggtcctggaggtgcccgaggaccgggccgaggaggccaaggccctggtcaaggaggtcatggagaacacctaccccttggacgtgcccctcgaggtggaggtgggcgtgggtcgggactggctggaggcgaagggggattgaagcggtcgac

SEQ ID NO: 2872 - DNA, 2605 bp, Artificial Sequence
  Description of Artificial Sequence: Synthetic DNA sequence of Thermus Rt41A DNA Polymerase S766Y
atgaaatacctgctgccgaccgctgctgctggtctgctgctcctcgctgcccagccggcgatggccatggatatcggaattaattcggatccgaattccccactttttgacctggaggaaccccccaagcgggtgcttctggtggacggccaccacctggcctaccgcaccttctacgccctgagcctcaccacctcccggggggagccggtgcagatggtctacggcttcgcccggagcctcctcaaggccttgaaggaggacgggcaggcggtggtcgtggtctttgacgccaaggccccctccttccgccacgaggcctacgaggcctacaaggcgggccgggcccccaccccggaggacttcccccgccagctcgccttggtcaagcggctggtggaccttctgggcctggtccgcctcgaggccccgggttacgaggcggacgacgtcctgggcaccctggccaagaaggccgaaagggaggggatggaggtgcgcatcctcacgggagaccgggacttcttccagctcctctccgagaaggtctcggtcctcctgccggacgggaccctggtcaccccaaaggacgtccaggagaagtacggggtgccgccggagcgctgggtggacttccgcgccctcacgggggaccgctcggacaacatccccggggtggcggggataggggagaagaccgcccttcgactcctcgcggagtgggggagcgtggagaacctcctgaagaacctggaccgggtgaagccggactcggtccggcgcaagatagaggcgcaccttgaggacctccgcctctccttggacctggcccgcatccgcaccgacctccccttggaggtggactttaaggccctgcgccgcaggacccccgacctggagggcctgagggcctttttggaggagctggagttcggaagcctccttcatgagttcggcctcctgggaggggagaagccccgggaggaggccccctggcccccgcccgaaggggccttcgtaggcttcctcctctcccgcaaggagcccatgtgggcggagcttctggccctggcggccgccgcagagggccgggtccaccgggcaacaagcccggttgaggccctggccgacctcaaggaggcccgggggttcctggccaaggacctggccgttttggccctgcgggagggggtggccctggaccccacggacgaccccctcctggtggcctacctcctggacccggccaacaccaaccccgagggggtggcccggcgctacgggggcgagttcacggaggacgcagcggagagggccctcctctccgagaggctcttccagaacctctttccccggctttccgagaagctcctctggctctaccaggaggtggagcggcccctctcccgggtcttggcccacatggaggcccggggggtgaggctggacgtcccccttctggaggccctctcctttgagctggagaaggagatggagcgcctggagggggaggtcttccgcttggccggccaccccttcaacctcaactcccgcgaccagctggaaagggtcctctttgacgagctgggccttaccccggtgggtcggacggagaagacgggcaagcgctccaccgcccagggggccctggaggccctccggggggcccaccccatcgtggagctcatcctccagtaccgggagctttccaagctcaaaagcacctacctggaccccctgccccggctcgtccacccgcggacgggccggcttcacacccgcttcaaccagacggccacggccacgggaaggctttccagctccgaccccaacctgcagaacatccccgtgcgcacccccttggggcagcgcatccgcaaggccttcgtggccgaggaggggtggctccttttggcggcggactactcccagatcgagcttcgggtcctggcccacctctcgggggacgagaacctgaagcgggtcttccgggaggggaaggacatccataccgaaaccgccgcctggatgttcggcttagaccccgctctagtggatccaaagatgcgccgggcggccaagacggtcaacttcggcgtcctctacgggatgtccgcccacaggctctcccaggagctcggcatagactacaaggaggcggaggcctttattgagcgctacttccagagcttccccaaggtgcgggcctggatagaaaggaccctggaggagggccggacgcggggctacgtggagaccctgttcggcaggaggcgctatgtgcccgacctggcctatcgggtccgctcggtgcgggaggcggcggagcggatggccttcaacatgcccgtgcagggcaccgccgccgacctgatgaagatcgccatggtcaagctcttccccaggctaaagcccctgggggcccacctcctcctccaggtgcacgacgagctggtcctggaggtgcccgaggaccgggccgaggaggccaaggccctggtcaaggaggtcatggagaacacctaccccttggacgtgcccctcgaggtggaggtgggcgtgggtcgggactggctggaggcgaagggggattgaagcggtcgac

SEQ ID NO: 2873 - DNA, 2605 bp, Artificial Sequence
  Description of Artificial Sequence: Synthetic DNA sequence of Thermus Rt41A DNA Polymerase S766W
atgaaatacctgctgccgaccgctgctgctggtctgctgctcctcgctgcccagccggcgatggccatggatatcggaattaattcggatccgaattccccactttttgacctggaggaaccccccaagcgggtgcttctggtggacggccaccacctggcctaccgcaccttctacgccctgagcctcaccacctcccggggggagccggtgcagatggtctacggcttcgcccggagcctcctcaaggccttgaaggaggacgggcaggcggtggtcgtggtctttgacgccaaggccccctccttccgccacgaggcctacgaggcctacaaggcgggccgggcccccaccccggaggacttcccccgccagctcgccttggtcaagcggctggtggaccttctgggcctggtccgcctcgaggccccgggttacgaggcggacgacgtcctgggcaccctggccaagaaggccgaaagggaggggatggaggtgcgcatcctcacgggagaccgggacttcttccagctcctctccgagaaggtctcggtcctcctgccggacgggaccctggtcaccccaaaggacgtccaggagaagtacggggtgccgccggagcgctgggtggacttccgcgccctcacgggggaccgctcggacaacatccccggggtggcggggataggggagaagaccgcccttcgactcctcgcggagtgggggagcgtggagaacctcctgaagaacctggaccgggtgaagccggactcggtccggcgcaagatagaggcgcaccttgaggacctccgcctctccttggacctggcccgcatccgcaccgacctccccttggaggtggactttaaggccctgcgccgcaggacccccgacctggagggcctgagggcctttttggaggagctggagttcggaagcctccttcatgagttcggcctcctgggaggggagaagccccgggaggaggccccctggcccccgcccgaaggggccttcgtaggcttcctcctctcccgcaaggagcccatgtgggcggagcttctggccctggcggccgccgcagagggccgggtccaccgggcaacaagcccggttgaggccctggccgacctcaaggaggcccgggggttcctggccaaggacctggccgttttggccctgcgggagggggtggccctggaccccacggacgaccccctcctggtggcctacctcctggacccggccaacaccaaccccgagggggtggcccggcgctacgggggcgagttcacggaggacgcagcggagagggccctcctctccgagaggctcttccagaacctctttccccggctttccgagaagctcctctggctctaccaggaggtggagcggcccctctcccgggtcttggcccacatggaggcccggggggtgaggctggacgtcccccttctggaggccctctcctttgagctggagaaggagatggagcgcctggagggggaggtcttccgcttggccggccaccccttcaacctcaactcccgcgaccagctggaaagggtcctctttgacgagctgggccttaccccggtgggtcggacggagaagacgggcaagcgctccaccgcccagggggccctggaggccctccggggggcccaccccatcgtggagctcatcctccagtaccgggagctttccaagctcaaaagcacctacctggaccccctgccccggctcgtccacccgcggacgggccggcttcacacccgcttcaaccagacggccacggccacgggaaggctttccagctccgaccccaacctgcagaacatccccgtgcgcacccccttggggcagcgcatccgcaaggccttcgtggccgaggaggggtggctccttttggcggcggactactcccagatcgagcttcgggtcctggcccacctctcgggggacgagaacctgaagcgggtcttccgggaggggaaggacatccataccgaaaccgccgcctggatgttcggcttagaccccgctctagtggatccaaagatgcgccgggcggccaagacggtcaacttcggcgtcctctacgggatgtccgcccacaggctctcccaggagctcggcatagactacaaggaggcggaggcctttattgagcgctacttccagagcttccccaaggtgcgggcctggatagaaaggaccctggaggagggccggacgcggggctacgtggagaccctgttcggcaggaggcgctatgtgcccgacctggcctggcgggtccgctcggtgcgggaggcggcggagcggatggccttcaacatgcccgtgcagggcaccgccgccgacctgatgaagatcgccatggtcaagctcttccccaggctaaagcccctgggggcccacctcctcctccaggtgcacgacgagctggtcctggaggtgcccgaggaccgggccgaggaggccaaggccctggtcaaggaggtcatggagaacacctaccccttggacgtgcccctcgaggtggaggtgggcgtgggtcgggactggctggaggcgaagggggattgaagcggtcgac

SEQ ID NO: 2874 - DNA, 2605 bp, Artificial Sequence
  Description of Artificial Sequence: Synthetic DNA sequence of Thermus Rt41A DNA Polymerase S766P
atgaaatacctgctgccgaccgctgctgctggtctgctgctcctcgctgcccagccggcgatggccatggatatcggaattaattcggatccgaattccccactttttgacctggaggaaccccccaagcgggtgcttctggtggacggccaccacctggcctaccgcaccttctacgccctgagcctcaccacctcccggggggagccggtgcagatggtctacggcttcgcccggagcctcctcaaggccttgaaggaggacgggcaggcggtggtcgtggtctttgacgccaaggccccctccttccgccacgaggcctacgaggcctacaaggcgggccgggcccccaccccggaggacttcccccgccagctcgccttggtcaagcggctggtggaccttctgggcctggtccgcctcgaggccccgggttacgaggcggacgacgtcctgggcaccctggccaagaaggccgaaagggaggggatggaggtgcgcatcctcacgggagaccgggacttcttccagctcctctccgagaaggtctcggtcctcctgccggacgggaccctggtcaccccaaaggacgtccaggagaagtacggggtgccgccggagcgctgggtggacttccgcgccctcacgggggaccgctcggacaacatccccggggtggcggggataggggagaagaccgcccttcgactcctcgcggagtgggggagcgtggagaacctcctgaagaacctggaccgggtgaagccggactcggtccggcgcaagatagaggcgcaccttgaggacctccgcctctccttggacctggcccgcatccgcaccgacctccccttggaggtggactttaaggccctgcgccgcaggacccccgacctggagggcctgagggcctttttggaggagctggagttcggaagcctccttcatgagttcggcctcctgggaggggagaagccccgggaggaggccccctggcccccgcccgaaggggccttcgtaggcttcctcctctcccgcaaggagcccatgtgggcggagcttctggccctggcggccgccgcagagggccgggtccaccgggcaacaagcccggttgaggccctggccgacctcaaggaggcccgggggttcctggccaaggacctggccgttttggccctgcgggagggggtggccctggaccccacggacgaccccctcctggtggcctacctcctggacccggccaacaccaaccccgagggggtggcccggcgctacgggggcgagttcacggaggacgcagcggagagggccctcctctccgagaggctcttccagaacctctttccccggctttccgagaagctcctctggctctaccaggaggtggagcggcccctctcccgggtcttggcccacatggaggcccggggggtgaggctggacgtcccccttctggaggccctctcctttgagctggagaaggagatggagcgcctggagggggaggtcttccgcttggccggccaccccttcaacctcaactcccgcgaccagctggaaagggtcctctttgacgagctgggccttaccccggtgggtcggacggagaagacgggcaagcgctccaccgcccagggggccctggaggccctccggggggcccaccccatcgtggagctcatcctccagtaccgggagctttccaagctcaaaagcacctacctggaccccctgccccggctcgtccacccgcggacgggccggcttcacacccgcttcaaccagacggccacggccacgggaaggctttccagctccgaccccaacctgcagaacatccccgtgcgcacccccttggggcagcgcatccgcaaggccttcgtggccgaggaggggtggctccttttggcggcggactactcccagatcgagcttcgggtcctggcccacctctcgggggacgagaacctgaagcgggtcttccgggaggggaaggacatccataccgaaaccgccgcctggatgttcggcttagaccccgctctagtggatccaaagatgcgccgggcggccaagacggtcaacttcggcgtcctctacgggatgtccgcccacaggctctcccaggagctcggcatagactacaaggaggcggaggcctttattgagcgctacttccagagcttccccaaggtgcgggcctggatagaaaggaccctggaggagggccggacgcggggctacgtggagaccctgttcggcaggaggcgctatgtgcccgacctggcccctcgggtccgctcggtgcgggaggcggcggagcggatggccttcaacatgcccgtgcagggcaccgccgccgacctgatgaagatcgccatggtcaagctcttccccaggctaaagcccctgggggcccacctcctcctccaggtgcacgacgagctggtcctggaggtgcccgaggaccgggccgaggaggccaaggccctggtcaaggaggtcatggagaacacctaccccttggacgtgcccctcgaggtggaggtgggcgtgggtcgggactggctggaggcgaagggggattgaagcggtcgac

SEQ ID NO: 2875 - DNA, 2605 bp, Artificial Sequence
  Description of Artificial Sequence: Synthetic DNA sequence of Thermus Rt41A DNA Polymerase S766M
atgaaatacctgctgccgaccgctgctgctggtctgctgctcctcgctgcccagccggcgatggccatggatatcggaattaattcggatccgaattccccactttttgacctggaggaaccccccaagcgggtgcttctggtggacggccaccacctggcctaccgcaccttctacgccctgagcctcaccacctcccggggggagccggtgcagatggtctacggcttcgcccggagcctcctcaaggccttgaaggaggacgggcaggcggtggtcgtggtctttgacgccaaggccccctccttccgccacgaggcctacgaggcctacaaggcgggccgggcccccaccccggaggacttcccccgccagctcgccttggtcaagcggctggtggaccttctgggcctggtccgcctcgaggccccgggttacgaggcggacgacgtcctgggcaccctggccaagaaggccgaaagggaggggatggaggtgcgcatcctcacgggagaccgggacttcttccagctcctctccgagaaggtctcggtcctcctgccggacgggaccctggtcaccccaaaggacgtccaggagaagtacggggtgccgccggagcgctgggtggacttccgcgccctcacgggggaccgctcggacaacatccccggggtggcggggataggggagaagaccgcccttcgactcctcgcggagtgggggagcgtggagaacctcctgaagaacctggaccgggtgaagccggactcggtccggcgcaagatagaggcgcaccttgaggacctccgcctctccttggacctggcccgcatccgcaccgacctccccttggaggtggactttaaggccctgcgccgcaggacccccgacctggagggcctgagggcctttttggaggagctggagttcggaagcctccttcatgagttcggcctcctgggaggggagaagccccgggaggaggccccctggcccccgcccgaaggggccttcgtaggcttcctcctctcccgcaaggagcccatgtgggcggagcttctggccctggcggccgccgcagagggccgggtccaccgggcaacaagcccggttgaggccctggccgacctcaaggaggcccgggggttcctggccaaggacctggccgttttggccctgcgggagggggtggccctggaccccacggacgaccccctcctggtggcctacctcctggacccggccaacaccaaccccgagggggtggcccggcgctacgggggcgagttcacggaggacgcagcggagagggccctcctctccgagaggctcttccagaacctctttccccggctttccgagaagctcctctggctctaccaggaggtggagcggcccctctcccgggtcttggcccacatggaggcccggggggtgaggctggacgtcccccttctggaggccctctcctttgagctggagaaggagatggagcgcctggagggggaggtcttccgcttggccggccaccccttcaacctcaactcccgcgaccagctggaaagggtcctctttgacgagctgggccttaccccggtgggtcggacggagaagacgggcaagcgctccaccgcccagggggccctggaggccctccggggggcccaccccatcgtggagctcatcctccagtaccgggagctttccaagctcaaaagcacctacctggaccccctgccccggctcgtccacccgcggacgggccggcttcacacccgcttcaaccagacggccacggccacgggaaggctttccagctccgaccccaacctgcagaacatccccgtgcgcacccccttggggcagcgcatccgcaaggccttcgtggccgaggaggggtggctccttttggcggcggactactcccagatcgagcttcgggtcctggcccacctctcgggggacgagaacctgaagcgggtcttccgggaggggaaggacatccataccgaaaccgccgcctggatgttcggcttagaccccgctctagtggatccaaagatgcgccgggcggccaagacggtcaacttcggcgtcctctacgggatgtccgcccacaggctctcccaggagctcggcatagactacaaggaggcggaggcctttattgagcgctacttccagagcttccccaaggtgcgggcctggatagaaaggaccctggaggagggccggacgcggggctacgtggagaccctgttcggcaggaggcgctatgtgcccgacctggccatgcgggtccgctcggtgcgggaggcggcggagcggatggccttcaacatgcccgtgcagggcaccgccgccgacctgatgaagatcgccatggtcaagctcttccccaggctaaagcccctgggggcccacctcctcctccaggtgcacgacgagctggtcctggaggtgcccgaggaccgggccgaggaggccaaggccctggtcaaggaggtcatggagaacacctaccccttggacgtgcccctcgaggtggaggtgggcgtgggtcgggactggctggaggcgaagggggattgaagcggtcgac

SEQ ID NO: 2876 - DNA, 2605 bp, Artificial Sequence
  Description of Artificial Sequence: Synthetic DNA sequence of Thermus Rt41A DNA Polymerase S766T
atgaaatacctgctgccgaccgctgctgctggtctgctgctcctcgctgcccagccggcgatggccatggatatcggaattaattcggatccgaattccccactttttgacctggaggaaccccccaagcgggtgcttctggtggacggccaccacctggcctaccgcaccttctacgccctgagcctcaccacctcccggggggagccggtgcagatggtctacggcttcgcccggagcctcctcaaggccttgaaggaggacgggcaggcggtggtcgtggtctttgacgccaaggccccctccttccgccacgaggcctacgaggcctacaaggcgggccgggcccccaccccggaggacttcccccgccagctcgccttggtcaagcggctggtggaccttctgggcctggtccgcctcgaggccccgggttacgaggcggacgacgtcctgggcaccctggccaagaaggccgaaagggaggggatggaggtgcgcatcctcacgggagaccgggacttcttccagctcctctccgagaaggtctcggtcctcctgccggacgggaccctggtcaccccaaaggacgtccaggagaagtacggggtgccgccggagcgctgggtggacttccgcgccctcacgggggaccgctcggacaacatccccggggtggcggggataggggagaagaccgcccttcgactcctcgcggagtgggggagcgtggagaacctcctgaagaacctggaccgggtgaagccggactcggtccggcgcaagatagaggcgcaccttgaggacctccgcctctccttggacctggcccgcatccgcaccgacctccccttggaggtggactttaaggccctgcgccgcaggacccccgacctggagggcctgagggcctttttggaggagctggagttcggaagcctccttcatgagttcggcctcctgggaggggagaagccccgggaggaggccccctggcccccgcccgaaggggccttcgtaggcttcctcctctcccgcaaggagcccatgtgggcggagcttctggccctggcggccgccgcagagggccgggtccaccgggcaacaagcccggttgaggccctggccgacctcaaggaggcccgggggttcctggccaaggacctggccgttttggccctgcgggagggggtggccctggaccccacggacgaccccctcctggtggcctacctcctggacccggccaacaccaaccccgagggggtggcccggcgctacgggggcgagttcacggaggacgcagcggagagggccctcctctccgagaggctcttccagaacctctttccccggctttccgagaagctcctctggctctaccaggaggtggagcggcccctctcccgggtcttggcccacatggaggcccggggggtgaggctggacgtcccccttctggaggccctctcctttgagctggagaaggagatggagcgcctggagggggaggtcttccgcttggccggccaccccttcaacctcaactcccgcgaccagctggaaagggtcctctttgacgagctgggccttaccccggtgggtcggacggagaagacgggcaagcgctccaccgcccagggggccctggaggccctccggggggcccaccccatcgtggagctcatcctccagtaccgggagctttccaagctcaaaagcacctacctggaccccctgccccggctcgtccacccgcggacgggccggcttcacacccgcttcaaccagacggccacggccacgggaaggctttccagctccgaccccaacctgcagaacatccccgtgcgcacccccttggggcagcgcatccgcaaggccttcgtggccgaggaggggtggctccttttggcggcggactactcccagatcgagcttcgggtcctggcccacctctcgggggacgagaacctgaagcgggtcttccgggaggggaaggacatccataccgaaaccgccgcctggatgttcggcttagaccccgctctagtggatccaaagatgcgccgggcggccaagacggtcaacttcggcgtcctctacgggatgtccgcccacaggctctcccaggagctcggcatagactacaaggaggcggaggcctttattgagcgctacttccagagcttccccaaggtgcgggcctggatagaaaggaccctggaggagggccggacgcggggctacgtggagaccctgttcggcaggaggcgctatgtgcccgacctggccactcgggtccgctcggtgcgggaggcggcggagcggatggccttcaacatgcccgtgcagggcaccgccgccgacctgatgaagatcgccatggtcaagctcttccccaggctaaagcccctgggggcccacctcctcctccaggtgcacgacgagctggtcctggaggtgcccgaggaccgggccgaggaggccaaggccctggtcaaggaggtcatggagaacacctaccccttggacgtgcccctcgaggtggaggtgggcgtgggtcgggactggctggaggcgaagggggattgaagcggtcgac

SEQ ID NO: 2877 - DNA, 2605 bp, Artificial Sequence
  Description of Artificial Sequence: Synthetic DNA sequence of Thermus Rt41A DNA Polymerase S766N
atgaaatacctgctgccgaccgctgctgctggtctgctgctcctcgctgcccagccggcgatggccatggatatcggaattaattcggatccgaattccccactttttgacctggaggaaccccccaagcgggtgcttctggtggacggccaccacctggcctaccgcaccttctacgccctgagcctcaccacctcccggggggagccggtgcagatggtctacggcttcgcccggagcctcctcaaggccttgaaggaggacgggcaggcggtggtcgtggtctttgacgccaaggccccctccttccgccacgaggcctacgaggcctacaaggcgggccgggcccccaccccggaggacttcccccgccagctcgccttggtcaagcggctggtggaccttctgggcctggtccgcctcgaggccccgggttacgaggcggacgacgtcctgggcaccctggccaagaaggccgaaagggaggggatggaggtgcgcatcctcacgggagaccgggacttcttccagctcctctccgagaaggtctcggtcctcctgccggacgggaccctggtcaccccaaaggacgtccaggagaagtacggggtgccgccggagcgctgggtggacttccgcgccctcacgggggaccgctcggacaacatccccggggtggcggggataggggagaagaccgcccttcgactcctcgcggagtgggggagcgtggagaacctcctgaagaacctggaccgggtgaagccggactcggtccggcgcaagatagaggcgcaccttgaggacctccgcctctccttggacctggcccgcatccgcaccgacctccccttggaggtggactttaaggccctgcgccgcaggacccccgacctggagggcctgagggcctttttggaggagctggagttcggaagcctccttcatgagttcggcctcctgggaggggagaagccccgggaggaggccccctggcccccgcccgaaggggccttcgtaggcttcctcctctcccgcaaggagcccatgtgggcggagcttctggccctggcggccgccgcagagggccgggtccaccgggcaacaagcccggttgaggccctggccgacctcaaggaggcccgggggttcctggccaaggacctggccgttttggccctgcgggagggggtggccctggaccccacggacgaccccctcctggtggcctacctcctggacccggccaacaccaaccccgagggggtggcccggcgctacgggggcgagttcacggaggacgcagcggagagggccctcctctccgagaggctcttccagaacctctttccccggctttccgagaagctcctctggctctaccaggaggtggagcggcccctctcccgggtcttggcccacatggaggcccggggggtgaggctggacgtcccccttctggaggccctctcctttgagctggagaaggagatggagcgcctggagggggaggtcttccgcttggccggccaccccttcaacctcaactcccgcgaccagctggaaagggtcctctttgacgagctgggccttaccccggtgggtcggacggagaagacgggcaagcgctccaccgcccagggggccctggaggccctccggggggcccaccccatcgtggagctcatcctccagtaccgggagctttccaagctcaaaagcacctacctggaccccctgccccggctcgtccacccgcggacgggccggcttcacacccgcttcaaccagacggccacggccacgggaaggctttccagctccgaccccaacctgcagaacatccccgtgcgcacccccttggggcagcgcatccgcaaggccttcgtggccgaggaggggtggctccttttggcggcggactactcccagatcgagcttcgggtcctggcccacctctcgggggacgagaacctgaagcgggtcttccgggaggggaaggacatccataccgaaaccgccgcctggatgttcggcttagaccccgctctagtggatccaaagatgcgccgggcggccaagacggtcaacttcggcgtcctctacgggatgtccgcccacaggctctcccaggagctcggcatagactacaaggaggcggaggcctttattgagcgctacttccagagcttccccaaggtgcgggcctggatagaaaggaccctggaggagggccggacgcggggctacgtggagaccctgttcggcaggaggcgctatgtgcccgacctggccaatcgggtccgctcggtgcgggaggcggcggagcggatggccttcaacatgcccgtgcagggcaccgccgccgacctgatgaagatcgccatggtcaagctcttccccaggctaaagcccctgggggcccacctcctcctccaggtgcacgacgagctggtcctggaggtgcccgaggaccgggccgaggaggccaaggccctggtcaaggaggtcatggagaacacctaccccttggacgtgcccctcgaggtggaggtgggcgtgggtcgggactggctggaggcgaagggggattgaagcggtcgac

SEQ ID NO: 2878 - DNA, 2605 bp, Artificial Sequence
  Description of Artificial Sequence: Synthetic DNA sequence of Thermus Rt41A DNA Polymerase S766V
atgaaatacctgctgccgaccgctgctgctggtctgctgctcctcgctgcccagccggcgatggccatggatatcggaattaattcggatccgaattccccactttttgacctggaggaaccccccaagcgggtgcttctggtggacggccaccacctggcctaccgcaccttctacgccctgagcctcaccacctcccggggggagccggtgcagatggtctacggcttcgcccggagcctcctcaaggccttgaaggaggacgggcaggcggtggtcgtggtctttgacgccaaggccccctccttccgccacgaggcctacgaggcctacaaggcgggccgggcccccaccccggaggacttcccccgccagctcgccttggtcaagcggctggtggaccttctgggcctggtccgcctcgaggccccgggttacgaggcggacgacgtcctgggcaccctggccaagaaggccgaaagggaggggatggaggtgcgcatcctcacgggagaccgggacttcttccagctcctctccgagaaggtctcggtcctcctgccggacgggaccctggtcaccccaaaggacgtccaggagaagtacggggtgccgccggagcgctgggtggacttccgcgccctcacgggggaccgctcggacaacatccccggggtggcggggataggggagaagaccgcccttcgactcctcgcggagtgggggagcgtggagaacctcctgaagaacctggaccgggtgaagccggactcggtccggcgcaagatagaggcgcaccttgaggacctccgcctctccttggacctggcccgcatccgcaccgacctccccttggaggtggactttaaggccctgcgccgcaggacccccgacctggagggcctgagggcctttttggaggagctggagttcggaagcctccttcatgagttcggcctcctgggaggggagaagccccgggaggaggccccctggcccccgcccgaaggggccttcgtaggcttcctcctctcccgcaaggagcccatgtgggcggagcttctggccctggcggccgccgcagagggccgggtccaccgggcaacaagcccggttgaggccctggccgacctcaaggaggcccgggggttcctggccaaggacctggccgttttggccctgcgggagggggtggccctggaccccacggacgaccccctcctggtggcctacctcctggacccggccaacaccaaccccgagggggtggcccggcgctacgggggcgagttcacggaggacgcagcggagagggccctcctctccgagaggctcttccagaacctctttccccggctttccgagaagctcctctggctctaccaggaggtggagcggcccctctcccgggtcttggcccacatggaggcccggggggtgaggctggacgtcccccttctggaggccctctcctttgagctggagaaggagatggagcgcctggagggggaggtcttccgcttggccggccaccccttcaacctcaactcccgcgaccagctggaaagggtcctctttgacgagctgggccttaccccggtgggtcggacggagaagacgggcaagcgctccaccgcccagggggccctggaggccctccggggggcccaccccatcgtggagctcatcctccagtaccgggagctttccaagctcaaaagcacctacctggaccccctgccccggctcgtccacccgcggacgggccggcttcacacccgcttcaaccagacggccacggccacgggaaggctttccagctccgaccccaacctgcagaacatccccgtgcgcacccccttggggcagcgcatccgcaaggccttcgtggccgaggaggggtggctccttttggcggcggactactcccagatcgagcttcgggtcctggcccacctctcgggggacgagaacctgaagcgggtcttccgggaggggaaggacatccataccgaaaccgccgcctggatgttcggcttagaccccgctctagtggatccaaagatgcgccgggcggccaagacggtcaacttcggcgtcctctacgggatgtccgcccacaggctctcccaggagctcggcatagactacaaggaggcggaggcctttattgagcgctacttccagagcttccccaaggtgcgggcctggatagaaaggaccctggaggagggccggacgcggggctacgtggagaccctgttcggcaggaggcgctatgtgcccgacctggccgtccgggtccgctcggtgcgggaggcggcggagcggatggccttcaacatgcccgtgcagggcaccgccgccgacctgatgaagatcgccatggtcaagctcttccccaggctaaagcccctgggggcccacctcctcctccaggtgcacgacgagctggtcctggaggtgcccgaggaccgggccgaggaggccaaggccctggtcaaggaggtcatggagaacacctaccccttggacgtgcccctcgaggtggaggtgggcgtgggtcgggactggctggaggcgaagggggattgaagcggtcgac

SEQ ID NO: 2879 - DNA, 2605 bp, Artificial Sequence
  Description of Artificial Sequence: Synthetic DNA sequence of Thermus Rt41A DNA Polymerase R767A
atgaaatacctgctgccgaccgctgctgctggtctgctgctcctcgctgcccagccggcgatggccatggatatcggaattaattcggatccgaattccccactttttgacctggaggaaccccccaagcgggtgcttctggtggacggccaccacctggcctaccgcaccttctacgccctgagcctcaccacctcccggggggagccggtgcagatggtctacggcttcgcccggagcctcctcaaggccttgaaggaggacgggcaggcggtggtcgtggtctttgacgccaaggccccctccttccgccacgaggcctacgaggcctacaaggcgggccgggcccccaccccggaggacttcccccgccagctcgccttggtcaagcggctggtggaccttctgggcctggtccgcctcgaggccccgggttacgaggcggacgacgtcctgggcaccctggccaagaaggccgaaagggaggggatggaggtgcgcatcctcacgggagaccgggacttcttccagctcctctccgagaaggtctcggtcctcctgccggacgggaccctggtcaccccaaaggacgtccaggagaagtacggggtgccgccggagcgctgggtggacttccgcgccctcacgggggaccgctcggacaacatccccggggtggcggggataggggagaagaccgcccttcgactcctcgcggagtgggggagcgtggagaacctcctgaagaacctggaccgggtgaagccggactcggtccggcgcaagatagaggcgcaccttgaggacctccgcctctccttggacctggcccgcatccgcaccgacctccccttggaggtggactttaaggccctgcgccgcaggacccccgacctggagggcctgagggcctttttggaggagctggagttcggaagcctccttcatgagttcggcctcctgggaggggagaagccccgggaggaggccccctggcccccgcccgaaggggccttcgtaggcttcctcctctcccgcaaggagcccatgtgggcggagcttctggccctggcggccgccgcagagggccgggtccaccgggcaacaagcccggttgaggccctggccgacctcaaggaggcccgggggttcctggccaaggacctggccgttttggccctgcgggagggggtggccctggaccccacggacgaccccctcctggtggcctacctcctggacccggccaacaccaaccccgagggggtggcccggcgctacgggggcgagttcacggaggacgcagcggagagggccctcctctccgagaggctcttccagaacctctttccccggctttccgagaagctcctctggctctaccaggaggtggagcggcccctctcccgggtcttggcccacatggaggcccggggggtgaggctggacgtcccccttctggaggccctctcctttgagctggagaaggagatggagcgcctggagggggaggtcttccgcttggccggccaccccttcaacctcaactcccgcgaccagctggaaagggtcctctttgacgagctgggccttaccccggtgggtcggacggagaagacgggcaagcgctccaccgcccagggggccctggaggccctccggggggcccaccccatcgtggagctcatcctccagtaccgggagctttccaagctcaaaagcacctacctggaccccctgccccggctcgtccacccgcggacgggccggcttcacacccgcttcaaccagacggccacggccacgggaaggctttccagctccgaccccaacctgcagaacatccccgtgcgcacccccttggggcagcgcatccgcaaggccttcgtggccgaggaggggtggctccttttggcggcggactactcccagatcgagcttcgggtcctggcccacctctcgggggacgagaacctgaagcgggtcttccgggaggggaaggacatccataccgaaaccgccgcctggatgttcggcttagaccccgctctagtggatccaaagatgcgccgggcggccaagacggtcaacttcggcgtcctctacgggatgtccgcccacaggctctcccaggagctcggcatagactacaaggaggcggaggcctttattgagcgctacttccagagcttccccaaggtgcgggcctggatagaaaggaccctggaggagggccggacgcggggctacgtggagaccctgttcggcaggaggcgctatgtgcccgacctggcctccgctgtccgctcggtgcgggaggcggcggagcggatggccttcaacatgcccgtgcagggcaccgccgccgacctgatgaagatcgccatggtcaagctcttccccaggctaaagcccctgggggcccacctcctcctccaggtgcacgacgagctggtcctggaggtgcccgaggaccgggccgaggaggccaaggccctggtcaaggaggtcatggagaacacctaccccttggacgtgcccctcgaggtggaggtgggcgtgggtcgggactggctggaggcgaagggggattgaagcggtcgac

SEQ ID NO: 2880 - DNA, 2605 bp, Artificial Sequence
  Description of Artificial Sequence: Synthetic DNA sequence of Thermus Rt41A DNA Polymerase R767C
atgaaatacctgctgccgaccgctgctgctggtctgctgctcctcgctgcccagccggcgatggccatggatatcggaattaattcggatccgaattccccactttttgacctggaggaaccccccaagcgggtgcttctggtggacggccaccacctggcctaccgcaccttctacgccctgagcctcaccacctcccggggggagccggtgcagatggtctacggcttcgcccggagcctcctcaaggccttgaaggaggacgggcaggcggtggtcgtggtctttgacgccaaggccccctccttccgccacgaggcctacgaggcctacaaggcgggccgggcccccaccccggaggacttcccccgccagctcgccttggtcaagcggctggtggaccttctgggcctggtccgcctcgaggccccgggttacgaggcggacgacgtcctgggcaccctggccaagaaggccgaaagggaggggatggaggtgcgcatcctcacgggagaccgggacttcttccagctcctctccgagaaggtctcggtcctcctgccggacgggaccctggtcaccccaaaggacgtccaggagaagtacggggtgccgccggagcgctgggtggacttccgcgccctcacgggggaccgctcggacaacatccccggggtggcggggataggggagaagaccgcccttcgactcctcgcggagtgggggagcgtggagaacctcctgaagaacctggaccgggtgaagccggactcggtccggcgcaagatagaggcgcaccttgaggacctccgcctctccttggacctggcccgcatccgcaccgacctccccttggaggtggactttaaggccctgcgccgcaggacccccgacctggagggcctgagggcctttttggaggagctggagttcggaagcctccttcatgagttcggcctcctgggaggggagaagccccgggaggaggccccctggcccccgcccgaaggggccttcgtaggcttcctcctctcccgcaaggagcccatgtgggcggagcttctggccctggcggccgccgcagagggccgggtccaccgggcaacaagcccggttgaggccctggccgacctcaaggaggcccgggggttcctggccaaggacctggccgttttggccctgcgggagggggtggccctggaccccacggacgaccccctcctggtggcctacctcctggacccggccaacaccaaccccgagggggtggcccggcgctacgggggcgagttcacggaggacgcagcggagagggccctcctctccgagaggctcttccagaacctctttccccggctttccgagaagctcctctggctctaccaggaggtggagcggcccctctcccgggtcttggcccacatggaggcccggggggtgaggctggacgtcccccttctggaggccctctcctttgagctggagaaggagatggagcgcctggagggggaggtcttccgcttggccggccaccccttcaacctcaactcccgcgaccagctggaaagggtcctctttgacgagctgggccttaccccggtgggtcggacggagaagacgggcaagcgctccaccgcccagggggccctggaggccctccggggggcccaccccatcgtggagctcatcctccagtaccgggagctttccaagctcaaaagcacctacctggaccccctgccccggctcgtccacccgcggacgggccggcttcacacccgcttcaaccagacggccacggccacgggaaggctttccagctccgaccccaacctgcagaacatccccgtgcgcacccccttggggcagcgcatccgcaaggccttcgtggccgaggaggggtggctccttttggcggcggactactcccagatcgagcttcgggtcctggcccacctctcgggggacgagaacctgaagcgggtcttccgggaggggaaggacatccataccgaaaccgccgcctggatgttcggcttagaccccgctctagtggatccaaagatgcgccgggcggccaagacggtcaacttcggcgtcctctacgggatgtccgcccacaggctctcccaggagctcggcatagactacaaggaggcggaggcctttattgagcgctacttccagagcttccccaaggtgcgggcctggatagaaaggaccctggaggagggccggacgcggggctacgtggagaccctgttcggcaggaggcgctatgtgcccgacctggcctcctgtgtccgctcggtgcgggaggcggcggagcggatggccttcaacatgcccgtgcagggcaccgccgccgacctgatgaagatcgccatggtcaagctcttccccaggctaaagcccctgggggcccacctcctcctccaggtgcacgacgagctggtcctggaggtgcccgaggaccgggccgaggaggccaaggccctggtcaaggaggtcatggagaacacctaccccttggacgtgcccctcgaggtggaggtgggcgtgggtcgggactggctggaggcgaagggggattgaagcggtcgac

SEQ ID NO: 2881 - DNA, 2605 bp, Artificial Sequence
  Description of Artificial Sequence: Synthetic DNA sequence of Thermus Rt41A DNA Polymerase R767G
atgaaatacctgctgccgaccgctgctgctggtctgctgctcctcgctgcccagccggcgatggccatggatatcggaattaattcggatccgaattccccactttttgacctggaggaaccccccaagcgggtgcttctggtggacggccaccacctggcctaccgcaccttctacgccctgagcctcaccacctcccggggggagccggtgcagatggtctacggcttcgcccggagcctcctcaaggccttgaaggaggacgggcaggcggtggtcgtggtctttgacgccaaggccccctccttccgccacgaggcctacgaggcctacaaggcgggccgggcccccaccccggaggacttcccccgccagctcgccttggtcaagcggctggtggaccttctgggcctggtccgcctcgaggccccgggttacgaggcggacgacgtcctgggcaccctggccaagaaggccgaaagggaggggatggaggtgcgcatcctcacgggagaccgggacttcttccagctcctctccgagaaggtctcggtcctcctgccggacgggaccctggtcaccccaaaggacgtccaggagaagtacggggtgccgccggagcgctgggtggacttccgcgccctcacgggggaccgctcggacaacatccccggggtggcggggataggggagaagaccgcccttcgactcctcgcggagtgggggagcgtggagaacctcctgaagaacctggaccgggtgaagccggactcggtccggcgcaagatagaggcgcaccttgaggacctccgcctctccttggacctggcccgcatccgcaccgacctccccttggaggtggactttaaggccctgcgccgcaggacccccgacctggagggcctgagggcctttttggaggagctggagttcggaagcctccttcatgagttcggcctcctgggaggggagaagccccgggaggaggccccctggcccccgcccgaaggggccttcgtaggcttcctcctctcccgcaaggagcccatgtgggcggagcttctggccctggcggccgccgcagagggccgggtccaccgggcaacaagcccggttgaggccctggccgacctcaaggaggcccgggggttcctggccaaggacctggccgttttggccctgcgggagggggtggccctggaccccacggacgaccccctcctggtggcctacctcctggacccggccaacaccaaccccgagggggtggcccggcgctacgggggcgagttcacggaggacgcagcggagagggccctcctctccgagaggctcttccagaacctctttccccggctttccgagaagctcctctggctctaccaggaggtggagcggcccctctcccgggtcttggcccacatggaggcccggggggtgaggctggacgtcccccttctggaggccctctcctttgagctggagaaggagatggagcgcctggagggggaggtcttccgcttggccggccaccccttcaacctcaactcccgcgaccagctggaaagggtcctctttgacgagctgggccttaccccggtgggtcggacggagaagacgggcaagcgctccaccgcccagggggccctggaggccctccggggggcccaccccatcgtggagctcatcctccagtaccgggagctttccaagctcaaaagcacctacctggaccccctgccccggctcgtccacccgcggacgggccggcttcacacccgcttcaaccagacggccacggccacgggaaggctttccagctccgaccccaacctgcagaacatccccgtgcgcacccccttggggcagcgcatccgcaaggccttcgtggccgaggaggggtggctccttttggcggcggactactcccagatcgagcttcgggtcctggcccacctctcgggggacgagaacctgaagcgggtcttccgggaggggaaggacatccataccgaaaccgccgcctggatgttcggcttagaccccgctctagtggatccaaagatgcgccgggcggccaagacggtcaacttcggcgtcctctacgggatgtccgcccacaggctctcccaggagctcggcatagactacaaggaggcggaggcctttattgagcgctacttccagagcttccccaaggtgcgggcctggatagaaaggaccctggaggagggccggacgcggggctacgtggagaccctgttcggcaggaggcgctatgtgcccgacctggcctccggtgtccgctcggtgcgggaggcggcggagcggatggccttcaacatgcccgtgcagggcaccgccgccgacctgatgaagatcgccatggtcaagctcttccccaggctaaagcccctgggggcccacctcctcctccaggtgcacgacgagctggtcctggaggtgcccgaggaccgggccgaggaggccaaggccctggtcaaggaggtcatggagaacacctaccccttggacgtgcccctcgaggtggaggtgggcgtgggtcgggactggctggaggcgaagggggattgaagcggtcgac

SEQ ID NO: 2882 - DNA, 2605 bp, Artificial Sequence
  Description of Artificial Sequence: Synthetic DNA sequence of Thermus Rt41A DNA Polymerase R767Q
atgaaatacctgctgccgaccgctgctgctggtctgctgctcctcgctgcccagccggcgatggccatggatatcggaattaattcggatccgaattccccactttttgacctggaggaaccccccaagcgggtgcttctggtggacggccaccacctggcctaccgcaccttctacgccctgagcctcaccacctcccggggggagccggtgcagatggtctacggcttcgcccggagcctcctcaaggccttgaaggaggacgggcaggcggtggtcgtggtctttgacgccaaggccccctccttccgccacgaggcctacgaggcctacaaggcgggccgggcccccaccccggaggacttcccccgccagctcgccttggtcaagcggctggtggaccttctgggcctggtccgcctcgaggccccgggttacgaggcggacgacgtcctgggcaccctggccaagaaggccgaaagggaggggatggaggtgcgcatcctcacgggagaccgggacttcttccagctcctctccgagaaggtctcggtcctcctgccggacgggaccctggtcaccccaaaggacgtccaggagaagtacggggtgccgccggagcgctgggtggacttccgcgccctcacgggggaccgctcggacaacatccccggggtggcggggataggggagaagaccgcccttcgactcctcgcggagtgggggagcgtggagaacctcctgaagaacctggaccgggtgaagccggactcggtccggcgcaagatagaggcgcaccttgaggacctccgcctctccttggacctggcccgcatccgcaccgacctccccttggaggtggactttaaggccctgcgccgcaggacccccgacctggagggcctgagggcctttttggaggagctggagttcggaagcctccttcatgagttcggcctcctgggaggggagaagccccgggaggaggccccctggcccccgcccgaaggggccttcgtaggcttcctcctctcccgcaaggagcccatgtgggcggagcttctggccctggcggccgccgcagagggccgggtccaccgggcaacaagcccggttgaggccctggccgacctcaaggaggcccgggggttcctggccaaggacctggccgttttggccctgcgggagggggtggccctggaccccacggacgaccccctcctggtggcctacctcctggacccggccaacaccaaccccgagggggtggcccggcgctacgggggcgagttcacggaggacgcagcggagagggccctcctctccgagaggctcttccagaacctctttccccggctttccgagaagctcctctggctctaccaggaggtggagcggcccctctcccgggtcttggcccacatggaggcccggggggtgaggctggacgtcccccttctggaggccctctcctttgagctggagaaggagatggagcgcctggagggggaggtcttccgcttggccggccaccccttcaacctcaactcccgcgaccagctggaaagggtcctctttgacgagctgggccttaccccggtgggtcggacggagaagacgggcaagcgctccaccgcccagggggccctggaggccctccggggggcccaccccatcgtggagctcatcctccagtaccgggagctttccaagctcaaaagcacctacctggaccccctgccccggctcgtccacccgcggacgggccggcttcacacccgcttcaaccagacggccacggccacgggaaggctttccagctccgaccccaacctgcagaacatccccgtgcgcacccccttggggcagcgcatccgcaaggccttcgtggccgaggaggggtggctccttttggcggcggactactcccagatcgagcttcgggtcctggcccacctctcgggggacgagaacctgaagcgggtcttccgggaggggaaggacatccataccgaaaccgccgcctggatgttcggcttagaccccgctctagtggatccaaagatgcgccgggcggccaagacggtcaacttcggcgtcctctacgggatgtccgcccacaggctctcccaggagctcggcatagactacaaggaggcggaggcctttattgagcgctacttccagagcttccccaaggtgcgggcctggatagaaaggaccctggaggagggccggacgcggggctacgtggagaccctgttcggcaggaggcgctatgtgcccgacctggcctcccaagtccgctcggtgcgggaggcggcggagcggatggccttcaacatgcccgtgcagggcaccgccgccgacctgatgaagatcgccatggtcaagctcttccccaggctaaagcccctgggggcccacctcctcctccaggtgcacgacgagctggtcctggaggtgcccgaggaccgggccgaggaggccaaggccctggtcaaggaggtcatggagaacacctaccccttggacgtgcccctcgaggtggaggtgggcgtgggtcgggactggctggaggcgaagggggattgaagcggtcgac

SEQ ID NO: 2883 - DNA, 2605 bp, Artificial Sequence
  Description of Artificial Sequence: Synthetic DNA sequence of Thermus Rt41A DNA Polymerase R767H
atgaaatacctgctgccgaccgctgctgctggtctgctgctcctcgctgcccagccggcgatggccatggatatcggaattaattcggatccgaattccccactttttgacctggaggaaccccccaagcgggtgcttctggtggacggccaccacctggcctaccgcaccttctacgccctgagcctcaccacctcccggggggagccggtgcagatggtctacggcttcgcccggagcctcctcaaggccttgaaggaggacgggcaggcggtggtcgtggtctttgacgccaaggccccctccttccgccacgaggcctacgaggcctacaaggcgggccgggcccccaccccggaggacttcccccgccagctcgccttggtcaagcggctggtggaccttctgggcctggtccgcctcgaggccccgggttacgaggcggacgacgtcctgggcaccctggccaagaaggccgaaagggaggggatggaggtgcgcatcctcacgggagaccgggacttcttccagctcctctccgagaaggtctcggtcctcctgccggacgggaccctggtcaccccaaaggacgtccaggagaagtacggggtgccgccggagcgctgggtggacttccgcgccctcacgggggaccgctcggacaacatccccggggtggcggggataggggagaagaccgcccttcgactcctcgcggagtgggggagcgtggagaacctcctgaagaacctggaccgggtgaagccggactcggtccggcgcaagatagaggcgcaccttgaggacctccgcctctccttggacctggcccgcatccgcaccgacctccccttggaggtggactttaaggccctgcgccgcaggacccccgacctggagggcctgagggcctttttggaggagctggagttcggaagcctccttcatgagttcggcctcctgggaggggagaagccccgggaggaggccccctggcccccgcccgaaggggccttcgtaggcttcctcctctcccgcaaggagcccatgtgggcggagcttctggccctggcggccgccgcagagggccgggtccaccgggcaacaagcccggttgaggccctggccgacctcaaggaggcccgggggttcctggccaaggacctggccgttttggccctgcgggagggggtggccctggaccccacggacgaccccctcctggtggcctacctcctggacccggccaacaccaaccccgagggggtggcccggcgctacgggggcgagttcacggaggacgcagcggagagggccctcctctccgagaggctcttccagaacctctttccccggctttccgagaagctcctctggctctaccaggaggtggagcggcccctctcccgggtcttggcccacatggaggcccggggggtgaggctggacgtcccccttctggaggccctctcctttgagctggagaaggagatggagcgcctggagggggaggtcttccgcttggccggccaccccttcaacctcaactcccgcgaccagctggaaagggtcctctttgacgagctgggccttaccccggtgggtcggacggagaagacgggcaagcgctccaccgcccagggggccctggaggccctccggggggcccaccccatcgtggagctcatcctccagtaccgggagctttccaagctcaaaagcacctacctggaccccctgccccggctcgtccacccgcggacgggccggcttcacacccgcttcaaccagacggccacggccacgggaaggctttccagctccgaccccaacctgcagaacatccccgtgcgcacccccttggggcagcgcatccgcaaggccttcgtggccgaggaggggtggctccttttggcggcggactactcccagatcgagcttcgggtcctggcccacctctcgggggacgagaacctgaagcgggtcttccgggaggggaaggacatccataccgaaaccgccgcctggatgttcggcttagaccccgctctagtggatccaaagatgcgccgggcggccaagacggtcaacttcggcgtcctctacgggatgtccgcccacaggctctcccaggagctcggcatagactacaaggaggcggaggcctttattgagcgctacttccagagcttccccaaggtgcgggcctggatagaaaggaccctggaggagggccggacgcggggctacgtggagaccctgttcggcaggaggcgctatgtgcccgacctggcctcccatgtccgctcggtgcgggaggcggcggagcggatggccttcaacatgcccgtgcagggcaccgccgccgacctgatgaagatcgccatggtcaagctcttccccaggctaaagcccctgggggcccacctcctcctccaggtgcacgacgagctggtcctggaggtgcccgaggaccgggccgaggaggccaaggccctggtcaaggaggtcatggagaacacctaccccttggacgtgcccctcgaggtggaggtgggcgtgggtcgggactggctggaggcgaagggggattgaagcggtcgac

SEQ ID NO: 2884 - DNA, 2605 bp, Artificial Sequence
  Description of Artificial Sequence: Synthetic DNA sequence of Thermus Rt41A DNA Polymerase R767I
atgaaatacctgctgccgaccgctgctgctggtctgctgctcctcgctgcccagccggcgatggccatggatatcggaattaattcggatccgaattccccactttttgacctggaggaaccccccaagcgggtgcttctggtggacggccaccacctggcctaccgcaccttctacgccctgagcctcaccacctcccggggggagccggtgcagatggtctacggcttcgcccggagcctcctcaaggccttgaaggaggacgggcaggcggtggtcgtggtctttgacgccaaggccccctccttccgccacgaggcctacgaggcctacaaggcgggccgggcccccaccccggaggacttcccccgccagctcgccttggtcaagcggctggtggaccttctgggcctggtccgcctcgaggccccgggttacgaggcggacgacgtcctgggcaccctggccaagaaggccgaaagggaggggatggaggtgcgcatcctcacgggagaccgggacttcttccagctcctctccgagaaggtctcggtcctcctgccggacgggaccctggtcaccccaaaggacgtccaggagaagtacggggtgccgccggagcgctgggtggacttccgcgccctcacgggggaccgctcggacaacatccccggggtggcggggataggggagaagaccgcccttcgactcctcgcggagtgggggagcgtggagaacctcctgaagaacctggaccgggtgaagccggactcggtccggcgcaagatagaggcgcaccttgaggacctccgcctctccttggacctggcccgcatccgcaccgacctccccttggaggtggactttaaggccctgcgccgcaggacccccgacctggagggcctgagggcctttttggaggagctggagttcggaagcctccttcatgagttcggcctcctgggaggggagaagccccgggaggaggccccctggcccccgcccgaaggggccttcgtaggcttcctcctctcccgcaaggagcccatgtgggcggagcttctggccctggcggccgccgcagagggccgggtccaccgggcaacaagcccggttgaggccctggccgacctcaaggaggcccgggggttcctggccaaggacctggccgttttggccctgcgggagggggtggccctggaccccacggacgaccccctcctggtggcctacctcctggacccggccaacaccaaccccgagggggtggcccggcgctacgggggcgagttcacggaggacgcagcggagagggccctcctctccgagaggctcttccagaacctctttccccggctttccgagaagctcctctggctctaccaggaggtggagcggcccctctcccgggtcttggcccacatggaggcccggggggtgaggctggacgtcccccttctggaggccctctcctttgagctggagaaggagatggagcgcctggagggggaggtcttccgcttggccggccaccccttcaacctcaactcccgcgaccagctggaaagggtcctctttgacgagctgggccttaccccggtgggtcggacggagaagacgggcaagcgctccaccgcccagggggccctggaggccctccggggggcccaccccatcgtggagctcatcctccagtaccgggagctttccaagctcaaaagcacctacctggaccccctgccccggctcgtccacccgcggacgggccggcttcacacccgcttcaaccagacggccacggccacgggaaggctttccagctccgaccccaacctgcagaacatccccgtgcgcacccccttggggcagcgcatccgcaaggccttcgtggccgaggaggggtggctccttttggcggcggactactcccagatcgagcttcgggtcctggcccacctctcgggggacgagaacctgaagcgggtcttccgggaggggaaggacatccataccgaaaccgccgcctggatgttcggcttagaccccgctctagtggatccaaagatgcgccgggcggccaagacggtcaacttcggcgtcctctacgggatgtccgcccacaggctctcccaggagctcggcatagactacaaggaggcggaggcctttattgagcgctacttccagagcttccccaaggtgcgggcctggatagaaaggaccctggaggagggccggacgcggggctacgtggagaccctgttcggcaggaggcgctatgtgcccgacctggcctccattgtccgctcggtgcgggaggcggcggagcggatggccttcaacatgcccgtgcagggcaccgccgccgacctgatgaagatcgccatggtcaagctcttccccaggctaaagcccctgggggcccacctcctcctccaggtgcacgacgagctggtcctggaggtgcccgaggaccgggccgaggaggccaaggccctggtcaaggaggtcatggagaacacctaccccttggacgtgcccctcgaggtggaggtgggcgtgggtcgggactggctggaggcgaagggggattgaagcggtcgac

SEQ ID NO: 2885 - DNA, 2605 bp, Artificial Sequence
  Description of Artificial Sequence: Synthetic DNA sequence of Thermus Rt41A DNA Polymerase R767L
atgaaatacctgctgccgaccgctgctgctggtctgctgctcctcgctgcccagccggcgatggccatggatatcggaattaattcggatccgaattccccactttttgacctggaggaaccccccaagcgggtgcttctggtggacggccaccacctggcctaccgcaccttctacgccctgagcctcaccacctcccggggggagccggtgcagatggtctacggcttcgcccggagcctcctcaaggccttgaaggaggacgggcaggcggtggtcgtggtctttgacgccaaggccccctccttccgccacgaggcctacgaggcctacaaggcgggccgggcccccaccccggaggacttcccccgccagctcgccttggtcaagcggctggtggaccttctgggcctggtccgcctcgaggccccgggttacgaggcggacgacgtcctgggcaccctggccaagaaggccgaaagggaggggatggaggtgcgcatcctcacgggagaccgggacttcttccagctcctctccgagaaggtctcggtcctcctgccggacgggaccctggtcaccccaaaggacgtccaggagaagtacggggtgccgccggagcgctgggtggacttccgcgccctcacgggggaccgctcggacaacatccccggggtggcggggataggggagaagaccgcccttcgactcctcgcggagtgggggagcgtggagaacctcctgaagaacctggaccgggtgaagccggactcggtccggcgcaagatagaggcgcaccttgaggacctccgcctctccttggacctggcccgcatccgcaccgacctccccttggaggtggactttaaggccctgcgccgcaggacccccgacctggagggcctgagggcctttttggaggagctggagttcggaagcctccttcatgagttcggcctcctgggaggggagaagccccgggaggaggccccctggcccccgcccgaaggggccttcgtaggcttcctcctctcccgcaaggagcccatgtgggcggagcttctggccctggcggccgccgcagagggccgggtccaccgggcaacaagcccggttgaggccctggccgacctcaaggaggcccgggggttcctggccaaggacctggccgttttggccctgcgggagggggtggccctggaccccacggacgaccccctcctggtggcctacctcctggacccggccaacaccaaccccgagggggtggcccggcgctacgggggcgagttcacggaggacgcagcggagagggccctcctctccgagaggctcttccagaacctctttccccggctttccgagaagctcctctggctctaccaggaggtggagcggcccctctcccgggtcttggcccacatggaggcccggggggtgaggctggacgtcccccttctggaggccctctcctttgagctggagaaggagatggagcgcctggagggggaggtcttccgcttggccggccaccccttcaacctcaactcccgcgaccagctggaaagggtcctctttgacgagctgggccttaccccggtgggtcggacggagaagacgggcaagcgctccaccgcccagggggccctggaggccctccggggggcccaccccatcgtggagctcatcctccagtaccgggagctttccaagctcaaaagcacctacctggaccccctgccccggctcgtccacccgcggacgggccggcttcacacccgcttcaaccagacggccacggccacgggaaggctttccagctccgaccccaacctgcagaacatccccgtgcgcacccccttggggcagcgcatccgcaaggccttcgtggccgaggaggggtggctccttttggcggcggactactcccagatcgagcttcgggtcctggcccacctctcgggggacgagaacctgaagcgggtcttccgggaggggaaggacatccataccgaaaccgccgcctggatgttcggcttagaccccgctctagtggatccaaagatgcgccgggcggccaagacggtcaacttcggcgtcctctacgggatgtccgcccacaggctctcccaggagctcggcatagactacaaggaggcggaggcctttattgagcgctacttccagagcttccccaaggtgcgggcctggatagaaaggaccctggaggagggccggacgcggggctacgtggagaccctgttcggcaggaggcgctatgtgcccgacctggcctccttagtccgctcggtgcgggaggcggcggagcggatggccttcaacatgcccgtgcagggcaccgccgccgacctgatgaagatcgccatggtcaagctcttccccaggctaaagcccctgggggcccacctcctcctccaggtgcacgacgagctggtcctggaggtgcccgaggaccgggccgaggaggccaaggccctggtcaaggaggtcatggagaacacctaccccttggacgtgcccctcgaggtggaggtgggcgtgggtcgggactggctggaggcgaagggggattgaagcggtcgac

SEQ ID NO: 2886 - DNA, 2605 bp, Artificial Sequence
  Description of Artificial Sequence: Synthetic DNA sequence of Thermus Rt41A DNA Polymerase R767K
atgaaatacctgctgccgaccgctgctgctggtctgctgctcctcgctgcccagccggcgatggccatggatatcggaattaattcggatccgaattccccactttttgacctggaggaaccccccaagcgggtgcttctggtggacggccaccacctggcctaccgcaccttctacgccctgagcctcaccacctcccggggggagccggtgcagatggtctacggcttcgcccggagcctcctcaaggccttgaaggaggacgggcaggcggtggtcgtggtctttgacgccaaggccccctccttccgccacgaggcctacgaggcctacaaggcgggccgggcccccaccccggaggacttcccccgccagctcgccttggtcaagcggctggtggaccttctgggcctggtccgcctcgaggccccgggttacgaggcggacgacgtcctgggcaccctggccaagaaggccgaaagggaggggatggaggtgcgcatcctcacgggagaccgggacttcttccagctcctctccgagaaggtctcggtcctcctgccggacgggaccctggtcaccccaaaggacgtccaggagaagtacggggtgccgccggagcgctgggtggacttccgcgccctcacgggggaccgctcggacaacatccccggggtggcggggataggggagaagaccgcccttcgactcctcgcggagtgggggagcgtggagaacctcctgaagaacctggaccgggtgaagccggactcggtccggcgcaagatagaggcgcaccttgaggacctccgcctctccttggacctggcccgcatccgcaccgacctccccttggaggtggactttaaggccctgcgccgcaggacccccgacctggagggcctgagggcctttttggaggagctggagttcggaagcctccttcatgagttcggcctcctgggaggggagaagccccgggaggaggccccctggcccccgcccgaaggggccttcgtaggcttcctcctctcccgcaaggagcccatgtgggcggagcttctggccctggcggccgccgcagagggccgggtccaccgggcaacaagcccggttgaggccctggccgacctcaaggaggcccgggggttcctggccaaggacctggccgttttggccctgcgggagggggtggccctggaccccacggacgaccccctcctggtggcctacctcctggacccggccaacaccaaccccgagggggtggcccggcgctacgggggcgagttcacggaggacgcagcggagagggccctcctctccgagaggctcttccagaacctctttccccggctttccgagaagctcctctggctctaccaggaggtggagcggcccctctcccgggtcttggcccacatggaggcccggggggtgaggctggacgtcccccttctggaggccctctcctttgagctggagaaggagatggagcgcctggagggggaggtcttccgcttggccggccaccccttcaacctcaactcccgcgaccagctggaaagggtcctctttgacgagctgggccttaccccggtgggtcggacggagaagacgggcaagcgctccaccgcccagggggccctggaggccctccggggggcccaccccatcgtggagctcatcctccagtaccgggagctttccaagctcaaaagcacctacctggaccccctgccccggctcgtccacccgcggacgggccggcttcacacccgcttcaaccagacggccacggccacgggaaggctttccagctccgaccccaacctgcagaacatccccgtgcgcacccccttggggcagcgcatccgcaaggccttcgtggccgaggaggggtggctccttttggcggcggactactcccagatcgagcttcgggtcctggcccacctctcgggggacgagaacctgaagcgggtcttccgggaggggaaggacatccataccgaaaccgccgcctggatgttcggcttagaccccgctctagtggatccaaagatgcgccgggcggccaagacggtcaacttcggcgtcctctacgggatgtccgcccacaggctctcccaggagctcggcatagactacaaggaggcggaggcctttattgagcgctacttccagagcttccccaaggtgcgggcctggatagaaaggaccctggaggagggccggacgcggggctacgtggagaccctgttcggcaggaggcgctatgtgcccgacctggcctccaaagtccgctcggtgcgggaggcggcggagcggatggccttcaacatgcccgtgcagggcaccgccgccgacctgatgaagatcgccatggtcaagctcttccccaggctaaagcccctgggggcccacctcctcctccaggtgcacgacgagctggtcctggaggtgcccgaggaccgggccgaggaggccaaggccctggtcaaggaggtcatggagaacacctaccccttggacgtgcccctcgaggtggaggtgggcgtgggtcgggactggctggaggcgaagggggattgaagcggtcgac

SEQ ID NO: 2887 - DNA, 2605 bp, Artificial Sequence
  Description of Artificial Sequence: Synthetic DNA sequence of Thermus Rt41A DNA Polymerase R767E
atgaaatacctgctgccgaccgctgctgctggtctgctgctcctcgctgcccagccggcgatggccatggatatcggaattaattcggatccgaattccccactttttgacctggaggaaccccccaagcgggtgcttctggtggacggccaccacctggcctaccgcaccttctacgccctgagcctcaccacctcccggggggagccggtgcagatggtctacggcttcgcccggagcctcctcaaggccttgaaggaggacgggcaggcggtggtcgtggtctttgacgccaaggccccctccttccgccacgaggcctacgaggcctacaaggcgggccgggcccccaccccggaggacttcccccgccagctcgccttggtcaagcggctggtggaccttctgggcctggtccgcctcgaggccccgggttacgaggcggacgacgtcctgggcaccctggccaagaaggccgaaagggaggggatggaggtgcgcatcctcacgggagaccgggacttcttccagctcctctccgagaaggtctcggtcctcctgccggacgggaccctggtcaccccaaaggacgtccaggagaagtacggggtgccgccggagcgctgggtggacttccgcgccctcacgggggaccgctcggacaacatccccggggtggcggggataggggagaagaccgcccttcgactcctcgcggagtgggggagcgtggagaacctcctgaagaacctggaccgggtgaagccggactcggtccggcgcaagatagaggcgcaccttgaggacctccgcctctccttggacctggcccgcatccgcaccgacctccccttggaggtggactttaaggccctgcgccgcaggacccccgacctggagggcctgagggcctttttggaggagctggagttcggaagcctccttcatgagttcggcctcctgggaggggagaagccccgggaggaggccccctggcccccgcccgaaggggccttcgtaggcttcctcctctcccgcaaggagcccatgtgggcggagcttctggccctggcggccgccgcagagggccgggtccaccgggcaacaagcccggttgaggccctggccgacctcaaggaggcccgggggttcctggccaaggacctggccgttttggccctgcgggagggggtggccctggaccccacggacgaccccctcctggtggcctacctcctggacccggccaacaccaaccccgagggggtggcccggcgctacgggggcgagttcacggaggacgcagcggagagggccctcctctccgagaggctcttccagaacctctttccccggctttccgagaagctcctctggctctaccaggaggtggagcggcccctctcccgggtcttggcccacatggaggcccggggggtgaggctggacgtcccccttctggaggccctctcctttgagctggagaaggagatggagcgcctggagggggaggtcttccgcttggccggccaccccttcaacctcaactcccgcgaccagctggaaagggtcctctttgacgagctgggccttaccccggtgggtcggacggagaagacgggcaagcgctccaccgcccagggggccctggaggccctccggggggcccaccccatcgtggagctcatcctccagtaccgggagctttccaagctcaaaagcacctacctggaccccctgccccggctcgtccacccgcggacgggccggcttcacacccgcttcaaccagacggccacggccacgggaaggctttccagctccgaccccaacctgcagaacatccccgtgcgcacccccttggggcagcgcatccgcaaggccttcgtggccgaggaggggtggctccttttggcggcggactactcccagatcgagcttcgggtcctggcccacctctcgggggacgagaacctgaagcgggtcttccgggaggggaaggacatccataccgaaaccgccgcctggatgttcggcttagaccccgctctagtggatccaaagatgcgccgggcggccaagacggtcaacttcggcgtcctctacgggatgtccgcccacaggctctcccaggagctcggcatagactacaaggaggcggaggcctttattgagcgctacttccagagcttccccaaggtgcgggcctggatagaaaggaccctggaggagggccggacgcggggctacgtggagaccctgttcggcaggaggcgctatgtgcccgacctggcctccgaagtccgctcggtgcgggaggcggcggagcggatggccttcaacatgcccgtgcagggcaccgccgccgacctgatgaagatcgccatggtcaagctcttccccaggctaaagcccctgggggcccacctcctcctccaggtgcacgacgagctggtcctggaggtgcccgaggaccgggccgaggaggccaaggccctggtcaaggaggtcatggagaacacctaccccttggacgtgcccctcgaggtggaggtgggcgtgggtcgggactggctggaggcgaagggggattgaagcggtcgac

SEQ ID NO: 2888 - DNA, 2605 bp, Artificial Sequence
  Description of Artificial Sequence: Synthetic DNA sequence of Thermus Rt41A DNA Polymerase R767D
atgaaatacctgctgccgaccgctgctgctggtctgctgctcctcgctgcccagccggcgatggccatggatatcggaattaattcggatccgaattccccactttttgacctggaggaaccccccaagcgggtgcttctggtggacggccaccacctggcctaccgcaccttctacgccctgagcctcaccacctcccggggggagccggtgcagatggtctacggcttcgcccggagcctcctcaaggccttgaaggaggacgggcaggcggtggtcgtggtctttgacgccaaggccccctccttccgccacgaggcctacgaggcctacaaggcgggccgggcccccaccccggaggacttcccccgccagctcgccttggtcaagcggctggtggaccttctgggcctggtccgcctcgaggccccgggttacgaggcggacgacgtcctgggcaccctggccaagaaggccgaaagggaggggatggaggtgcgcatcctcacgggagaccgggacttcttccagctcctctccgagaaggtctcggtcctcctgccggacgggaccctggtcaccccaaaggacgtccaggagaagtacggggtgccgccggagcgctgggtggacttccgcgccctcacgggggaccgctcggacaacatccccggggtggcggggataggggagaagaccgcccttcgactcctcgcggagtgggggagcgtggagaacctcctgaagaacctggaccgggtgaagccggactcggtccggcgcaagatagaggcgcaccttgaggacctccgcctctccttggacctggcccgcatccgcaccgacctccccttggaggtggactttaaggccctgcgccgcaggacccccgacctggagggcctgagggcctttttggaggagctggagttcggaagcctccttcatgagttcggcctcctgggaggggagaagccccgggaggaggccccctggcccccgcccgaaggggccttcgtaggcttcctcctctcccgcaaggagcccatgtgggcggagcttctggccctggcggccgccgcagagggccgggtccaccgggcaacaagcccggttgaggccctggccgacctcaaggaggcccgggggttcctggccaaggacctggccgttttggccctgcgggagggggtggccctggaccccacggacgaccccctcctggtggcctacctcctggacccggccaacaccaaccccgagggggtggcccggcgctacgggggcgagttcacggaggacgcagcggagagggccctcctctccgagaggctcttccagaacctctttccccggctttccgagaagctcctctggctctaccaggaggtggagcggcccctctcccgggtcttggcccacatggaggcccggggggtgaggctggacgtcccccttctggaggccctctcctttgagctggagaaggagatggagcgcctggagggggaggtcttccgcttggccggccaccccttcaacctcaactcccgcgaccagctggaaagggtcctctttgacgagctgggccttaccccggtgggtcggacggagaagacgggcaagcgctccaccgcccagggggccctggaggccctccggggggcccaccccatcgtggagctcatcctccagtaccgggagctttccaagctcaaaagcacctacctggaccccctgccccggctcgtccacccgcggacgggccggcttcacacccgcttcaaccagacggccacggccacgggaaggctttccagctccgaccccaacctgcagaacatccccgtgcgcacccccttggggcagcgcatccgcaaggccttcgtggccgaggaggggtggctccttttggcggcggactactcccagatcgagcttcgggtcctggcccacctctcgggggacgagaacctgaagcgggtcttccgggaggggaaggacatccataccgaaaccgccgcctggatgttcggcttagaccccgctctagtggatccaaagatgcgccgggcggccaagacggtcaacttcggcgtcctctacgggatgtccgcccacaggctctcccaggagctcggcatagactacaaggaggcggaggcctttattgagcgctacttccagagcttccccaaggtgcgggcctggatagaaaggaccctggaggagggccggacgcggggctacgtggagaccctgttcggcaggaggcgctatgtgcccgacctggcctccgatgtccgctcggtgcgggaggcggcggagcggatggccttcaacatgcccgtgcagggcaccgccgccgacctgatgaagatcgccatggtcaagctcttccccaggctaaagcccctgggggcccacctcctcctccaggtgcacgacgagctggtcctggaggtgcccgaggaccgggccgaggaggccaaggccctggtcaaggaggtcatggagaacacctaccccttggacgtgcccctcgaggtggaggtgggcgtgggtcgggactggctggaggcgaagggggattgaagcggtcgac

SEQ ID NO: 2889 - DNA, 2605 bp, Artificial Sequence
  Description of Artificial Sequence: Synthetic DNA sequence of Thermus Rt41A DNA Polymerase R767F
atgaaatacctgctgccgaccgctgctgctggtctgctgctcctcgctgcccagccggcgatggccatggatatcggaattaattcggatccgaattccccactttttgacctggaggaaccccccaagcgggtgcttctggtggacggccaccacctggcctaccgcaccttctacgccctgagcctcaccacctcccggggggagccggtgcagatggtctacggcttcgcccggagcctcctcaaggccttgaaggaggacgggcaggcggtggtcgtggtctttgacgccaaggccccctccttccgccacgaggcctacgaggcctacaaggcgggccgggcccccaccccggaggacttcccccgccagctcgccttggtcaagcggctggtggaccttctgggcctggtccgcctcgaggccccgggttacgaggcggacgacgtcctgggcaccctggccaagaaggccgaaagggaggggatggaggtgcgcatcctcacgggagaccgggacttcttccagctcctctccgagaaggtctcggtcctcctgccggacgggaccctggtcaccccaaaggacgtccaggagaagtacggggtgccgccggagcgctgggtggacttccgcgccctcacgggggaccgctcggacaacatccccggggtggcggggataggggagaagaccgcccttcgactcctcgcggagtgggggagcgtggagaacctcctgaagaacctggaccgggtgaagccggactcggtccggcgcaagatagaggcgcaccttgaggacctccgcctctccttggacctggcccgcatccgcaccgacctccccttggaggtggactttaaggccctgcgccgcaggacccccgacctggagggcctgagggcctttttggaggagctggagttcggaagcctccttcatgagttcggcctcctgggaggggagaagccccgggaggaggccccctggcccccgcccgaaggggccttcgtaggcttcctcctctcccgcaaggagcccatgtgggcggagcttctggccctggcggccgccgcagagggccgggtccaccgggcaacaagcccggttgaggccctggccgacctcaaggaggcccgggggttcctggccaaggacctggccgttttggccctgcgggagggggtggccctggaccccacggacgaccccctcctggtggcctacctcctggacccggccaacaccaaccccgagggggtggcccggcgctacgggggcgagttcacggaggacgcagcggagagggccctcctctccgagaggctcttccagaacctctttccccggctttccgagaagctcctctggctctaccaggaggtggagcggcccctctcccgggtcttggcccacatggaggcccggggggtgaggctggacgtcccccttctggaggccctctcctttgagctggagaaggagatggagcgcctggagggggaggtcttccgcttggccggccaccccttcaacctcaactcccgcgaccagctggaaagggtcctctttgacgagctgggccttaccccggtgggtcggacggagaagacgggcaagcgctccaccgcccagggggccctggaggccctccggggggcccaccccatcgtggagctcatcctccagtaccgggagctttccaagctcaaaagcacctacctggaccccctgccccggctcgtccacccgcggacgggccggcttcacacccgcttcaaccagacggccacggccacgggaaggctttccagctccgaccccaacctgcagaacatccccgtgcgcacccccttggggcagcgcatccgcaaggccttcgtggccgaggaggggtggctccttttggcggcggactactcccagatcgagcttcgggtcctggcccacctctcgggggacgagaacctgaagcgggtcttccgggaggggaaggacatccataccgaaaccgccgcctggatgttcggcttagaccccgctctagtggatccaaagatgcgccgggcggccaagacggtcaacttcggcgtcctctacgggatgtccgcccacaggctctcccaggagctcggcatagactacaaggaggcggaggcctttattgagcgctacttccagagcttccccaaggtgcgggcctggatagaaaggaccctggaggagggccggacgcggggctacgtggagaccctgttcggcaggaggcgctatgtgcccgacctggcctcctttgtccgctcggtgcgggaggcggcggagcggatggccttcaacatgcccgtgcagggcaccgccgccgacctgatgaagatcgccatggtcaagctcttccccaggctaaagcccctgggggcccacctcctcctccaggtgcacgacgagctggtcctggaggtgcccgaggaccgggccgaggaggccaaggccctggtcaaggaggtcatggagaacacctaccccttggacgtgcccctcgaggtggaggtgggcgtgggtcgggactggctggaggcgaagggggattgaagcggtcgac

SEQ ID NO: 2890 - DNA, 2605 bp, Artificial Sequence
  Description of Artificial Sequence: Synthetic DNA sequence of Thermus Rt41A DNA Polymerase R767S
atgaaatacctgctgccgaccgctgctgctggtctgctgctcctcgctgcccagccggcgatggccatggatatcggaattaattcggatccgaattccccactttttgacctggaggaaccccccaagcgggtgcttctggtggacggccaccacctggcctaccgcaccttctacgccctgagcctcaccacctcccggggggagccggtgcagatggtctacggcttcgcccggagcctcctcaaggccttgaaggaggacgggcaggcggtggtcgtggtctttgacgccaaggccccctccttccgccacgaggcctacgaggcctacaaggcgggccgggcccccaccccggaggacttcccccgccagctcgccttggtcaagcggctggtggaccttctgggcctggtccgcctcgaggccccgggttacgaggcggacgacgtcctgggcaccctggccaagaaggccgaaagggaggggatggaggtgcgcatcctcacgggagaccgggacttcttccagctcctctccgagaaggtctcggtcctcctgccggacgggaccctggtcaccccaaaggacgtccaggagaagtacggggtgccgccggagcgctgggtggacttccgcgccctcacgggggaccgctcggacaacatccccggggtggcggggataggggagaagaccgcccttcgactcctcgcggagtgggggagcgtggagaacctcctgaagaacctggaccgggtgaagccggactcggtccggcgcaagatagaggcgcaccttgaggacctccgcctctccttggacctggcccgcatccgcaccgacctccccttggaggtggactttaaggccctgcgccgcaggacccccgacctggagggcctgagggcctttttggaggagctggagttcggaagcctccttcatgagttcggcctcctgggaggggagaagccccgggaggaggccccctggcccccgcccgaaggggccttcgtaggcttcctcctctcccgcaaggagcccatgtgggcggagcttctggccctggcggccgccgcagagggccgggtccaccgggcaacaagcccggttgaggccctggccgacctcaaggaggcccgggggttcctggccaaggacctggccgttttggccctgcgggagggggtggccctggaccccacggacgaccccctcctggtggcctacctcctggacccggccaacaccaaccccgagggggtggcccggcgctacgggggcgagttcacggaggacgcagcggagagggccctcctctccgagaggctcttccagaacctctttccccggctttccgagaagctcctctggctctaccaggaggtggagcggcccctctcccgggtcttggcccacatggaggcccggggggtgaggctggacgtcccccttctggaggccctctcctttgagctggagaaggagatggagcgcctggagggggaggtcttccgcttggccggccaccccttcaacctcaactcccgcgaccagctggaaagggtcctctttgacgagctgggccttaccccggtgggtcggacggagaagacgggcaagcgctccaccgcccagggggccctggaggccctccggggggcccaccccatcgtggagctcatcctccagtaccgggagctttccaagctcaaaagcacctacctggaccccctgccccggctcgtccacccgcggacgggccggcttcacacccgcttcaaccagacggccacggccacgggaaggctttccagctccgaccccaacctgcagaacatccccgtgcgcacccccttggggcagcgcatccgcaaggccttcgtggccgaggaggggtggctccttttggcggcggactactcccagatcgagcttcgggtcctggcccacctctcgggggacgagaacctgaagcgggtcttccgggaggggaaggacatccataccgaaaccgccgcctggatgttcggcttagaccccgctctagtggatccaaagatgcgccgggcggccaagacggtcaacttcggcgtcctctacgggatgtccgcccacaggctctcccaggagctcggcatagactacaaggaggcggaggcctttattgagcgctacttccagagcttccccaaggtgcgggcctggatagaaaggaccctggaggagggccggacgcggggctacgtggagaccctgttcggcaggaggcgctatgtgcccgacctggcctcctctgtccgctcggtgcgggaggcggcggagcggatggccttcaacatgcccgtgcagggcaccgccgccgacctgatgaagatcgccatggtcaagctcttccccaggctaaagcccctgggggcccacctcctcctccaggtgcacgacgagctggtcctggaggtgcccgaggaccgggccgaggaggccaaggccctggtcaaggaggtcatggagaacacctaccccttggacgtgcccctcgaggtggaggtgggcgtgggtcgggactggctggaggcgaagggggattgaagcggtcgac

SEQ ID NO: 2891 - DNA, 2605 bp, Artificial Sequence
  Description of Artificial Sequence: Synthetic DNA sequence of Thermus Rt41A DNA Polymerase R767Y
atgaaatacctgctgccgaccgctgctgctggtctgctgctcctcgctgcccagccggcgatggccatggatatcggaattaattcggatccgaattccccactttttgacctggaggaaccccccaagcgggtgcttctggtggacggccaccacctggcctaccgcaccttctacgccctgagcctcaccacctcccggggggagccggtgcagatggtctacggcttcgcccggagcctcctcaaggccttgaaggaggacgggcaggcggtggtcgtggtctttgacgccaaggccccctccttccgccacgaggcctacgaggcctacaaggcgggccgggcccccaccccggaggacttcccccgccagctcgccttggtcaagcggctggtggaccttctgggcctggtccgcctcgaggccccgggttacgaggcggacgacgtcctgggcaccctggccaagaaggccgaaagggaggggatggaggtgcgcatcctcacgggagaccgggacttcttccagctcctctccgagaaggtctcggtcctcctgccggacgggaccctggtcaccccaaaggacgtccaggagaagtacggggtgccgccggagcgctgggtggacttccgcgccctcacgggggaccgctcggacaacatccccggggtggcggggataggggagaagaccgcccttcgactcctcgcggagtgggggagcgtggagaacctcctgaagaacctggaccgggtgaagccggactcggtccggcgcaagatagaggcgcaccttgaggacctccgcctctccttggacctggcccgcatccgcaccgacctccccttggaggtggactttaaggccctgcgccgcaggacccccgacctggagggcctgagggcctttttggaggagctggagttcggaagcctccttcatgagttcggcctcctgggaggggagaagccccgggaggaggccccctggcccccgcccgaaggggccttcgtaggcttcctcctctcccgcaaggagcccatgtgggcggagcttctggccctggcggccgccgcagagggccgggtccaccgggcaacaagcccggttgaggccctggccgacctcaaggaggcccgggggttcctggccaaggacctggccgttttggccctgcgggagggggtggccctggaccccacggacgaccccctcctggtggcctacctcctggacccggccaacaccaaccccgagggggtggcccggcgctacgggggcgagttcacggaggacgcagcggagagggccctcctctccgagaggctcttccagaacctctttccccggctttccgagaagctcctctggctctaccaggaggtggagcggcccctctcccgggtcttggcccacatggaggcccggggggtgaggctggacgtcccccttctggaggccctctcctttgagctggagaaggagatggagcgcctggagggggaggtcttccgcttggccggccaccccttcaacctcaactcccgcgaccagctggaaagggtcctctttgacgagctgggccttaccccggtgggtcggacggagaagacgggcaagcgctccaccgcccagggggccctggaggccctccggggggcccaccccatcgtggagctcatcctccagtaccgggagctttccaagctcaaaagcacctacctggaccccctgccccggctcgtccacccgcggacgggccggcttcacacccgcttcaaccagacggccacggccacgggaaggctttccagctccgaccccaacctgcagaacatccccgtgcgcacccccttggggcagcgcatccgcaaggccttcgtggccgaggaggggtggctccttttggcggcggactactcccagatcgagcttcgggtcctggcccacctctcgggggacgagaacctgaagcgggtcttccgggaggggaaggacatccataccgaaaccgccgcctggatgttcggcttagaccccgctctagtggatccaaagatgcgccgggcggccaagacggtcaacttcggcgtcctctacgggatgtccgcccacaggctctcccaggagctcggcatagactacaaggaggcggaggcctttattgagcgctacttccagagcttccccaaggtgcgggcctggatagaaaggaccctggaggagggccggacgcggggctacgtggagaccctgttcggcaggaggcgctatgtgcccgacctggcctcctatgtccgctcggtgcgggaggcggcggagcggatggccttcaacatgcccgtgcagggcaccgccgccgacctgatgaagatcgccatggtcaagctcttccccaggctaaagcccctgggggcccacctcctcctccaggtgcacgacgagctggtcctggaggtgcccgaggaccgggccgaggaggccaaggccctggtcaaggaggtcatggagaacacctaccccttggacgtgcccctcgaggtggaggtgggcgtgggtcgggactggctggaggcgaagggggattgaagcggtcgac

SEQ ID NO: 2892 - DNA, 2605 bp, Artificial Sequence
  Description of Artificial Sequence: Synthetic DNA sequence of Thermus Rt41A DNA Polymerase R767W
atgaaatacctgctgccgaccgctgctgctggtctgctgctcctcgctgcccagccggcgatggccatggatatcggaattaattcggatccgaattccccactttttgacctggaggaaccccccaagcgggtgcttctggtggacggccaccacctggcctaccgcaccttctacgccctgagcctcaccacctcccggggggagccggtgcagatggtctacggcttcgcccggagcctcctcaaggccttgaaggaggacgggcaggcggtggtcgtggtctttgacgccaaggccccctccttccgccacgaggcctacgaggcctacaaggcgggccgggcccccaccccggaggacttcccccgccagctcgccttggtcaagcggctggtggaccttctgggcctggtccgcctcgaggccccgggttacgaggcggacgacgtcctgggcaccctggccaagaaggccgaaagggaggggatggaggtgcgcatcctcacgggagaccgggacttcttccagctcctctccgagaaggtctcggtcctcctgccggacgggaccctggtcaccccaaaggacgtccaggagaagtacggggtgccgccggagcgctgggtggacttccgcgccctcacgggggaccgctcggacaacatccccggggtggcggggataggggagaagaccgcccttcgactcctcgcggagtgggggagcgtggagaacctcctgaagaacctggaccgggtgaagccggactcggtccggcgcaagatagaggcgcaccttgaggacctccgcctctccttggacctggcccgcatccgcaccgacctccccttggaggtggactttaaggccctgcgccgcaggacccccgacctggagggcctgagggcctttttggaggagctggagttcggaagcctccttcatgagttcggcctcctgggaggggagaagccccgggaggaggccccctggcccccgcccgaaggggccttcgtaggcttcctcctctcccgcaaggagcccatgtgggcggagcttctggccctggcggccgccgcagagggccgggtccaccgggcaacaagcccggttgaggccctggccgacctcaaggaggcccgggggttcctggccaaggacctggccgttttggccctgcgggagggggtggccctggaccccacggacgaccccctcctggtggcctacctcctggacccggccaacaccaaccccgagggggtggcccggcgctacgggggcgagttcacggaggacgcagcggagagggccctcctctccgagaggctcttccagaacctctttccccggctttccgagaagctcctctggctctaccaggaggtggagcggcccctctcccgggtcttggcccacatggaggcccggggggtgaggctggacgtcccccttctggaggccctctcctttgagctggagaaggagatggagcgcctggagggggaggtcttccgcttggccggccaccccttcaacctcaactcccgcgaccagctggaaagggtcctctttgacgagctgggccttaccccggtgggtcggacggagaagacgggcaagcgctccaccgcccagggggccctggaggccctccggggggcccaccccatcgtggagctcatcctccagtaccgggagctttccaagctcaaaagcacctacctggaccccctgccccggctcgtccacccgcggacgggccggcttcacacccgcttcaaccagacggccacggccacgggaaggctttccagctccgaccccaacctgcagaacatccccgtgcgcacccccttggggcagcgcatccgcaaggccttcgtggccgaggaggggtggctccttttggcggcggactactcccagatcgagcttcgggtcctggcccacctctcgggggacgagaacctgaagcgggtcttccgggaggggaaggacatccataccgaaaccgccgcctggatgttcggcttagaccccgctctagtggatccaaagatgcgccgggcggccaagacggtcaacttcggcgtcctctacgggatgtccgcccacaggctctcccaggagctcggcatagactacaaggaggcggaggcctttattgagcgctacttccagagcttccccaaggtgcgggcctggatagaaaggaccctggaggagggccggacgcggggctacgtggagaccctgttcggcaggaggcgctatgtgcccgacctggcctcctgggtccgctcggtgcgggaggcggcggagcggatggccttcaacatgcccgtgcagggcaccgccgccgacctgatgaagatcgccatggtcaagctcttccccaggctaaagcccctgggggcccacctcctcctccaggtgcacgacgagctggtcctggaggtgcccgaggaccgggccgaggaggccaaggccctggtcaaggaggtcatggagaacacctaccccttggacgtgcccctcgaggtggaggtgggcgtgggtcgggactggctggaggcgaagggggattgaagcggtcgac

SEQ ID NO: 2893 - DNA, 2605 bp, Artificial Sequence
  Description of Artificial Sequence: Synthetic DNA sequence of Thermus Rt41A DNA Polymerase R767P
atgaaatacctgctgccgaccgctgctgctggtctgctgctcctcgctgcccagccggcgatggccatggatatcggaattaattcggatccgaattccccactttttgacctggaggaaccccccaagcgggtgcttctggtggacggccaccacctggcctaccgcaccttctacgccctgagcctcaccacctcccggggggagccggtgcagatggtctacggcttcgcccggagcctcctcaaggccttgaaggaggacgggcaggcggtggtcgtggtctttgacgccaaggccccctccttccgccacgaggcctacgaggcctacaaggcgggccgggcccccaccccggaggacttcccccgccagctcgccttggtcaagcggctggtggaccttctgggcctggtccgcctcgaggccccgggttacgaggcggacgacgtcctgggcaccctggccaagaaggccgaaagggaggggatggaggtgcgcatcctcacgggagaccgggacttcttccagctcctctccgagaaggtctcggtcctcctgccggacgggaccctggtcaccccaaaggacgtccaggagaagtacggggtgccgccggagcgctgggtggacttccgcgccctcacgggggaccgctcggacaacatccccggggtggcggggataggggagaagaccgcccttcgactcctcgcggagtgggggagcgtggagaacctcctgaagaacctggaccgggtgaagccggactcggtccggcgcaagatagaggcgcaccttgaggacctccgcctctccttggacctggcccgcatccgcaccgacctccccttggaggtggactttaaggccctgcgccgcaggacccccgacctggagggcctgagggcctttttggaggagctggagttcggaagcctccttcatgagttcggcctcctgggaggggagaagccccgggaggaggccccctggcccccgcccgaaggggccttcgtaggcttcctcctctcccgcaaggagcccatgtgggcggagcttctggccctggcggccgccgcagagggccgggtccaccgggcaacaagcccggttgaggccctggccgacctcaaggaggcccgggggttcctggccaaggacctggccgttttggccctgcgggagggggtggccctggaccccacggacgaccccctcctggtggcctacctcctggacccggccaacaccaaccccgagggggtggcccggcgctacgggggcgagttcacggaggacgcagcggagagggccctcctctccgagaggctcttccagaacctctttccccggctttccgagaagctcctctggctctaccaggaggtggagcggcccctctcccgggtcttggcccacatggaggcccggggggtgaggctggacgtcccccttctggaggccctctcctttgagctggagaaggagatggagcgcctggagggggaggtcttccgcttggccggccaccccttcaacctcaactcccgcgaccagctggaaagggtcctctttgacgagctgggccttaccccggtgggtcggacggagaagacgggcaagcgctccaccgcccagggggccctggaggccctccggggggcccaccccatcgtggagctcatcctccagtaccgggagctttccaagctcaaaagcacctacctggaccccctgccccggctcgtccacccgcggacgggccggcttcacacccgcttcaaccagacggccacggccacgggaaggctttccagctccgaccccaacctgcagaacatccccgtgcgcacccccttggggcagcgcatccgcaaggccttcgtggccgaggaggggtggctccttttggcggcggactactcccagatcgagcttcgggtcctggcccacctctcgggggacgagaacctgaagcgggtcttccgggaggggaaggacatccataccgaaaccgccgcctggatgttcggcttagaccccgctctagtggatccaaagatgcgccgggcggccaagacggtcaacttcggcgtcctctacgggatgtccgcccacaggctctcccaggagctcggcatagactacaaggaggcggaggcctttattgagcgctacttccagagcttccccaaggtgcgggcctggatagaaaggaccctggaggagggccggacgcggggctacgtggagaccctgttcggcaggaggcgctatgtgcccgacctggcctcccctgtccgctcggtgcgggaggcggcggagcggatggccttcaacatgcccgtgcagggcaccgccgccgacctgatgaagatcgccatggtcaagctcttccccaggctaaagcccctgggggcccacctcctcctccaggtgcacgacgagctggtcctggaggtgcccgaggaccgggccgaggaggccaaggccctggtcaaggaggtcatggagaacacctaccccttggacgtgcccctcgaggtggaggtgggcgtgggtcgggactggctggaggcgaagggggattgaagcggtcgac

SEQ ID NO: 2894 - DNA, 2605 bp, Artificial Sequence
  Description of Artificial Sequence: Synthetic DNA sequence of Thermus Rt41A DNA Polymerase R767M
atgaaatacctgctgccgaccgctgctgctggtctgctgctcctcgctgcccagccggcgatggccatggatatcggaattaattcggatccgaattccccactttttgacctggaggaaccccccaagcgggtgcttctggtggacggccaccacctggcctaccgcaccttctacgccctgagcctcaccacctcccggggggagccggtgcagatggtctacggcttcgcccggagcctcctcaaggccttgaaggaggacgggcaggcggtggtcgtggtctttgacgccaaggccccctccttccgccacgaggcctacgaggcctacaaggcgggccgggcccccaccccggaggacttcccccgccagctcgccttggtcaagcggctggtggaccttctgggcctggtccgcctcgaggccccgggttacgaggcggacgacgtcctgggcaccctggccaagaaggccgaaagggaggggatggaggtgcgcatcctcacgggagaccgggacttcttccagctcctctccgagaaggtctcggtcctcctgccggacgggaccctggtcaccccaaaggacgtccaggagaagtacggggtgccgccggagcgctgggtggacttccgcgccctcacgggggaccgctcggacaacatccccggggtggcggggataggggagaagaccgcccttcgactcctcgcggagtgggggagcgtggagaacctcctgaagaacctggaccgggtgaagccggactcggtccggcgcaagatagaggcgcaccttgaggacctccgcctctccttggacctggcccgcatccgcaccgacctccccttggaggtggactttaaggccctgcgccgcaggacccccgacctggagggcctgagggcctttttggaggagctggagttcggaagcctccttcatgagttcggcctcctgggaggggagaagccccgggaggaggccccctggcccccgcccgaaggggccttcgtaggcttcctcctctcccgcaaggagcccatgtgggcggagcttctggccctggcggccgccgcagagggccgggtccaccgggcaacaagcccggttgaggccctggccgacctcaaggaggcccgggggttcctggccaaggacctggccgttttggccctgcgggagggggtggccctggaccccacggacgaccccctcctggtggcctacctcctggacccggccaacaccaaccccgagggggtggcccggcgctacgggggcgagttcacggaggacgcagcggagagggccctcctctccgagaggctcttccagaacctctttccccggctttccgagaagctcctctggctctaccaggaggtggagcggcccctctcccgggtcttggcccacatggaggcccggggggtgaggctggacgtcccccttctggaggccctctcctttgagctggagaaggagatggagcgcctggagggggaggtcttccgcttggccggccaccccttcaacctcaactcccgcgaccagctggaaagggtcctctttgacgagctgggccttaccccggtgggtcggacggagaagacgggcaagcgctccaccgcccagggggccctggaggccctccggggggcccaccccatcgtggagctcatcctccagtaccgggagctttccaagctcaaaagcacctacctggaccccctgccccggctcgtccacccgcggacgggccggcttcacacccgcttcaaccagacggccacggccacgggaaggctttccagctccgaccccaacctgcagaacatccccgtgcgcacccccttggggcagcgcatccgcaaggccttcgtggccgaggaggggtggctccttttggcggcggactactcccagatcgagcttcgggtcctggcccacctctcgggggacgagaacctgaagcgggtcttccgggaggggaaggacatccataccgaaaccgccgcctggatgttcggcttagaccccgctctagtggatccaaagatgcgccgggcggccaagacggtcaacttcggcgtcctctacgggatgtccgcccacaggctctcccaggagctcggcatagactacaaggaggcggaggcctttattgagcgctacttccagagcttccccaaggtgcgggcctggatagaaaggaccctggaggagggccggacgcggggctacgtggagaccctgttcggcaggaggcgctatgtgcccgacctggcctccatggtccgctcggtgcgggaggcggcggagcggatggccttcaacatgcccgtgcagggcaccgccgccgacctgatgaagatcgccatggtcaagctcttccccaggctaaagcccctgggggcccacctcctcctccaggtgcacgacgagctggtcctggaggtgcccgaggaccgggccgaggaggccaaggccctggtcaaggaggtcatggagaacacctaccccttggacgtgcccctcgaggtggaggtgggcgtgggtcgggactggctggaggcgaagggggattgaagcggtcgac

SEQ ID NO: 2895 - DNA, 2605 bp, Artificial Sequence
  Description of Artificial Sequence: Synthetic DNA sequence of Thermus Rt41A DNA Polymerase R767T
atgaaatacctgctgccgaccgctgctgctggtctgctgctcctcgctgcccagccggcgatggccatggatatcggaattaattcggatccgaattccccactttttgacctggaggaaccccccaagcgggtgcttctggtggacggccaccacctggcctaccgcaccttctacgccctgagcctcaccacctcccggggggagccggtgcagatggtctacggcttcgcccggagcctcctcaaggccttgaaggaggacgggcaggcggtggtcgtggtctttgacgccaaggccccctccttccgccacgaggcctacgaggcctacaaggcgggccgggcccccaccccggaggacttcccccgccagctcgccttggtcaagcggctggtggaccttctgggcctggtccgcctcgaggccccgggttacgaggcggacgacgtcctgggcaccctggccaagaaggccgaaagggaggggatggaggtgcgcatcctcacgggagaccgggacttcttccagctcctctccgagaaggtctcggtcctcctgccggacgggaccctggtcaccccaaaggacgtccaggagaagtacggggtgccgccggagcgctgggtggacttccgcgccctcacgggggaccgctcggacaacatccccggggtggcggggataggggagaagaccgcccttcgactcctcgcggagtgggggagcgtggagaacctcctgaagaacctggaccgggtgaagccggactcggtccggcgcaagatagaggcgcaccttgaggacctccgcctctccttggacctggcccgcatccgcaccgacctccccttggaggtggactttaaggccctgcgccgcaggacccccgacctggagggcctgagggcctttttggaggagctggagttcggaagcctccttcatgagttcggcctcctgggaggggagaagccccgggaggaggccccctggcccccgcccgaaggggccttcgtaggcttcctcctctcccgcaaggagcccatgtgggcggagcttctggccctggcggccgccgcagagggccgggtccaccgggcaacaagcccggttgaggccctggccgacctcaaggaggcccgggggttcctggccaaggacctggccgttttggccctgcgggagggggtggccctggaccccacggacgaccccctcctggtggcctacctcctggacccggccaacaccaaccccgagggggtggcccggcgctacgggggcgagttcacggaggacgcagcggagagggccctcctctccgagaggctcttccagaacctctttccccggctttccgagaagctcctctggctctaccaggaggtggagcggcccctctcccgggtcttggcccacatggaggcccggggggtgaggctggacgtcccccttctggaggccctctcctttgagctggagaaggagatggagcgcctggagggggaggtcttccgcttggccggccaccccttcaacctcaactcccgcgaccagctggaaagggtcctctttgacgagctgggccttaccccggtgggtcggacggagaagacgggcaagcgctccaccgcccagggggccctggaggccctccggggggcccaccccatcgtggagctcatcctccagtaccgggagctttccaagctcaaaagcacctacctggaccccctgccccggctcgtccacccgcggacgggccggcttcacacccgcttcaaccagacggccacggccacgggaaggctttccagctccgaccccaacctgcagaacatccccgtgcgcacccccttggggcagcgcatccgcaaggccttcgtggccgaggaggggtggctccttttggcggcggactactcccagatcgagcttcgggtcctggcccacctctcgggggacgagaacctgaagcgggtcttccgggaggggaaggacatccataccgaaaccgccgcctggatgttcggcttagaccccgctctagtggatccaaagatgcgccgggcggccaagacggtcaacttcggcgtcctctacgggatgtccgcccacaggctctcccaggagctcggcatagactacaaggaggcggaggcctttattgagcgctacttccagagcttccccaaggtgcgggcctggatagaaaggaccctggaggagggccggacgcggggctacgtggagaccctgttcggcaggaggcgctatgtgcccgacctggcctccactgtccgctcggtgcgggaggcggcggagcggatggccttcaacatgcccgtgcagggcaccgccgccgacctgatgaagatcgccatggtcaagctcttccccaggctaaagcccctgggggcccacctcctcctccaggtgcacgacgagctggtcctggaggtgcccgaggaccgggccgaggaggccaaggccctggtcaaggaggtcatggagaacacctaccccttggacgtgcccctcgaggtggaggtgggcgtgggtcgggactggctggaggcgaagggggattgaagcggtcgac

SEQ ID NO: 2896 - DNA, 2605 bp, Artificial Sequence
  Description of Artificial Sequence: Synthetic DNA sequence of Thermus Rt41A DNA Polymerase R767N
atgaaatacctgctgccgaccgctgctgctggtctgctgctcctcgctgcccagccggcgatggccatggatatcggaattaattcggatccgaattccccactttttgacctggaggaaccccccaagcgggtgcttctggtggacggccaccacctggcctaccgcaccttctacgccctgagcctcaccacctcccggggggagccggtgcagatggtctacggcttcgcccggagcctcctcaaggccttgaaggaggacgggcaggcggtggtcgtggtctttgacgccaaggccccctccttccgccacgaggcctacgaggcctacaaggcgggccgggcccccaccccggaggacttcccccgccagctcgccttggtcaagcggctggtggaccttctgggcctggtccgcctcgaggccccgggttacgaggcggacgacgtcctgggcaccctggccaagaaggccgaaagggaggggatggaggtgcgcatcctcacgggagaccgggacttcttccagctcctctccgagaaggtctcggtcctcctgccggacgggaccctggtcaccccaaaggacgtccaggagaagtacggggtgccgccggagcgctgggtggacttccgcgccctcacgggggaccgctcggacaacatccccggggtggcggggataggggagaagaccgcccttcgactcctcgcggagtgggggagcgtggagaacctcctgaagaacctggaccgggtgaagccggactcggtccggcgcaagatagaggcgcaccttgaggacctccgcctctccttggacctggcccgcatccgcaccgacctccccttggaggtggactttaaggccctgcgccgcaggacccccgacctggagggcctgagggcctttttggaggagctggagttcggaagcctccttcatgagttcggcctcctgggaggggagaagccccgggaggaggccccctggcccccgcccgaaggggccttcgtaggcttcctcctctcccgcaaggagcccatgtgggcggagcttctggccctggcggccgccgcagagggccgggtccaccgggcaacaagcccggttgaggccctggccgacctcaaggaggcccgggggttcctggccaaggacctggccgttttggccctgcgggagggggtggccctggaccccacggacgaccccctcctggtggcctacctcctggacccggccaacaccaaccccgagggggtggcccggcgctacgggggcgagttcacggaggacgcagcggagagggccctcctctccgagaggctcttccagaacctctttccccggctttccgagaagctcctctggctctaccaggaggtggagcggcccctctcccgggtcttggcccacatggaggcccggggggtgaggctggacgtcccccttctggaggccctctcctttgagctggagaaggagatggagcgcctggagggggaggtcttccgcttggccggccaccccttcaacctcaactcccgcgaccagctggaaagggtcctctttgacgagctgggccttaccccggtgggtcggacggagaagacgggcaagcgctccaccgcccagggggccctggaggccctccggggggcccaccccatcgtggagctcatcctccagtaccgggagctttccaagctcaaaagcacctacctggaccccctgccccggctcgtccacccgcggacgggccggcttcacacccgcttcaaccagacggccacggccacgggaaggctttccagctccgaccccaacctgcagaacatccccgtgcgcacccccttggggcagcgcatccgcaaggccttcgtggccgaggaggggtggctccttttggcggcggactactcccagatcgagcttcgggtcctggcccacctctcgggggacgagaacctgaagcgggtcttccgggaggggaaggacatccataccgaaaccgccgcctggatgttcggcttagaccccgctctagtggatccaaagatgcgccgggcggccaagacggtcaacttcggcgtcctctacgggatgtccgcccacaggctctcccaggagctcggcatagactacaaggaggcggaggcctttattgagcgctacttccagagcttccccaaggtgcgggcctggatagaaaggaccctggaggagggccggacgcggggctacgtggagaccctgttcggcaggaggcgctatgtgcccgacctggcctccaatgtccgctcggtgcgggaggcggcggagcggatggccttcaacatgcccgtgcagggcaccgccgccgacctgatgaagatcgccatggtcaagctcttccccaggctaaagcccctgggggcccacctcctcctccaggtgcacgacgagctggtcctggaggtgcccgaggaccgggccgaggaggccaaggccctggtcaaggaggtcatggagaacacctaccccttggacgtgcccctcgaggtggaggtgggcgtgggtcgggactggctggaggcgaagggggattgaagcggtcgac

SEQ ID NO: 2897 - DNA, 2605 bp, Artificial Sequence
  Description of Artificial Sequence: Synthetic DNA sequence of Thermus Rt41A DNA Polymerase R767V
atgaaatacctgctgccgaccgctgctgctggtctgctgctcctcgctgcccagccggcgatggccatggatatcggaattaattcggatccgaattccccactttttgacctggaggaaccccccaagcgggtgcttctggtggacggccaccacctggcctaccgcaccttctacgccctgagcctcaccacctcccggggggagccggtgcagatggtctacggcttcgcccggagcctcctcaaggccttgaaggaggacgggcaggcggtggtcgtggtctttgacgccaaggccccctccttccgccacgaggcctacgaggcctacaaggcgggccgggcccccaccccggaggacttcccccgccagctcgccttggtcaagcggctggtggaccttctgggcctggtccgcctcgaggccccgggttacgaggcggacgacgtcctgggcaccctggccaagaaggccgaaagggaggggatggaggtgcgcatcctcacgggagaccgggacttcttccagctcctctccgagaaggtctcggtcctcctgccggacgggaccctggtcaccccaaaggacgtccaggagaagtacggggtgccgccggagcgctgggtggacttccgcgccctcacgggggaccgctcggacaacatccccggggtggcggggataggggagaagaccgcccttcgactcctcgcggagtgggggagcgtggagaacctcctgaagaacctggaccgggtgaagccggactcggtccggcgcaagatagaggcgcaccttgaggacctccgcctctccttggacctggcccgcatccgcaccgacctccccttggaggtggactttaaggccctgcgccgcaggacccccgacctggagggcctgagggcctttttggaggagctggagttcggaagcctccttcatgagttcggcctcctgggaggggagaagccccgggaggaggccccctggcccccgcccgaaggggccttcgtaggcttcctcctctcccgcaaggagcccatgtgggcggagcttctggccctggcggccgccgcagagggccgggtccaccgggcaacaagcccggttgaggccctggccgacctcaaggaggcccgggggttcctggccaaggacctggccgttttggccctgcgggagggggtggccctggaccccacggacgaccccctcctggtggcctacctcctggacccggccaacaccaaccccgagggggtggcccggcgctacgggggcgagttcacggaggacgcagcggagagggccctcctctccgagaggctcttccagaacctctttccccggctttccgagaagctcctctggctctaccaggaggtggagcggcccctctcccgggtcttggcccacatggaggcccggggggtgaggctggacgtcccccttctggaggccctctcctttgagctggagaaggagatggagcgcctggagggggaggtcttccgcttggccggccaccccttcaacctcaactcccgcgaccagctggaaagggtcctctttgacgagctgggccttaccccggtgggtcggacggagaagacgggcaagcgctccaccgcccagggggccctggaggccctccggggggcccaccccatcgtggagctcatcctccagtaccgggagctttccaagctcaaaagcacctacctggaccccctgccccggctcgtccacccgcggacgggccggcttcacacccgcttcaaccagacggccacggccacgggaaggctttccagctccgaccccaacctgcagaacatccccgtgcgcacccccttggggcagcgcatccgcaaggccttcgtggccgaggaggggtggctccttttggcggcggactactcccagatcgagcttcgggtcctggcccacctctcgggggacgagaacctgaagcgggtcttccgggaggggaaggacatccataccgaaaccgccgcctggatgttcggcttagaccccgctctagtggatccaaagatgcgccgggcggccaagacggtcaacttcggcgtcctctacgggatgtccgcccacaggctctcccaggagctcggcatagactacaaggaggcggaggcctttattgagcgctacttccagagcttccccaaggtgcgggcctggatagaaaggaccctggaggagggccggacgcggggctacgtggagaccctgttcggcaggaggcgctatgtgcccgacctggcctccgtcgtccgctcggtgcgggaggcggcggagcggatggccttcaacatgcccgtgcagggcaccgccgccgacctgatgaagatcgccatggtcaagctcttccccaggctaaagcccctgggggcccacctcctcctccaggtgcacgacgagctggtcctggaggtgcccgaggaccgggccgaggaggccaaggccctggtcaaggaggtcatggagaacacctaccccttggacgtgcccctcgaggtggaggtgggcgtgggtcgggactggctggaggcgaagggggattgaagcggtcgac

SEQ ID NO: 2898 - DNA, 2605 bp, Artificial Sequence
  Description of Artificial Sequence: Synthetic DNA sequence of Thermus Rt41A DNA Polymerase V768A
atgaaatacctgctgccgaccgctgctgctggtctgctgctcctcgctgcccagccggcgatggccatggatatcggaattaattcggatccgaattccccactttttgacctggaggaaccccccaagcgggtgcttctggtggacggccaccacctggcctaccgcaccttctacgccctgagcctcaccacctcccggggggagccggtgcagatggtctacggcttcgcccggagcctcctcaaggccttgaaggaggacgggcaggcggtggtcgtggtctttgacgccaaggccccctccttccgccacgaggcctacgaggcctacaaggcgggccgggcccccaccccggaggacttcccccgccagctcgccttggtcaagcggctggtggaccttctgggcctggtccgcctcgaggccccgggttacgaggcggacgacgtcctgggcaccctggccaagaaggccgaaagggaggggatggaggtgcgcatcctcacgggagaccgggacttcttccagctcctctccgagaaggtctcggtcctcctgccggacgggaccctggtcaccccaaaggacgtccaggagaagtacggggtgccgccggagcgctgggtggacttccgcgccctcacgggggaccgctcggacaacatccccggggtggcggggataggggagaagaccgcccttcgactcctcgcggagtgggggagcgtggagaacctcctgaagaacctggaccgggtgaagccggactcggtccggcgcaagatagaggcgcaccttgaggacctccgcctctccttggacctggcccgcatccgcaccgacctccccttggaggtggactttaaggccctgcgccgcaggacccccgacctggagggcctgagggcctttttggaggagctggagttcggaagcctccttcatgagttcggcctcctgggaggggagaagccccgggaggaggccccctggcccccgcccgaaggggccttcgtaggcttcctcctctcccgcaaggagcccatgtgggcggagcttctggccctggcggccgccgcagagggccgggtccaccgggcaacaagcccggttgaggccctggccgacctcaaggaggcccgggggttcctggccaaggacctggccgttttggccctgcgggagggggtggccctggaccccacggacgaccccctcctggtggcctacctcctggacccggccaacaccaaccccgagggggtggcccggcgctacgggggcgagttcacggaggacgcagcggagagggccctcctctccgagaggctcttccagaacctctttccccggctttccgagaagctcctctggctctaccaggaggtggagcggcccctctcccgggtcttggcccacatggaggcccggggggtgaggctggacgtcccccttctggaggccctctcctttgagctggagaaggagatggagcgcctggagggggaggtcttccgcttggccggccaccccttcaacctcaactcccgcgaccagctggaaagggtcctctttgacgagctgggccttaccccggtgggtcggacggagaagacgggcaagcgctccaccgcccagggggccctggaggccctccggggggcccaccccatcgtggagctcatcctccagtaccgggagctttccaagctcaaaagcacctacctggaccccctgccccggctcgtccacccgcggacgggccggcttcacacccgcttcaaccagacggccacggccacgggaaggctttccagctccgaccccaacctgcagaacatccccgtgcgcacccccttggggcagcgcatccgcaaggccttcgtggccgaggaggggtggctccttttggcggcggactactcccagatcgagcttcgggtcctggcccacctctcgggggacgagaacctgaagcgggtcttccgggaggggaaggacatccataccgaaaccgccgcctggatgttcggcttagaccccgctctagtggatccaaagatgcgccgggcggccaagacggtcaacttcggcgtcctctacgggatgtccgcccacaggctctcccaggagctcggcatagactacaaggaggcggaggcctttattgagcgctacttccagagcttccccaaggtgcgggcctggatagaaaggaccctggaggagggccggacgcggggctacgtggagaccctgttcggcaggaggcgctatgtgcccgacctggcctcccgggctcgctcggtgcgggaggcggcggagcggatggccttcaacatgcccgtgcagggcaccgccgccgacctgatgaagatcgccatggtcaagctcttccccaggctaaagcccctgggggcccacctcctcctccaggtgcacgacgagctggtcctggaggtgcccgaggaccgggccgaggaggccaaggccctggtcaaggaggtcatggagaacacctaccccttggacgtgcccctcgaggtggaggtgggcgtgggtcgggactggctggaggcgaagggggattgaagcggtcgac

SEQ ID NO: 2899 - DNA, 2605 bp, Artificial Sequence
  Description of Artificial Sequence: Synthetic DNA sequence of Thermus Rt41A DNA Polymerase V768R
atgaaatacctgctgccgaccgctgctgctggtctgctgctcctcgctgcccagccggcgatggccatggatatcggaattaattcggatccgaattccccactttttgacctggaggaaccccccaagcgggtgcttctggtggacggccaccacctggcctaccgcaccttctacgccctgagcctcaccacctcccggggggagccggtgcagatggtctacggcttcgcccggagcctcctcaaggccttgaaggaggacgggcaggcggtggtcgtggtctttgacgccaaggccccctccttccgccacgaggcctacgaggcctacaaggcgggccgggcccccaccccggaggacttcccccgccagctcgccttggtcaagcggctggtggaccttctgggcctggtccgcctcgaggccccgggttacgaggcggacgacgtcctgggcaccctggccaagaaggccgaaagggaggggatggaggtgcgcatcctcacgggagaccgggacttcttccagctcctctccgagaaggtctcggtcctcctgccggacgggaccctggtcaccccaaaggacgtccaggagaagtacggggtgccgccggagcgctgggtggacttccgcgccctcacgggggaccgctcggacaacatccccggggtggcggggataggggagaagaccgcccttcgactcctcgcggagtgggggagcgtggagaacctcctgaagaacctggaccgggtgaagccggactcggtccggcgcaagatagaggcgcaccttgaggacctccgcctctccttggacctggcccgcatccgcaccgacctccccttggaggtggactttaaggccctgcgccgcaggacccccgacctggagggcctgagggcctttttggaggagctggagttcggaagcctccttcatgagttcggcctcctgggaggggagaagccccgggaggaggccccctggcccccgcccgaaggggccttcgtaggcttcctcctctcccgcaaggagcccatgtgggcggagcttctggccctggcggccgccgcagagggccgggtccaccgggcaacaagcccggttgaggccctggccgacctcaaggaggcccgggggttcctggccaaggacctggccgttttggccctgcgggagggggtggccctggaccccacggacgaccccctcctggtggcctacctcctggacccggccaacaccaaccccgagggggtggcccggcgctacgggggcgagttcacggaggacgcagcggagagggccctcctctccgagaggctcttccagaacctctttccccggctttccgagaagctcctctggctctaccaggaggtggagcggcccctctcccgggtcttggcccacatggaggcccggggggtgaggctggacgtcccccttctggaggccctctcctttgagctggagaaggagatggagcgcctggagggggaggtcttccgcttggccggccaccccttcaacctcaactcccgcgaccagctggaaagggtcctctttgacgagctgggccttaccccggtgggtcggacggagaagacgggcaagcgctccaccgcccagggggccctggaggccctccggggggcccaccccatcgtggagctcatcctccagtaccgggagctttccaagctcaaaagcacctacctggaccccctgccccggctcgtccacccgcggacgggccggcttcacacccgcttcaaccagacggccacggccacgggaaggctttccagctccgaccccaacctgcagaacatccccgtgcgcacccccttggggcagcgcatccgcaaggccttcgtggccgaggaggggtggctccttttggcggcggactactcccagatcgagcttcgggtcctggcccacctctcgggggacgagaacctgaagcgggtcttccgggaggggaaggacatccataccgaaaccgccgcctggatgttcggcttagaccccgctctagtggatccaaagatgcgccgggcggccaagacggtcaacttcggcgtcctctacgggatgtccgcccacaggctctcccaggagctcggcatagactacaaggaggcggaggcctttattgagcgctacttccagagcttccccaaggtgcgggcctggatagaaaggaccctggaggagggccggacgcggggctacgtggagaccctgttcggcaggaggcgctatgtgcccgacctggcctcccggcgacgctcggtgcgggaggcggcggagcggatggccttcaacatgcccgtgcagggcaccgccgccgacctgatgaagatcgccatggtcaagctcttccccaggctaaagcccctgggggcccacctcctcctccaggtgcacgacgagctggtcctggaggtgcccgaggaccgggccgaggaggccaaggccctggtcaaggaggtcatggagaacacctaccccttggacgtgcccctcgaggtggaggtgggcgtgggtcgggactggctggaggcgaagggggattgaagcggtcgac

SEQ ID NO: 2900 - DNA, 2605 bp, Artificial Sequence
  Description of Artificial Sequence: Synthetic DNA sequence of Thermus Rt41A DNA Polymerase V768C
atgaaatacctgctgccgaccgctgctgctggtctgctgctcctcgctgcccagccggcgatggccatggatatcggaattaattcggatccgaattccccactttttgacctggaggaaccccccaagcgggtgcttctggtggacggccaccacctggcctaccgcaccttctacgccctgagcctcaccacctcccggggggagccggtgcagatggtctacggcttcgcccggagcctcctcaaggccttgaaggaggacgggcaggcggtggtcgtggtctttgacgccaaggccccctccttccgccacgaggcctacgaggcctacaaggcgggccgggcccccaccccggaggacttcccccgccagctcgccttggtcaagcggctggtggaccttctgggcctggtccgcctcgaggccccgggttacgaggcggacgacgtcctgggcaccctggccaagaaggccgaaagggaggggatggaggtgcgcatcctcacgggagaccgggacttcttccagctcctctccgagaaggtctcggtcctcctgccggacgggaccctggtcaccccaaaggacgtccaggagaagtacggggtgccgccggagcgctgggtggacttccgcgccctcacgggggaccgctcggacaacatccccggggtggcggggataggggagaagaccgcccttcgactcctcgcggagtgggggagcgtggagaacctcctgaagaacctggaccgggtgaagccggactcggtccggcgcaagatagaggcgcaccttgaggacctccgcctctccttggacctggcccgcatccgcaccgacctccccttggaggtggactttaaggccctgcgccgcaggacccccgacctggagggcctgagggcctttttggaggagctggagttcggaagcctccttcatgagttcggcctcctgggaggggagaagccccgggaggaggccccctggcccccgcccgaaggggccttcgtaggcttcctcctctcccgcaaggagcccatgtgggcggagcttctggccctggcggccgccgcagagggccgggtccaccgggcaacaagcccggttgaggccctggccgacctcaaggaggcccgggggttcctggccaaggacctggccgttttggccctgcgggagggggtggccctggaccccacggacgaccccctcctggtggcctacctcctggacccggccaacaccaaccccgagggggtggcccggcgctacgggggcgagttcacggaggacgcagcggagagggccctcctctccgagaggctcttccagaacctctttccccggctttccgagaagctcctctggctctaccaggaggtggagcggcccctctcccgggtcttggcccacatggaggcccggggggtgaggctggacgtcccccttctggaggccctctcctttgagctggagaaggagatggagcgcctggagggggaggtcttccgcttggccggccaccccttcaacctcaactcccgcgaccagctggaaagggtcctctttgacgagctgggccttaccccggtgggtcggacggagaagacgggcaagcgctccaccgcccagggggccctggaggccctccggggggcccaccccatcgtggagctcatcctccagtaccgggagctttccaagctcaaaagcacctacctggaccccctgccccggctcgtccacccgcggacgggccggcttcacacccgcttcaaccagacggccacggccacgggaaggctttccagctccgaccccaacctgcagaacatccccgtgcgcacccccttggggcagcgcatccgcaaggccttcgtggccgaggaggggtggctccttttggcggcggactactcccagatcgagcttcgggtcctggcccacctctcgggggacgagaacctgaagcgggtcttccgggaggggaaggacatccataccgaaaccgccgcctggatgttcggcttagaccccgctctagtggatccaaagatgcgccgggcggccaagacggtcaacttcggcgtcctctacgggatgtccgcccacaggctctcccaggagctcggcatagactacaaggaggcggaggcctttattgagcgctacttccagagcttccccaaggtgcgggcctggatagaaaggaccctggaggagggccggacgcggggctacgtggagaccctgttcggcaggaggcgctatgtgcccgacctggcctcccggtgtcgctcggtgcgggaggcggcggagcggatggccttcaacatgcccgtgcagggcaccgccgccgacctgatgaagatcgccatggtcaagctcttccccaggctaaagcccctgggggcccacctcctcctccaggtgcacgacgagctggtcctggaggtgcccgaggaccgggccgaggaggccaaggccctggtcaaggaggtcatggagaacacctaccccttggacgtgcccctcgaggtggaggtgggcgtgggtcgggactggctggaggcgaagggggattgaagcggtcgac

SEQ ID NO: 2901 - DNA, 2605 bp, Artificial Sequence
  Description of Artificial Sequence: Synthetic DNA sequence of Thermus Rt41A DNA Polymerase V768G
atgaaatacctgctgccgaccgctgctgctggtctgctgctcctcgctgcccagccggcgatggccatggatatcggaattaattcggatccgaattccccactttttgacctggaggaaccccccaagcgggtgcttctggtggacggccaccacctggcctaccgcaccttctacgccctgagcctcaccacctcccggggggagccggtgcagatggtctacggcttcgcccggagcctcctcaaggccttgaaggaggacgggcaggcggtggtcgtggtctttgacgccaaggccccctccttccgccacgaggcctacgaggcctacaaggcgggccgggcccccaccccggaggacttcccccgccagctcgccttggtcaagcggctggtggaccttctgggcctggtccgcctcgaggccccgggttacgaggcggacgacgtcctgggcaccctggccaagaaggccgaaagggaggggatggaggtgcgcatcctcacgggagaccgggacttcttccagctcctctccgagaaggtctcggtcctcctgccggacgggaccctggtcaccccaaaggacgtccaggagaagtacggggtgccgccggagcgctgggtggacttccgcgccctcacgggggaccgctcggacaacatccccggggtggcggggataggggagaagaccgcccttcgactcctcgcggagtgggggagcgtggagaacctcctgaagaacctggaccgggtgaagccggactcggtccggcgcaagatagaggcgcaccttgaggacctccgcctctccttggacctggcccgcatccgcaccgacctccccttggaggtggactttaaggccctgcgccgcaggacccccgacctggagggcctgagggcctttttggaggagctggagttcggaagcctccttcatgagttcggcctcctgggaggggagaagccccgggaggaggccccctggcccccgcccgaaggggccttcgtaggcttcctcctctcccgcaaggagcccatgtgggcggagcttctggccctggcggccgccgcagagggccgggtccaccgggcaacaagcccggttgaggccctggccgacctcaaggaggcccgggggttcctggccaaggacctggccgttttggccctgcgggagggggtggccctggaccccacggacgaccccctcctggtggcctacctcctggacccggccaacaccaaccccgagggggtggcccggcgctacgggggcgagttcacggaggacgcagcggagagggccctcctctccgagaggctcttccagaacctctttccccggctttccgagaagctcctctggctctaccaggaggtggagcggcccctctcccgggtcttggcccacatggaggcccggggggtgaggctggacgtcccccttctggaggccctctcctttgagctggagaaggagatggagcgcctggagggggaggtcttccgcttggccggccaccccttcaacctcaactcccgcgaccagctggaaagggtcctctttgacgagctgggccttaccccggtgggtcggacggagaagacgggcaagcgctccaccgcccagggggccctggaggccctccggggggcccaccccatcgtggagctcatcctccagtaccgggagctttccaagctcaaaagcacctacctggaccccctgccccggctcgtccacccgcggacgggccggcttcacacccgcttcaaccagacggccacggccacgggaaggctttccagctccgaccccaacctgcagaacatccccgtgcgcacccccttggggcagcgcatccgcaaggccttcgtggccgaggaggggtggctccttttggcggcggactactcccagatcgagcttcgggtcctggcccacctctcgggggacgagaacctgaagcgggtcttccgggaggggaaggacatccataccgaaaccgccgcctggatgttcggcttagaccccgctctagtggatccaaagatgcgccgggcggccaagacggtcaacttcggcgtcctctacgggatgtccgcccacaggctctcccaggagctcggcatagactacaaggaggcggaggcctttattgagcgctacttccagagcttccccaaggtgcgggcctggatagaaaggaccctggaggagggccggacgcggggctacgtggagaccctgttcggcaggaggcgctatgtgcccgacctggcctcccggggtcgctcggtgcgggaggcggcggagcggatggccttcaacatgcccgtgcagggcaccgccgccgacctgatgaagatcgccatggtcaagctcttccccaggctaaagcccctgggggcccacctcctcctccaggtgcacgacgagctggtcctggaggtgcccgaggaccgggccgaggaggccaaggccctggtcaaggaggtcatggagaacacctaccccttggacgtgcccctcgaggtggaggtgggcgtgggtcgggactggctggaggcgaagggggattgaagcggtcgac

SEQ ID NO: 2902 - DNA, 2605 bp, Artificial Sequence
  Description of Artificial Sequence: Synthetic DNA sequence of Thermus Rt41A DNA Polymerase V768Q
atgaaatacctgctgccgaccgctgctgctggtctgctgctcctcgctgcccagccggcgatggccatggatatcggaattaattcggatccgaattccccactttttgacctggaggaaccccccaagcgggtgcttctggtggacggccaccacctggcctaccgcaccttctacgccctgagcctcaccacctcccggggggagccggtgcagatggtctacggcttcgcccggagcctcctcaaggccttgaaggaggacgggcaggcggtggtcgtggtctttgacgccaaggccccctccttccgccacgaggcctacgaggcctacaaggcgggccgggcccccaccccggaggacttcccccgccagctcgccttggtcaagcggctggtggaccttctgggcctggtccgcctcgaggccccgggttacgaggcggacgacgtcctgggcaccctggccaagaaggccgaaagggaggggatggaggtgcgcatcctcacgggagaccgggacttcttccagctcctctccgagaaggtctcggtcctcctgccggacgggaccctggtcaccccaaaggacgtccaggagaagtacggggtgccgccggagcgctgggtggacttccgcgccctcacgggggaccgctcggacaacatccccggggtggcggggataggggagaagaccgcccttcgactcctcgcggagtgggggagcgtggagaacctcctgaagaacctggaccgggtgaagccggactcggtccggcgcaagatagaggcgcaccttgaggacctccgcctctccttggacctggcccgcatccgcaccgacctccccttggaggtggactttaaggccctgcgccgcaggacccccgacctggagggcctgagggcctttttggaggagctggagttcggaagcctccttcatgagttcggcctcctgggaggggagaagccccgggaggaggccccctggcccccgcccgaaggggccttcgtaggcttcctcctctcccgcaaggagcccatgtgggcggagcttctggccctggcggccgccgcagagggccgggtccaccgggcaacaagcccggttgaggccctggccgacctcaaggaggcccgggggttcctggccaaggacctggccgttttggccctgcgggagggggtggccctggaccccacggacgaccccctcctggtggcctacctcctggacccggccaacaccaaccccgagggggtggcccggcgctacgggggcgagttcacggaggacgcagcggagagggccctcctctccgagaggctcttccagaacctctttccccggctttccgagaagctcctctggctctaccaggaggtggagcggcccctctcccgggtcttggcccacatggaggcccggggggtgaggctggacgtcccccttctggaggccctctcctttgagctggagaaggagatggagcgcctggagggggaggtcttccgcttggccggccaccccttcaacctcaactcccgcgaccagctggaaagggtcctctttgacgagctgggccttaccccggtgggtcggacggagaagacgggcaagcgctccaccgcccagggggccctggaggccctccggggggcccaccccatcgtggagctcatcctccagtaccgggagctttccaagctcaaaagcacctacctggaccccctgccccggctcgtccacccgcggacgggccggcttcacacccgcttcaaccagacggccacggccacgggaaggctttccagctccgaccccaacctgcagaacatccccgtgcgcacccccttggggcagcgcatccgcaaggccttcgtggccgaggaggggtggctccttttggcggcggactactcccagatcgagcttcgggtcctggcccacctctcgggggacgagaacctgaagcgggtcttccgggaggggaaggacatccataccgaaaccgccgcctggatgttcggcttagaccccgctctagtggatccaaagatgcgccgggcggccaagacggtcaacttcggcgtcctctacgggatgtccgcccacaggctctcccaggagctcggcatagactacaaggaggcggaggcctttattgagcgctacttccagagcttccccaaggtgcgggcctggatagaaaggaccctggaggagggccggacgcggggctacgtggagaccctgttcggcaggaggcgctatgtgcccgacctggcctcccggcaacgctcggtgcgggaggcggcggagcggatggccttcaacatgcccgtgcagggcaccgccgccgacctgatgaagatcgccatggtcaagctcttccccaggctaaagcccctgggggcccacctcctcctccaggtgcacgacgagctggtcctggaggtgcccgaggaccgggccgaggaggccaaggccctggtcaaggaggtcatggagaacacctaccccttggacgtgcccctcgaggtggaggtgggcgtgggtcgggactggctggaggcgaagggggattgaagcggtcgac

SEQ ID NO: 2903 - DNA, 2605 bp, Artificial Sequence
  Description of Artificial Sequence: Synthetic DNA sequence of Thermus Rt41A DNA Polymerase V768H
atgaaatacctgctgccgaccgctgctgctggtctgctgctcctcgctgcccagccggcgatggccatggatatcggaattaattcggatccgaattccccactttttgacctggaggaaccccccaagcgggtgcttctggtggacggccaccacctggcctaccgcaccttctacgccctgagcctcaccacctcccggggggagccggtgcagatggtctacggcttcgcccggagcctcctcaaggccttgaaggaggacgggcaggcggtggtcgtggtctttgacgccaaggccccctccttccgccacgaggcctacgaggcctacaaggcgggccgggcccccaccccggaggacttcccccgccagctcgccttggtcaagcggctggtggaccttctgggcctggtccgcctcgaggccccgggttacgaggcggacgacgtcctgggcaccctggccaagaaggccgaaagggaggggatggaggtgcgcatcctcacgggagaccgggacttcttccagctcctctccgagaaggtctcggtcctcctgccggacgggaccctggtcaccccaaaggacgtccaggagaagtacggggtgccgccggagcgctgggtggacttccgcgccctcacgggggaccgctcggacaacatccccggggtggcggggataggggagaagaccgcccttcgactcctcgcggagtgggggagcgtggagaacctcctgaagaacctggaccgggtgaagccggactcggtccggcgcaagatagaggcgcaccttgaggacctccgcctctccttggacctggcccgcatccgcaccgacctccccttggaggtggactttaaggccctgcgccgcaggacccccgacctggagggcctgagggcctttttggaggagctggagttcggaagcctccttcatgagttcggcctcctgggaggggagaagccccgggaggaggccccctggcccccgcccgaaggggccttcgtaggcttcctcctctcccgcaaggagcccatgtgggcggagcttctggccctggcggccgccgcagagggccgggtccaccgggcaacaagcccggttgaggccctggccgacctcaaggaggcccgggggttcctggccaaggacctggccgttttggccctgcgggagggggtggccctggaccccacggacgaccccctcctggtggcctacctcctggacccggccaacaccaaccccgagggggtggcccggcgctacgggggcgagttcacggaggacgcagcggagagggccctcctctccgagaggctcttccagaacctctttccccggctttccgagaagctcctctggctctaccaggaggtggagcggcccctctcccgggtcttggcccacatggaggcccggggggtgaggctggacgtcccccttctggaggccctctcctttgagctggagaaggagatggagcgcctggagggggaggtcttccgcttggccggccaccccttcaacctcaactcccgcgaccagctggaaagggtcctctttgacgagctgggccttaccccggtgggtcggacggagaagacgggcaagcgctccaccgcccagggggccctggaggccctccggggggcccaccccatcgtggagctcatcctccagtaccgggagctttccaagctcaaaagcacctacctggaccccctgccccggctcgtccacccgcggacgggccggcttcacacccgcttcaaccagacggccacggccacgggaaggctttccagctccgaccccaacctgcagaacatccccgtgcgcacccccttggggcagcgcatccgcaaggccttcgtggccgaggaggggtggctccttttggcggcggactactcccagatcgagcttcgggtcctggcccacctctcgggggacgagaacctgaagcgggtcttccgggaggggaaggacatccataccgaaaccgccgcctggatgttcggcttagaccccgctctagtggatccaaagatgcgccgggcggccaagacggtcaacttcggcgtcctctacgggatgtccgcccacaggctctcccaggagctcggcatagactacaaggaggcggaggcctttattgagcgctacttccagagcttccccaaggtgcgggcctggatagaaaggaccctggaggagggccggacgcggggctacgtggagaccctgttcggcaggaggcgctatgtgcccgacctggcctcccggcatcgctcggtgcgggaggcggcggagcggatggccttcaacatgcccgtgcagggcaccgccgccgacctgatgaagatcgccatggtcaagctcttccccaggctaaagcccctgggggcccacctcctcctccaggtgcacgacgagctggtcctggaggtgcccgaggaccgggccgaggaggccaaggccctggtcaaggaggtcatggagaacacctaccccttggacgtgcccctcgaggtggaggtgggcgtgggtcgggactggctggaggcgaagggggattgaagcggtcgac

SEQ ID NO: 2904 - DNA, 2605 bp, Artificial Sequence
  Description of Artificial Sequence: Synthetic DNA sequence of Thermus Rt41A DNA Polymerase V768I
atgaaatacctgctgccgaccgctgctgctggtctgctgctcctcgctgcccagccggcgatggccatggatatcggaattaattcggatccgaattccccactttttgacctggaggaaccccccaagcgggtgcttctggtggacggccaccacctggcctaccgcaccttctacgccctgagcctcaccacctcccggggggagccggtgcagatggtctacggcttcgcccggagcctcctcaaggccttgaaggaggacgggcaggcggtggtcgtggtctttgacgccaaggccccctccttccgccacgaggcctacgaggcctacaaggcgggccgggcccccaccccggaggacttcccccgccagctcgccttggtcaagcggctggtggaccttctgggcctggtccgcctcgaggccccgggttacgaggcggacgacgtcctgggcaccctggccaagaaggccgaaagggaggggatggaggtgcgcatcctcacgggagaccgggacttcttccagctcctctccgagaaggtctcggtcctcctgccggacgggaccctggtcaccccaaaggacgtccaggagaagtacggggtgccgccggagcgctgggtggacttccgcgccctcacgggggaccgctcggacaacatccccggggtggcggggataggggagaagaccgcccttcgactcctcgcggagtgggggagcgtggagaacctcctgaagaacctggaccgggtgaagccggactcggtccggcgcaagatagaggcgcaccttgaggacctccgcctctccttggacctggcccgcatccgcaccgacctccccttggaggtggactttaaggccctgcgccgcaggacccccgacctggagggcctgagggcctttttggaggagctggagttcggaagcctccttcatgagttcggcctcctgggaggggagaagccccgggaggaggccccctggcccccgcccgaaggggccttcgtaggcttcctcctctcccgcaaggagcccatgtgggcggagcttctggccctggcggccgccgcagagggccgggtccaccgggcaacaagcccggttgaggccctggccgacctcaaggaggcccgggggttcctggccaaggacctggccgttttggccctgcgggagggggtggccctggaccccacggacgaccccctcctggtggcctacctcctggacccggccaacaccaaccccgagggggtggcccggcgctacgggggcgagttcacggaggacgcagcggagagggccctcctctccgagaggctcttccagaacctctttccccggctttccgagaagctcctctggctctaccaggaggtggagcggcccctctcccgggtcttggcccacatggaggcccggggggtgaggctggacgtcccccttctggaggccctctcctttgagctggagaaggagatggagcgcctggagggggaggtcttccgcttggccggccaccccttcaacctcaactcccgcgaccagctggaaagggtcctctttgacgagctgggccttaccccggtgggtcggacggagaagacgggcaagcgctccaccgcccagggggccctggaggccctccggggggcccaccccatcgtggagctcatcctccagtaccgggagctttccaagctcaaaagcacctacctggaccccctgccccggctcgtccacccgcggacgggccggcttcacacccgcttcaaccagacggccacggccacgggaaggctttccagctccgaccccaacctgcagaacatccccgtgcgcacccccttggggcagcgcatccgcaaggccttcgtggccgaggaggggtggctccttttggcggcggactactcccagatcgagcttcgggtcctggcccacctctcgggggacgagaacctgaagcgggtcttccgggaggggaaggacatccataccgaaaccgccgcctggatgttcggcttagaccccgctctagtggatccaaagatgcgccgggcggccaagacggtcaacttcggcgtcctctacgggatgtccgcccacaggctctcccaggagctcggcatagactacaaggaggcggaggcctttattgagcgctacttccagagcttccccaaggtgcgggcctggatagaaaggaccctggaggagggccggacgcggggctacgtggagaccctgttcggcaggaggcgctatgtgcccgacctggcctcccggattcgctcggtgcgggaggcggcggagcggatggccttcaacatgcccgtgcagggcaccgccgccgacctgatgaagatcgccatggtcaagctcttccccaggctaaagcccctgggggcccacctcctcctccaggtgcacgacgagctggtcctggaggtgcccgaggaccgggccgaggaggccaaggccctggtcaaggaggtcatggagaacacctaccccttggacgtgcccctcgaggtggaggtgggcgtgggtcgggactggctggaggcgaagggggattgaagcggtcgac

SEQ ID NO: 2905 - DNA, 2605 bp, Artificial Sequence
  Description of Artificial Sequence: Synthetic DNA sequence of Thermus Rt41A DNA Polymerase V768L
atgaaatacctgctgccgaccgctgctgctggtctgctgctcctcgctgcccagccggcgatggccatggatatcggaattaattcggatccgaattccccactttttgacctggaggaaccccccaagcgggtgcttctggtggacggccaccacctggcctaccgcaccttctacgccctgagcctcaccacctcccggggggagccggtgcagatggtctacggcttcgcccggagcctcctcaaggccttgaaggaggacgggcaggcggtggtcgtggtctttgacgccaaggccccctccttccgccacgaggcctacgaggcctacaaggcgggccgggcccccaccccggaggacttcccccgccagctcgccttggtcaagcggctggtggaccttctgggcctggtccgcctcgaggccccgggttacgaggcggacgacgtcctgggcaccctggccaagaaggccgaaagggaggggatggaggtgcgcatcctcacgggagaccgggacttcttccagctcctctccgagaaggtctcggtcctcctgccggacgggaccctggtcaccccaaaggacgtccaggagaagtacggggtgccgccggagcgctgggtggacttccgcgccctcacgggggaccgctcggacaacatccccggggtggcggggataggggagaagaccgcccttcgactcctcgcggagtgggggagcgtggagaacctcctgaagaacctggaccgggtgaagccggactcggtccggcgcaagatagaggcgcaccttgaggacctccgcctctccttggacctggcccgcatccgcaccgacctccccttggaggtggactttaaggccctgcgccgcaggacccccgacctggagggcctgagggcctttttggaggagctggagttcggaagcctccttcatgagttcggcctcctgggaggggagaagccccgggaggaggccccctggcccccgcccgaaggggccttcgtaggcttcctcctctcccgcaaggagcccatgtgggcggagcttctggccctggcggccgccgcagagggccgggtccaccgggcaacaagcccggttgaggccctggccgacctcaaggaggcccgggggttcctggccaaggacctggccgttttggccctgcgggagggggtggccctggaccccacggacgaccccctcctggtggcctacctcctggacccggccaacaccaaccccgagggggtggcccggcgctacgggggcgagttcacggaggacgcagcggagagggccctcctctccgagaggctcttccagaacctctttccccggctttccgagaagctcctctggctctaccaggaggtggagcggcccctctcccgggtcttggcccacatggaggcccggggggtgaggctggacgtcccccttctggaggccctctcctttgagctggagaaggagatggagcgcctggagggggaggtcttccgcttggccggccaccccttcaacctcaactcccgcgaccagctggaaagggtcctctttgacgagctgggccttaccccggtgggtcggacggagaagacgggcaagcgctccaccgcccagggggccctggaggccctccggggggcccaccccatcgtggagctcatcctccagtaccgggagctttccaagctcaaaagcacctacctggaccccctgccccggctcgtccacccgcggacgggccggcttcacacccgcttcaaccagacggccacggccacgggaaggctttccagctccgaccccaacctgcagaacatccccgtgcgcacccccttggggcagcgcatccgcaaggccttcgtggccgaggaggggtggctccttttggcggcggactactcccagatcgagcttcgggtcctggcccacctctcgggggacgagaacctgaagcgggtcttccgggaggggaaggacatccataccgaaaccgccgcctggatgttcggcttagaccccgctctagtggatccaaagatgcgccgggcggccaagacggtcaacttcggcgtcctctacgggatgtccgcccacaggctctcccaggagctcggcatagactacaaggaggcggaggcctttattgagcgctacttccagagcttccccaaggtgcgggcctggatagaaaggaccctggaggagggccggacgcggggctacgtggagaccctgttcggcaggaggcgctatgtgcccgacctggcctcccggttacgctcggtgcgggaggcggcggagcggatggccttcaacatgcccgtgcagggcaccgccgccgacctgatgaagatcgccatggtcaagctcttccccaggctaaagcccctgggggcccacctcctcctccaggtgcacgacgagctggtcctggaggtgcccgaggaccgggccgaggaggccaaggccctggtcaaggaggtcatggagaacacctaccccttggacgtgcccctcgaggtggaggtgggcgtgggtcgggactggctggaggcgaagggggattgaagcggtcgac

SEQ ID NO: 2906 - DNA, 2605 bp, Artificial Sequence
  Description of Artificial Sequence: Synthetic DNA sequence of Thermus Rt41A DNA Polymerase V768K
atgaaatacctgctgccgaccgctgctgctggtctgctgctcctcgctgcccagccggcgatggccatggatatcggaattaattcggatccgaattccccactttttgacctggaggaaccccccaagcgggtgcttctggtggacggccaccacctggcctaccgcaccttctacgccctgagcctcaccacctcccggggggagccggtgcagatggtctacggcttcgcccggagcctcctcaaggccttgaaggaggacgggcaggcggtggtcgtggtctttgacgccaaggccccctccttccgccacgaggcctacgaggcctacaaggcgggccgggcccccaccccggaggacttcccccgccagctcgccttggtcaagcggctggtggaccttctgggcctggtccgcctcgaggccccgggttacgaggcggacgacgtcctgggcaccctggccaagaaggccgaaagggaggggatggaggtgcgcatcctcacgggagaccgggacttcttccagctcctctccgagaaggtctcggtcctcctgccggacgggaccctggtcaccccaaaggacgtccaggagaagtacggggtgccgccggagcgctgggtggacttccgcgccctcacgggggaccgctcggacaacatccccggggtggcggggataggggagaagaccgcccttcgactcctcgcggagtgggggagcgtggagaacctcctgaagaacctggaccgggtgaagccggactcggtccggcgcaagatagaggcgcaccttgaggacctccgcctctccttggacctggcccgcatccgcaccgacctccccttggaggtggactttaaggccctgcgccgcaggacccccgacctggagggcctgagggcctttttggaggagctggagttcggaagcctccttcatgagttcggcctcctgggaggggagaagccccgggaggaggccccctggcccccgcccgaaggggccttcgtaggcttcctcctctcccgcaaggagcccatgtgggcggagcttctggccctggcggccgccgcagagggccgggtccaccgggcaacaagcccggttgaggccctggccgacctcaaggaggcccgggggttcctggccaaggacctggccgttttggccctgcgggagggggtggccctggaccccacggacgaccccctcctggtggcctacctcctggacccggccaacaccaaccccgagggggtggcccggcgctacgggggcgagttcacggaggacgcagcggagagggccctcctctccgagaggctcttccagaacctctttccccggctttccgagaagctcctctggctctaccaggaggtggagcggcccctctcccgggtcttggcccacatggaggcccggggggtgaggctggacgtcccccttctggaggccctctcctttgagctggagaaggagatggagcgcctggagggggaggtcttccgcttggccggccaccccttcaacctcaactcccgcgaccagctggaaagggtcctctttgacgagctgggccttaccccggtgggtcggacggagaagacgggcaagcgctccaccgcccagggggccctggaggccctccggggggcccaccccatcgtggagctcatcctccagtaccgggagctttccaagctcaaaagcacctacctggaccccctgccccggctcgtccacccgcggacgggccggcttcacacccgcttcaaccagacggccacggccacgggaaggctttccagctccgaccccaacctgcagaacatccccgtgcgcacccccttggggcagcgcatccgcaaggccttcgtggccgaggaggggtggctccttttggcggcggactactcccagatcgagcttcgggtcctggcccacctctcgggggacgagaacctgaagcgggtcttccgggaggggaaggacatccataccgaaaccgccgcctggatgttcggcttagaccccgctctagtggatccaaagatgcgccgggcggccaagacggtcaacttcggcgtcctctacgggatgtccgcccacaggctctcccaggagctcggcatagactacaaggaggcggaggcctttattgagcgctacttccagagcttccccaaggtgcgggcctggatagaaaggaccctggaggagggccggacgcggggctacgtggagaccctgttcggcaggaggcgctatgtgcccgacctggcctcccggaaacgctcggtgcgggaggcggcggagcggatggccttcaacatgcccgtgcagggcaccgccgccgacctgatgaagatcgccatggtcaagctcttccccaggctaaagcccctgggggcccacctcctcctccaggtgcacgacgagctggtcctggaggtgcccgaggaccgggccgaggaggccaaggccctggtcaaggaggtcatggagaacacctaccccttggacgtgcccctcgaggtggaggtgggcgtgggtcgggactggctggaggcgaagggggattgaagcggtcgac

SEQ ID NO: 2907 - DNA, 2605 bp, Artificial Sequence
  Description of Artificial Sequence: Synthetic DNA sequence of Thermus Rt41A DNA Polymerase V768E
atgaaatacctgctgccgaccgctgctgctggtctgctgctcctcgctgcccagccggcgatggccatggatatcggaattaattcggatccgaattccccactttttgacctggaggaaccccccaagcgggtgcttctggtggacggccaccacctggcctaccgcaccttctacgccctgagcctcaccacctcccggggggagccggtgcagatggtctacggcttcgcccggagcctcctcaaggccttgaaggaggacgggcaggcggtggtcgtggtctttgacgccaaggccccctccttccgccacgaggcctacgaggcctacaaggcgggccgggcccccaccccggaggacttcccccgccagctcgccttggtcaagcggctggtggaccttctgggcctggtccgcctcgaggccccgggttacgaggcggacgacgtcctgggcaccctggccaagaaggccgaaagggaggggatggaggtgcgcatcctcacgggagaccgggacttcttccagctcctctccgagaaggtctcggtcctcctgccggacgggaccctggtcaccccaaaggacgtccaggagaagtacggggtgccgccggagcgctgggtggacttccgcgccctcacgggggaccgctcggacaacatccccggggtggcggggataggggagaagaccgcccttcgactcctcgcggagtgggggagcgtggagaacctcctgaagaacctggaccgggtgaagccggactcggtccggcgcaagatagaggcgcaccttgaggacctccgcctctccttggacctggcccgcatccgcaccgacctccccttggaggtggactttaaggccctgcgccgcaggacccccgacctggagggcctgagggcctttttggaggagctggagttcggaagcctccttcatgagttcggcctcctgggaggggagaagccccgggaggaggccccctggcccccgcccgaaggggccttcgtaggcttcctcctctcccgcaaggagcccatgtgggcggagcttctggccctggcggccgccgcagagggccgggtccaccgggcaacaagcccggttgaggccctggccgacctcaaggaggcccgggggttcctggccaaggacctggccgttttggccctgcgggagggggtggccctggaccccacggacgaccccctcctggtggcctacctcctggacccggccaacaccaaccccgagggggtggcccggcgctacgggggcgagttcacggaggacgcagcggagagggccctcctctccgagaggctcttccagaacctctttccccggctttccgagaagctcctctggctctaccaggaggtggagcggcccctctcccgggtcttggcccacatggaggcccggggggtgaggctggacgtcccccttctggaggccctctcctttgagctggagaaggagatggagcgcctggagggggaggtcttccgcttggccggccaccccttcaacctcaactcccgcgaccagctggaaagggtcctctttgacgagctgggccttaccccggtgggtcggacggagaagacgggcaagcgctccaccgcccagggggccctggaggccctccggggggcccaccccatcgtggagctcatcctccagtaccgggagctttccaagctcaaaagcacctacctggaccccctgccccggctcgtccacccgcggacgggccggcttcacacccgcttcaaccagacggccacggccacgggaaggctttccagctccgaccccaacctgcagaacatccccgtgcgcacccccttggggcagcgcatccgcaaggccttcgtggccgaggaggggtggctccttttggcggcggactactcccagatcgagcttcgggtcctggcccacctctcgggggacgagaacctgaagcgggtcttccgggaggggaaggacatccataccgaaaccgccgcctggatgttcggcttagaccccgctctagtggatccaaagatgcgccgggcggccaagacggtcaacttcggcgtcctctacgggatgtccgcccacaggctctcccaggagctcggcatagactacaaggaggcggaggcctttattgagcgctacttccagagcttccccaaggtgcgggcctggatagaaaggaccctggaggagggccggacgcggggctacgtggagaccctgttcggcaggaggcgctatgtgcccgacctggcctcccgggaacgctcggtgcgggaggcggcggagcggatggccttcaacatgcccgtgcagggcaccgccgccgacctgatgaagatcgccatggtcaagctcttccccaggctaaagcccctgggggcccacctcctcctccaggtgcacgacgagctggtcctggaggtgcccgaggaccgggccgaggaggccaaggccctggtcaaggaggtcatggagaacacctaccccttggacgtgcccctcgaggtggaggtgggcgtgggtcgggactggctggaggcgaagggggattgaagcggtcgac

SEQ ID NO: 2908 - DNA, 2605 bp, Artificial Sequence
  Description of Artificial Sequence: Synthetic DNA sequence of Thermus Rt41A DNA Polymerase V768D
atgaaatacctgctgccgaccgctgctgctggtctgctgctcctcgctgcccagccggcgatggccatggatatcggaattaattcggatccgaattccccactttttgacctggaggaaccccccaagcgggtgcttctggtggacggccaccacctggcctaccgcaccttctacgccctgagcctcaccacctcccggggggagccggtgcagatggtctacggcttcgcccggagcctcctcaaggccttgaaggaggacgggcaggcggtggtcgtggtctttgacgccaaggccccctccttccgccacgaggcctacgaggcctacaaggcgggccgggcccccaccccggaggacttcccccgccagctcgccttggtcaagcggctggtggaccttctgggcctggtccgcctcgaggccccgggttacgaggcggacgacgtcctgggcaccctggccaagaaggccgaaagggaggggatggaggtgcgcatcctcacgggagaccgggacttcttccagctcctctccgagaaggtctcggtcctcctgccggacgggaccctggtcaccccaaaggacgtccaggagaagtacggggtgccgccggagcgctgggtggacttccgcgccctcacgggggaccgctcggacaacatccccggggtggcggggataggggagaagaccgcccttcgactcctcgcggagtgggggagcgtggagaacctcctgaagaacctggaccgggtgaagccggactcggtccggcgcaagatagaggcgcaccttgaggacctccgcctctccttggacctggcccgcatccgcaccgacctccccttggaggtggactttaaggccctgcgccgcaggacccccgacctggagggcctgagggcctttttggaggagctggagttcggaagcctccttcatgagttcggcctcctgggaggggagaagccccgggaggaggccccctggcccccgcccgaaggggccttcgtaggcttcctcctctcccgcaaggagcccatgtgggcggagcttctggccctggcggccgccgcagagggccgggtccaccgggcaacaagcccggttgaggccctggccgacctcaaggaggcccgggggttcctggccaaggacctggccgttttggccctgcgggagggggtggccctggaccccacggacgaccccctcctggtggcctacctcctggacccggccaacaccaaccccgagggggtggcccggcgctacgggggcgagttcacggaggacgcagcggagagggccctcctctccgagaggctcttccagaacctctttccccggctttccgagaagctcctctggctctaccaggaggtggagcggcccctctcccgggtcttggcccacatggaggcccggggggtgaggctggacgtcccccttctggaggccctctcctttgagctggagaaggagatggagcgcctggagggggaggtcttccgcttggccggccaccccttcaacctcaactcccgcgaccagctggaaagggtcctctttgacgagctgggccttaccccggtgggtcggacggagaagacgggcaagcgctccaccgcccagggggccctggaggccctccggggggcccaccccatcgtggagctcatcctccagtaccgggagctttccaagctcaaaagcacctacctggaccccctgccccggctcgtccacccgcggacgggccggcttcacacccgcttcaaccagacggccacggccacgggaaggctttccagctccgaccccaacctgcagaacatccccgtgcgcacccccttggggcagcgcatccgcaaggccttcgtggccgaggaggggtggctccttttggcggcggactactcccagatcgagcttcgggtcctggcccacctctcgggggacgagaacctgaagcgggtcttccgggaggggaaggacatccataccgaaaccgccgcctggatgttcggcttagaccccgctctagtggatccaaagatgcgccgggcggccaagacggtcaacttcggcgtcctctacgggatgtccgcccacaggctctcccaggagctcggcatagactacaaggaggcggaggcctttattgagcgctacttccagagcttccccaaggtgcgggcctggatagaaaggaccctggaggagggccggacgcggggctacgtggagaccctgttcggcaggaggcgctatgtgcccgacctggcctcccgggatcgctcggtgcgggaggcggcggagcggatggccttcaacatgcccgtgcagggcaccgccgccgacctgatgaagatcgccatggtcaagctcttccccaggctaaagcccctgggggcccacctcctcctccaggtgcacgacgagctggtcctggaggtgcccgaggaccgggccgaggaggccaaggccctggtcaaggaggtcatggagaacacctaccccttggacgtgcccctcgaggtggaggtgggcgtgggtcgggactggctggaggcgaagggggattgaagcggtcgac

SEQ ID NO: 2909 - DNA, 2605 bp, Artificial Sequence
  Description of Artificial Sequence: Synthetic DNA sequence of Thermus Rt41A DNA Polymerase V768F
atgaaatacctgctgccgaccgctgctgctggtctgctgctcctcgctgcccagccggcgatggccatggatatcggaattaattcggatccgaattccccactttttgacctggaggaaccccccaagcgggtgcttctggtggacggccaccacctggcctaccgcaccttctacgccctgagcctcaccacctcccggggggagccggtgcagatggtctacggcttcgcccggagcctcctcaaggccttgaaggaggacgggcaggcggtggtcgtggtctttgacgccaaggccccctccttccgccacgaggcctacgaggcctacaaggcgggccgggcccccaccccggaggacttcccccgccagctcgccttggtcaagcggctggtggaccttctgggcctggtccgcctcgaggccccgggttacgaggcggacgacgtcctgggcaccctggccaagaaggccgaaagggaggggatggaggtgcgcatcctcacgggagaccgggacttcttccagctcctctccgagaaggtctcggtcctcctgccggacgggaccctggtcaccccaaaggacgtccaggagaagtacggggtgccgccggagcgctgggtggacttccgcgccctcacgggggaccgctcggacaacatccccggggtggcggggataggggagaagaccgcccttcgactcctcgcggagtgggggagcgtggagaacctcctgaagaacctggaccgggtgaagccggactcggtccggcgcaagatagaggcgcaccttgaggacctccgcctctccttggacctggcccgcatccgcaccgacctccccttggaggtggactttaaggccctgcgccgcaggacccccgacctggagggcctgagggcctttttggaggagctggagttcggaagcctccttcatgagttcggcctcctgggaggggagaagccccgggaggaggccccctggcccccgcccgaaggggccttcgtaggcttcctcctctcccgcaaggagcccatgtgggcggagcttctggccctggcggccgccgcagagggccgggtccaccgggcaacaagcccggttgaggccctggccgacctcaaggaggcccgggggttcctggccaaggacctggccgttttggccctgcgggagggggtggccctggaccccacggacgaccccctcctggtggcctacctcctggacccggccaacaccaaccccgagggggtggcccggcgctacgggggcgagttcacggaggacgcagcggagagggccctcctctccgagaggctcttccagaacctctttccccggctttccgagaagctcctctggctctaccaggaggtggagcggcccctctcccgggtcttggcccacatggaggcccggggggtgaggctggacgtcccccttctggaggccctctcctttgagctggagaaggagatggagcgcctggagggggaggtcttccgcttggccggccaccccttcaacctcaactcccgcgaccagctggaaagggtcctctttgacgagctgggccttaccccggtgggtcggacggagaagacgggcaagcgctccaccgcccagggggccctggaggccctccggggggcccaccccatcgtggagctcatcctccagtaccgggagctttccaagctcaaaagcacctacctggaccccctgccccggctcgtccacccgcggacgggccggcttcacacccgcttcaaccagacggccacggccacgggaaggctttccagctccgaccccaacctgcagaacatccccgtgcgcacccccttggggcagcgcatccgcaaggccttcgtggccgaggaggggtggctccttttggcggcggactactcccagatcgagcttcgggtcctggcccacctctcgggggacgagaacctgaagcgggtcttccgggaggggaaggacatccataccgaaaccgccgcctggatgttcggcttagaccccgctctagtggatccaaagatgcgccgggcggccaagacggtcaacttcggcgtcctctacgggatgtccgcccacaggctctcccaggagctcggcatagactacaaggaggcggaggcctttattgagcgctacttccagagcttccccaaggtgcgggcctggatagaaaggaccctggaggagggccggacgcggggctacgtggagaccctgttcggcaggaggcgctatgtgcccgacctggcctcccggtttcgctcggtgcgggaggcggcggagcggatggccttcaacatgcccgtgcagggcaccgccgccgacctgatgaagatcgccatggtcaagctcttccccaggctaaagcccctgggggcccacctcctcctccaggtgcacgacgagctggtcctggaggtgcccgaggaccgggccgaggaggccaaggccctggtcaaggaggtcatggagaacacctaccccttggacgtgcccctcgaggtggaggtgggcgtgggtcgggactggctggaggcgaagggggattgaagcggtcgac

SEQ ID NO: 2910 - DNA, 2605 bp, Artificial Sequence
  Description of Artificial Sequence: Synthetic DNA sequence of Thermus Rt41A DNA Polymerase V768S
atgaaatacctgctgccgaccgctgctgctggtctgctgctcctcgctgcccagccggcgatggccatggatatcggaattaattcggatccgaattccccactttttgacctggaggaaccccccaagcgggtgcttctggtggacggccaccacctggcctaccgcaccttctacgccctgagcctcaccacctcccggggggagccggtgcagatggtctacggcttcgcccggagcctcctcaaggccttgaaggaggacgggcaggcggtggtcgtggtctttgacgccaaggccccctccttccgccacgaggcctacgaggcctacaaggcgggccgggcccccaccccggaggacttcccccgccagctcgccttggtcaagcggctggtggaccttctgggcctggtccgcctcgaggccccgggttacgaggcggacgacgtcctgggcaccctggccaagaaggccgaaagggaggggatggaggtgcgcatcctcacgggagaccgggacttcttccagctcctctccgagaaggtctcggtcctcctgccggacgggaccctggtcaccccaaaggacgtccaggagaagtacggggtgccgccggagcgctgggtggacttccgcgccctcacgggggaccgctcggacaacatccccggggtggcggggataggggagaagaccgcccttcgactcctcgcggagtgggggagcgtggagaacctcctgaagaacctggaccgggtgaagccggactcggtccggcgcaagatagaggcgcaccttgaggacctccgcctctccttggacctggcccgcatccgcaccgacctccccttggaggtggactttaaggccctgcgccgcaggacccccgacctggagggcctgagggcctttttggaggagctggagttcggaagcctccttcatgagttcggcctcctgggaggggagaagccccgggaggaggccccctggcccccgcccgaaggggccttcgtaggcttcctcctctcccgcaaggagcccatgtgggcggagcttctggccctggcggccgccgcagagggccgggtccaccgggcaacaagcccggttgaggccctggccgacctcaaggaggcccgggggttcctggccaaggacctggccgttttggccctgcgggagggggtggccctggaccccacggacgaccccctcctggtggcctacctcctggacccggccaacaccaaccccgagggggtggcccggcgctacgggggcgagttcacggaggacgcagcggagagggccctcctctccgagaggctcttccagaacctctttccccggctttccgagaagctcctctggctctaccaggaggtggagcggcccctctcccgggtcttggcccacatggaggcccggggggtgaggctggacgtcccccttctggaggccctctcctttgagctggagaaggagatggagcgcctggagggggaggtcttccgcttggccggccaccccttcaacctcaactcccgcgaccagctggaaagggtcctctttgacgagctgggccttaccccggtgggtcggacggagaagacgggcaagcgctccaccgcccagggggccctggaggccctccggggggcccaccccatcgtggagctcatcctccagtaccgggagctttccaagctcaaaagcacctacctggaccccctgccccggctcgtccacccgcggacgggccggcttcacacccgcttcaaccagacggccacggccacgggaaggctttccagctccgaccccaacctgcagaacatccccgtgcgcacccccttggggcagcgcatccgcaaggccttcgtggccgaggaggggtggctccttttggcggcggactactcccagatcgagcttcgggtcctggcccacctctcgggggacgagaacctgaagcgggtcttccgggaggggaaggacatccataccgaaaccgccgcctggatgttcggcttagaccccgctctagtggatccaaagatgcgccgggcggccaagacggtcaacttcggcgtcctctacgggatgtccgcccacaggctctcccaggagctcggcatagactacaaggaggcggaggcctttattgagcgctacttccagagcttccccaaggtgcgggcctggatagaaaggaccctggaggagggccggacgcggggctacgtggagaccctgttcggcaggaggcgctatgtgcccgacctggcctcccggtctcgctcggtgcgggaggcggcggagcggatggccttcaacatgcccgtgcagggcaccgccgccgacctgatgaagatcgccatggtcaagctcttccccaggctaaagcccctgggggcccacctcctcctccaggtgcacgacgagctggtcctggaggtgcccgaggaccgggccgaggaggccaaggccctggtcaaggaggtcatggagaacacctaccccttggacgtgcccctcgaggtggaggtgggcgtgggtcgggactggctggaggcgaagggggattgaagcggtcgac

SEQ ID NO: 2911 - DNA, 2605 bp, Artificial Sequence
  Description of Artificial Sequence: Synthetic DNA sequence of Thermus Rt41A DNA Polymerase V768Y
atgaaatacctgctgccgaccgctgctgctggtctgctgctcctcgctgcccagccggcgatggccatggatatcggaattaattcggatccgaattccccactttttgacctggaggaaccccccaagcgggtgcttctggtggacggccaccacctggcctaccgcaccttctacgccctgagcctcaccacctcccggggggagccggtgcagatggtctacggcttcgcccggagcctcctcaaggccttgaaggaggacgggcaggcggtggtcgtggtctttgacgccaaggccccctccttccgccacgaggcctacgaggcctacaaggcgggccgggcccccaccccggaggacttcccccgccagctcgccttggtcaagcggctggtggaccttctgggcctggtccgcctcgaggccccgggttacgaggcggacgacgtcctgggcaccctggccaagaaggccgaaagggaggggatggaggtgcgcatcctcacgggagaccgggacttcttccagctcctctccgagaaggtctcggtcctcctgccggacgggaccctggtcaccccaaaggacgtccaggagaagtacggggtgccgccggagcgctgggtggacttccgcgccctcacgggggaccgctcggacaacatccccggggtggcggggataggggagaagaccgcccttcgactcctcgcggagtgggggagcgtggagaacctcctgaagaacctggaccgggtgaagccggactcggtccggcgcaagatagaggcgcaccttgaggacctccgcctctccttggacctggcccgcatccgcaccgacctccccttggaggtggactttaaggccctgcgccgcaggacccccgacctggagggcctgagggcctttttggaggagctggagttcggaagcctccttcatgagttcggcctcctgggaggggagaagccccgggaggaggccccctggcccccgcccgaaggggccttcgtaggcttcctcctctcccgcaaggagcccatgtgggcggagcttctggccctggcggccgccgcagagggccgggtccaccgggcaacaagcccggttgaggccctggccgacctcaaggaggcccgggggttcctggccaaggacctggccgttttggccctgcgggagggggtggccctggaccccacggacgaccccctcctggtggcctacctcctggacccggccaacaccaaccccgagggggtggcccggcgctacgggggcgagttcacggaggacgcagcggagagggccctcctctccgagaggctcttccagaacctctttccccggctttccgagaagctcctctggctctaccaggaggtggagcggcccctctcccgggtcttggcccacatggaggcccggggggtgaggctggacgtcccccttctggaggccctctcctttgagctggagaaggagatggagcgcctggagggggaggtcttccgcttggccggccaccccttcaacctcaactcccgcgaccagctggaaagggtcctctttgacgagctgggccttaccccggtgggtcggacggagaagacgggcaagcgctccaccgcccagggggccctggaggccctccggggggcccaccccatcgtggagctcatcctccagtaccgggagctttccaagctcaaaagcacctacctggaccccctgccccggctcgtccacccgcggacgggccggcttcacacccgcttcaaccagacggccacggccacgggaaggctttccagctccgaccccaacctgcagaacatccccgtgcgcacccccttggggcagcgcatccgcaaggccttcgtggccgaggaggggtggctccttttggcggcggactactcccagatcgagcttcgggtcctggcccacctctcgggggacgagaacctgaagcgggtcttccgggaggggaaggacatccataccgaaaccgccgcctggatgttcggcttagaccccgctctagtggatccaaagatgcgccgggcggccaagacggtcaacttcggcgtcctctacgggatgtccgcccacaggctctcccaggagctcggcatagactacaaggaggcggaggcctttattgagcgctacttccagagcttccccaaggtgcgggcctggatagaaaggaccctggaggagggccggacgcggggctacgtggagaccctgttcggcaggaggcgctatgtgcccgacctggcctcccggtatcgctcggtgcgggaggcggcggagcggatggccttcaacatgcccgtgcagggcaccgccgccgacctgatgaagatcgccatggtcaagctcttccccaggctaaagcccctgggggcccacctcctcctccaggtgcacgacgagctggtcctggaggtgcccgaggaccgggccgaggaggccaaggccctggtcaaggaggtcatggagaacacctaccccttggacgtgcccctcgaggtggaggtgggcgtgggtcgggactggctggaggcgaagggggattgaagcggtcgac

SEQ ID NO: 2912 - DNA, 2605 bp, Artificial Sequence
  Description of Artificial Sequence: Synthetic DNA sequence of Thermus Rt41A DNA Polymerase V768W
atgaaatacctgctgccgaccgctgctgctggtctgctgctcctcgctgcccagccggcgatggccatggatatcggaattaattcggatccgaattccccactttttgacctggaggaaccccccaagcgggtgcttctggtggacggccaccacctggcctaccgcaccttctacgccctgagcctcaccacctcccggggggagccggtgcagatggtctacggcttcgcccggagcctcctcaaggccttgaaggaggacgggcaggcggtggtcgtggtctttgacgccaaggccccctccttccgccacgaggcctacgaggcctacaaggcgggccgggcccccaccccggaggacttcccccgccagctcgccttggtcaagcggctggtggaccttctgggcctggtccgcctcgaggccccgggttacgaggcggacgacgtcctgggcaccctggccaagaaggccgaaagggaggggatggaggtgcgcatcctcacgggagaccgggacttcttccagctcctctccgagaaggtctcggtcctcctgccggacgggaccctggtcaccccaaaggacgtccaggagaagtacggggtgccgccggagcgctgggtggacttccgcgccctcacgggggaccgctcggacaacatccccggggtggcggggataggggagaagaccgcccttcgactcctcgcggagtgggggagcgtggagaacctcctgaagaacctggaccgggtgaagccggactcggtccggcgcaagatagaggcgcaccttgaggacctccgcctctccttggacctggcccgcatccgcaccgacctccccttggaggtggactttaaggccctgcgccgcaggacccccgacctggagggcctgagggcctttttggaggagctggagttcggaagcctccttcatgagttcggcctcctgggaggggagaagccccgggaggaggccccctggcccccgcccgaaggggccttcgtaggcttcctcctctcccgcaaggagcccatgtgggcggagcttctggccctggcggccgccgcagagggccgggtccaccgggcaacaagcccggttgaggccctggccgacctcaaggaggcccgggggttcctggccaaggacctggccgttttggccctgcgggagggggtggccctggaccccacggacgaccccctcctggtggcctacctcctggacccggccaacaccaaccccgagggggtggcccggcgctacgggggcgagttcacggaggacgcagcggagagggccctcctctccgagaggctcttccagaacctctttccccggctttccgagaagctcctctggctctaccaggaggtggagcggcccctctcccgggtcttggcccacatggaggcccggggggtgaggctggacgtcccccttctggaggccctctcctttgagctggagaaggagatggagcgcctggagggggaggtcttccgcttggccggccaccccttcaacctcaactcccgcgaccagctggaaagggtcctctttgacgagctgggccttaccccggtgggtcggacggagaagacgggcaagcgctccaccgcccagggggccctggaggccctccggggggcccaccccatcgtggagctcatcctccagtaccgggagctttccaagctcaaaagcacctacctggaccccctgccccggctcgtccacccgcggacgggccggcttcacacccgcttcaaccagacggccacggccacgggaaggctttccagctccgaccccaacctgcagaacatccccgtgcgcacccccttggggcagcgcatccgcaaggccttcgtggccgaggaggggtggctccttttggcggcggactactcccagatcgagcttcgggtcctggcccacctctcgggggacgagaacctgaagcgggtcttccgggaggggaaggacatccataccgaaaccgccgcctggatgttcggcttagaccccgctctagtggatccaaagatgcgccgggcggccaagacggtcaacttcggcgtcctctacgggatgtccgcccacaggctctcccaggagctcggcatagactacaaggaggcggaggcctttattgagcgctacttccagagcttccccaaggtgcgggcctggatagaaaggaccctggaggagggccggacgcggggctacgtggagaccctgttcggcaggaggcgctatgtgcccgacctggcctcccggtggcgctcggtgcgggaggcggcggagcggatggccttcaacatgcccgtgcagggcaccgccgccgacctgatgaagatcgccatggtcaagctcttccccaggctaaagcccctgggggcccacctcctcctccaggtgcacgacgagctggtcctggaggtgcccgaggaccgggccgaggaggccaaggccctggtcaaggaggtcatggagaacacctaccccttggacgtgcccctcgaggtggaggtgggcgtgggtcgggactggctggaggcgaagggggattgaagcggtcgac

SEQ ID NO: 2913 - DNA, 2605 bp, Artificial Sequence
  Description of Artificial Sequence: Synthetic DNA sequence of Thermus Rt41A DNA Polymerase V768P
atgaaatacctgctgccgaccgctgctgctggtctgctgctcctcgctgcccagccggcgatggccatggatatcggaattaattcggatccgaattccccactttttgacctggaggaaccccccaagcgggtgcttctggtggacggccaccacctggcctaccgcaccttctacgccctgagcctcaccacctcccggggggagccggtgcagatggtctacggcttcgcccggagcctcctcaaggccttgaaggaggacgggcaggcggtggtcgtggtctttgacgccaaggccccctccttccgccacgaggcctacgaggcctacaaggcgggccgggcccccaccccggaggacttcccccgccagctcgccttggtcaagcggctggtggaccttctgggcctggtccgcctcgaggccccgggttacgaggcggacgacgtcctgggcaccctggccaagaaggccgaaagggaggggatggaggtgcgcatcctcacgggagaccgggacttcttccagctcctctccgagaaggtctcggtcctcctgccggacgggaccctggtcaccccaaaggacgtccaggagaagtacggggtgccgccggagcgctgggtggacttccgcgccctcacgggggaccgctcggacaacatccccggggtggcggggataggggagaagaccgcccttcgactcctcgcggagtgggggagcgtggagaacctcctgaagaacctggaccgggtgaagccggactcggtccggcgcaagatagaggcgcaccttgaggacctccgcctctccttggacctggcccgcatccgcaccgacctccccttggaggtggactttaaggccctgcgccgcaggacccccgacctggagggcctgagggcctttttggaggagctggagttcggaagcctccttcatgagttcggcctcctgggaggggagaagccccgggaggaggccccctggcccccgcccgaaggggccttcgtaggcttcctcctctcccgcaaggagcccatgtgggcggagcttctggccctggcggccgccgcagagggccgggtccaccgggcaacaagcccggttgaggccctggccgacctcaaggaggcccgggggttcctggccaaggacctggccgttttggccctgcgggagggggtggccctggaccccacggacgaccccctcctggtggcctacctcctggacccggccaacaccaaccccgagggggtggcccggcgctacgggggcgagttcacggaggacgcagcggagagggccctcctctccgagaggctcttccagaacctctttccccggctttccgagaagctcctctggctctaccaggaggtggagcggcccctctcccgggtcttggcccacatggaggcccggggggtgaggctggacgtcccccttctggaggccctctcctttgagctggagaaggagatggagcgcctggagggggaggtcttccgcttggccggccaccccttcaacctcaactcccgcgaccagctggaaagggtcctctttgacgagctgggccttaccccggtgggtcggacggagaagacgggcaagcgctccaccgcccagggggccctggaggccctccggggggcccaccccatcgtggagctcatcctccagtaccgggagctttccaagctcaaaagcacctacctggaccccctgccccggctcgtccacccgcggacgggccggcttcacacccgcttcaaccagacggccacggccacgggaaggctttccagctccgaccccaacctgcagaacatccccgtgcgcacccccttggggcagcgcatccgcaaggccttcgtggccgaggaggggtggctccttttggcggcggactactcccagatcgagcttcgggtcctggcccacctctcgggggacgagaacctgaagcgggtcttccgggaggggaaggacatccataccgaaaccgccgcctggatgttcggcttagaccccgctctagtggatccaaagatgcgccgggcggccaagacggtcaacttcggcgtcctctacgggatgtccgcccacaggctctcccaggagctcggcatagactacaaggaggcggaggcctttattgagcgctacttccagagcttccccaaggtgcgggcctggatagaaaggaccctggaggagggccggacgcggggctacgtggagaccctgttcggcaggaggcgctatgtgcccgacctggcctcccggcctcgctcggtgcgggaggcggcggagcggatggccttcaacatgcccgtgcagggcaccgccgccgacctgatgaagatcgccatggtcaagctcttccccaggctaaagcccctgggggcccacctcctcctccaggtgcacgacgagctggtcctggaggtgcccgaggaccgggccgaggaggccaaggccctggtcaaggaggtcatggagaacacctaccccttggacgtgcccctcgaggtggaggtgggcgtgggtcgggactggctggaggcgaagggggattgaagcggtcgac

SEQ ID NO: 2914 - DNA, 2605 bp, Artificial Sequence
  Description of Artificial Sequence: Synthetic DNA sequence of Thermus Rt41A DNA Polymerase V768M
atgaaatacctgctgccgaccgctgctgctggtctgctgctcctcgctgcccagccggcgatggccatggatatcggaattaattcggatccgaattccccactttttgacctggaggaaccccccaagcgggtgcttctggtggacggccaccacctggcctaccgcaccttctacgccctgagcctcaccacctcccggggggagccggtgcagatggtctacggcttcgcccggagcctcctcaaggccttgaaggaggacgggcaggcggtggtcgtggtctttgacgccaaggccccctccttccgccacgaggcctacgaggcctacaaggcgggccgggcccccaccccggaggacttcccccgccagctcgccttggtcaagcggctggtggaccttctgggcctggtccgcctcgaggccccgggttacgaggcggacgacgtcctgggcaccctggccaagaaggccgaaagggaggggatggaggtgcgcatcctcacgggagaccgggacttcttccagctcctctccgagaaggtctcggtcctcctgccggacgggaccctggtcaccccaaaggacgtccaggagaagtacggggtgccgccggagcgctgggtggacttccgcgccctcacgggggaccgctcggacaacatccccggggtggcggggataggggagaagaccgcccttcgactcctcgcggagtgggggagcgtggagaacctcctgaagaacctggaccgggtgaagccggactcggtccggcgcaagatagaggcgcaccttgaggacctccgcctctccttggacctggcccgcatccgcaccgacctccccttggaggtggactttaaggccctgcgccgcaggacccccgacctggagggcctgagggcctttttggaggagctggagttcggaagcctccttcatgagttcggcctcctgggaggggagaagccccgggaggaggccccctggcccccgcccgaaggggccttcgtaggcttcctcctctcccgcaaggagcccatgtgggcggagcttctggccctggcggccgccgcagagggccgggtccaccgggcaacaagcccggttgaggccctggccgacctcaaggaggcccgggggttcctggccaaggacctggccgttttggccctgcgggagggggtggccctggaccccacggacgaccccctcctggtggcctacctcctggacccggccaacaccaaccccgagggggtggcccggcgctacgggggcgagttcacggaggacgcagcggagagggccctcctctccgagaggctcttccagaacctctttccccggctttccgagaagctcctctggctctaccaggaggtggagcggcccctctcccgggtcttggcccacatggaggcccggggggtgaggctggacgtcccccttctggaggccctctcctttgagctggagaaggagatggagcgcctggagggggaggtcttccgcttggccggccaccccttcaacctcaactcccgcgaccagctggaaagggtcctctttgacgagctgggccttaccccggtgggtcggacggagaagacgggcaagcgctccaccgcccagggggccctggaggccctccggggggcccaccccatcgtggagctcatcctccagtaccgggagctttccaagctcaaaagcacctacctggaccccctgccccggctcgtccacccgcggacgggccggcttcacacccgcttcaaccagacggccacggccacgggaaggctttccagctccgaccccaacctgcagaacatccccgtgcgcacccccttggggcagcgcatccgcaaggccttcgtggccgaggaggggtggctccttttggcggcggactactcccagatcgagcttcgggtcctggcccacctctcgggggacgagaacctgaagcgggtcttccgggaggggaaggacatccataccgaaaccgccgcctggatgttcggcttagaccccgctctagtggatccaaagatgcgccgggcggccaagacggtcaacttcggcgtcctctacgggatgtccgcccacaggctctcccaggagctcggcatagactacaaggaggcggaggcctttattgagcgctacttccagagcttccccaaggtgcgggcctggatagaaaggaccctggaggagggccggacgcggggctacgtggagaccctgttcggcaggaggcgctatgtgcccgacctggcctcccggatgcgctcggtgcgggaggcggcggagcggatggccttcaacatgcccgtgcagggcaccgccgccgacctgatgaagatcgccatggtcaagctcttccccaggctaaagcccctgggggcccacctcctcctccaggtgcacgacgagctggtcctggaggtgcccgaggaccgggccgaggaggccaaggccctggtcaaggaggtcatggagaacacctaccccttggacgtgcccctcgaggtggaggtgggcgtgggtcgggactggctggaggcgaagggggattgaagcggtcgac

SEQ ID NO: 2915 - DNA, 2605 bp, Artificial Sequence
  Description of Artificial Sequence: Synthetic DNA sequence of Thermus Rt41A DNA Polymerase V768T
atgaaatacctgctgccgaccgctgctgctggtctgctgctcctcgctgcccagccggcgatggccatggatatcggaattaattcggatccgaattccccactttttgacctggaggaaccccccaagcgggtgcttctggtggacggccaccacctggcctaccgcaccttctacgccctgagcctcaccacctcccggggggagccggtgcagatggtctacggcttcgcccggagcctcctcaaggccttgaaggaggacgggcaggcggtggtcgtggtctttgacgccaaggccccctccttccgccacgaggcctacgaggcctacaaggcgggccgggcccccaccccggaggacttcccccgccagctcgccttggtcaagcggctggtggaccttctgggcctggtccgcctcgaggccccgggttacgaggcggacgacgtcctgggcaccctggccaagaaggccgaaagggaggggatggaggtgcgcatcctcacgggagaccgggacttcttccagctcctctccgagaaggtctcggtcctcctgccggacgggaccctggtcaccccaaaggacgtccaggagaagtacggggtgccgccggagcgctgggtggacttccgcgccctcacgggggaccgctcggacaacatccccggggtggcggggataggggagaagaccgcccttcgactcctcgcggagtgggggagcgtggagaacctcctgaagaacctggaccgggtgaagccggactcggtccggcgcaagatagaggcgcaccttgaggacctccgcctctccttggacctggcccgcatccgcaccgacctccccttggaggtggactttaaggccctgcgccgcaggacccccgacctggagggcctgagggcctttttggaggagctggagttcggaagcctccttcatgagttcggcctcctgggaggggagaagccccgggaggaggccccctggcccccgcccgaaggggccttcgtaggcttcctcctctcccgcaaggagcccatgtgggcggagcttctggccctggcggccgccgcagagggccgggtccaccgggcaacaagcccggttgaggccctggccgacctcaaggaggcccgggggttcctggccaaggacctggccgttttggccctgcgggagggggtggccctggaccccacggacgaccccctcctggtggcctacctcctggacccggccaacaccaaccccgagggggtggcccggcgctacgggggcgagttcacggaggacgcagcggagagggccctcctctccgagaggctcttccagaacctctttccccggctttccgagaagctcctctggctctaccaggaggtggagcggcccctctcccgggtcttggcccacatggaggcccggggggtgaggctggacgtcccccttctggaggccctctcctttgagctggagaaggagatggagcgcctggagggggaggtcttccgcttggccggccaccccttcaacctcaactcccgcgaccagctggaaagggtcctctttgacgagctgggccttaccccggtgggtcggacggagaagacgggcaagcgctccaccgcccagggggccctggaggccctccggggggcccaccccatcgtggagctcatcctccagtaccgggagctttccaagctcaaaagcacctacctggaccccctgccccggctcgtccacccgcggacgggccggcttcacacccgcttcaaccagacggccacggccacgggaaggctttccagctccgaccccaacctgcagaacatccccgtgcgcacccccttggggcagcgcatccgcaaggccttcgtggccgaggaggggtggctccttttggcggcggactactcccagatcgagcttcgggtcctggcccacctctcgggggacgagaacctgaagcgggtcttccgggaggggaaggacatccataccgaaaccgccgcctggatgttcggcttagaccccgctctagtggatccaaagatgcgccgggcggccaagacggtcaacttcggcgtcctctacgggatgtccgcccacaggctctcccaggagctcggcatagactacaaggaggcggaggcctttattgagcgctacttccagagcttccccaaggtgcgggcctggatagaaaggaccctggaggagggccggacgcggggctacgtggagaccctgttcggcaggaggcgctatgtgcccgacctggcctcccggactcgctcggtgcgggaggcggcggagcggatggccttcaacatgcccgtgcagggcaccgccgccgacctgatgaagatcgccatggtcaagctcttccccaggctaaagcccctgggggcccacctcctcctccaggtgcacgacgagctggtcctggaggtgcccgaggaccgggccgaggaggccaaggccctggtcaaggaggtcatggagaacacctaccccttggacgtgcccctcgaggtggaggtgggcgtgggtcgggactggctggaggcgaagggggattgaagcggtcgac

SEQ ID NO: 2916 - DNA, 2605 bp, Artificial Sequence
  Description of Artificial Sequence: Synthetic DNA sequence of Thermus Rt41A DNA Polymerase V768N
atgaaatacctgctgccgaccgctgctgctggtctgctgctcctcgctgcccagccggcgatggccatggatatcggaattaattcggatccgaattccccactttttgacctggaggaaccccccaagcgggtgcttctggtggacggccaccacctggcctaccgcaccttctacgccctgagcctcaccacctcccggggggagccggtgcagatggtctacggcttcgcccggagcctcctcaaggccttgaaggaggacgggcaggcggtggtcgtggtctttgacgccaaggccccctccttccgccacgaggcctacgaggcctacaaggcgggccgggcccccaccccggaggacttcccccgccagctcgccttggtcaagcggctggtggaccttctgggcctggtccgcctcgaggccccgggttacgaggcggacgacgtcctgggcaccctggccaagaaggccgaaagggaggggatggaggtgcgcatcctcacgggagaccgggacttcttccagctcctctccgagaaggtctcggtcctcctgccggacgggaccctggtcaccccaaaggacgtccaggagaagtacggggtgccgccggagcgctgggtggacttccgcgccctcacgggggaccgctcggacaacatccccggggtggcggggataggggagaagaccgcccttcgactcctcgcggagtgggggagcgtggagaacctcctgaagaacctggaccgggtgaagccggactcggtccggcgcaagatagaggcgcaccttgaggacctccgcctctccttggacctggcccgcatccgcaccgacctccccttggaggtggactttaaggccctgcgccgcaggacccccgacctggagggcctgagggcctttttggaggagctggagttcggaagcctccttcatgagttcggcctcctgggaggggagaagccccgggaggaggccccctggcccccgcccgaaggggccttcgtaggcttcctcctctcccgcaaggagcccatgtgggcggagcttctggccctggcggccgccgcagagggccgggtccaccgggcaacaagcccggttgaggccctggccgacctcaaggaggcccgggggttcctggccaaggacctggccgttttggccctgcgggagggggtggccctggaccccacggacgaccccctcctggtggcctacctcctggacccggccaacaccaaccccgagggggtggcccggcgctacgggggcgagttcacggaggacgcagcggagagggccctcctctccgagaggctcttccagaacctctttccccggctttccgagaagctcctctggctctaccaggaggtggagcggcccctctcccgggtcttggcccacatggaggcccggggggtgaggctggacgtcccccttctggaggccctctcctttgagctggagaaggagatggagcgcctggagggggaggtcttccgcttggccggccaccccttcaacctcaactcccgcgaccagctggaaagggtcctctttgacgagctgggccttaccccggtgggtcggacggagaagacgggcaagcgctccaccgcccagggggccctggaggccctccggggggcccaccccatcgtggagctcatcctccagtaccgggagctttccaagctcaaaagcacctacctggaccccctgccccggctcgtccacccgcggacgggccggcttcacacccgcttcaaccagacggccacggccacgggaaggctttccagctccgaccccaacctgcagaacatccccgtgcgcacccccttggggcagcgcatccgcaaggccttcgtggccgaggaggggtggctccttttggcggcggactactcccagatcgagcttcgggtcctggcccacctctcgggggacgagaacctgaagcgggtcttccgggaggggaaggacatccataccgaaaccgccgcctggatgttcggcttagaccccgctctagtggatccaaagatgcgccgggcggccaagacggtcaacttcggcgtcctctacgggatgtccgcccacaggctctcccaggagctcggcatagactacaaggaggcggaggcctttattgagcgctacttccagagcttccccaaggtgcgggcctggatagaaaggaccctggaggagggccggacgcggggctacgtggagaccctgttcggcaggaggcgctatgtgcccgacctggcctcccggaatcgctcggtgcgggaggcggcggagcggatggccttcaacatgcccgtgcagggcaccgccgccgacctgatgaagatcgccatggtcaagctcttccccaggctaaagcccctgggggcccacctcctcctccaggtgcacgacgagctggtcctggaggtgcccgaggaccgggccgaggaggccaaggccctggtcaaggaggtcatggagaacacctaccccttggacgtgcccctcgaggtggaggtgggcgtgggtcgggactggctggaggcgaagggggattgaagcggtcgac

SEQ ID NO: 2917 - DNA, 2605 bp, Artificial Sequence
  Description of Artificial Sequence: Synthetic DNA sequence of Thermus Rt41A DNA Polymerase R769A
atgaaatacctgctgccgaccgctgctgctggtctgctgctcctcgctgcccagccggcgatggccatggatatcggaattaattcggatccgaattccccactttttgacctggaggaaccccccaagcgggtgcttctggtggacggccaccacctggcctaccgcaccttctacgccctgagcctcaccacctcccggggggagccggtgcagatggtctacggcttcgcccggagcctcctcaaggccttgaaggaggacgggcaggcggtggtcgtggtctttgacgccaaggccccctccttccgccacgaggcctacgaggcctacaaggcgggccgggcccccaccccggaggacttcccccgccagctcgccttggtcaagcggctggtggaccttctgggcctggtccgcctcgaggccccgggttacgaggcggacgacgtcctgggcaccctggccaagaaggccgaaagggaggggatggaggtgcgcatcctcacgggagaccgggacttcttccagctcctctccgagaaggtctcggtcctcctgccggacgggaccctggtcaccccaaaggacgtccaggagaagtacggggtgccgccggagcgctgggtggacttccgcgccctcacgggggaccgctcggacaacatccccggggtggcggggataggggagaagaccgcccttcgactcctcgcggagtgggggagcgtggagaacctcctgaagaacctggaccgggtgaagccggactcggtccggcgcaagatagaggcgcaccttgaggacctccgcctctccttggacctggcccgcatccgcaccgacctccccttggaggtggactttaaggccctgcgccgcaggacccccgacctggagggcctgagggcctttttggaggagctggagttcggaagcctccttcatgagttcggcctcctgggaggggagaagccccgggaggaggccccctggcccccgcccgaaggggccttcgtaggcttcctcctctcccgcaaggagcccatgtgggcggagcttctggccctggcggccgccgcagagggccgggtccaccgggcaacaagcccggttgaggccctggccgacctcaaggaggcccgggggttcctggccaaggacctggccgttttggccctgcgggagggggtggccctggaccccacggacgaccccctcctggtggcctacctcctggacccggccaacaccaaccccgagggggtggcccggcgctacgggggcgagttcacggaggacgcagcggagagggccctcctctccgagaggctcttccagaacctctttccccggctttccgagaagctcctctggctctaccaggaggtggagcggcccctctcccgggtcttggcccacatggaggcccggggggtgaggctggacgtcccccttctggaggccctctcctttgagctggagaaggagatggagcgcctggagggggaggtcttccgcttggccggccaccccttcaacctcaactcccgcgaccagctggaaagggtcctctttgacgagctgggccttaccccggtgggtcggacggagaagacgggcaagcgctccaccgcccagggggccctggaggccctccggggggcccaccccatcgtggagctcatcctccagtaccgggagctttccaagctcaaaagcacctacctggaccccctgccccggctcgtccacccgcggacgggccggcttcacacccgcttcaaccagacggccacggccacgggaaggctttccagctccgaccccaacctgcagaacatccccgtgcgcacccccttggggcagcgcatccgcaaggccttcgtggccgaggaggggtggctccttttggcggcggactactcccagatcgagcttcgggtcctggcccacctctcgggggacgagaacctgaagcgggtcttccgggaggggaaggacatccataccgaaaccgccgcctggatgttcggcttagaccccgctctagtggatccaaagatgcgccgggcggccaagacggtcaacttcggcgtcctctacgggatgtccgcccacaggctctcccaggagctcggcatagactacaaggaggcggaggcctttattgagcgctacttccagagcttccccaaggtgcgggcctggatagaaaggaccctggaggagggccggacgcggggctacgtggagaccctgttcggcaggaggcgctatgtgcccgacctggcctcccgggtcgcttcggtgcgggaggcggcggagcggatggccttcaacatgcccgtgcagggcaccgccgccgacctgatgaagatcgccatggtcaagctcttccccaggctaaagcccctgggggcccacctcctcctccaggtgcacgacgagctggtcctggaggtgcccgaggaccgggccgaggaggccaaggccctggtcaaggaggtcatggagaacacctaccccttggacgtgcccctcgaggtggaggtgggcgtgggtcgggactggctggaggcgaagggggattgaagcggtcgac

SEQ ID NO: 2918 - DNA, 2605 bp, Artificial Sequence
  Description of Artificial Sequence: Synthetic DNA sequence of Thermus Rt41A DNA Polymerase R769C
atgaaatacctgctgccgaccgctgctgctggtctgctgctcctcgctgcccagccggcgatggccatggatatcggaattaattcggatccgaattccccactttttgacctggaggaaccccccaagcgggtgcttctggtggacggccaccacctggcctaccgcaccttctacgccctgagcctcaccacctcccggggggagccggtgcagatggtctacggcttcgcccggagcctcctcaaggccttgaaggaggacgggcaggcggtggtcgtggtctttgacgccaaggccccctccttccgccacgaggcctacgaggcctacaaggcgggccgggcccccaccccggaggacttcccccgccagctcgccttggtcaagcggctggtggaccttctgggcctggtccgcctcgaggccccgggttacgaggcggacgacgtcctgggcaccctggccaagaaggccgaaagggaggggatggaggtgcgcatcctcacgggagaccgggacttcttccagctcctctccgagaaggtctcggtcctcctgccggacgggaccctggtcaccccaaaggacgtccaggagaagtacggggtgccgccggagcgctgggtggacttccgcgccctcacgggggaccgctcggacaacatccccggggtggcggggataggggagaagaccgcccttcgactcctcgcggagtgggggagcgtggagaacctcctgaagaacctggaccgggtgaagccggactcggtccggcgcaagatagaggcgcaccttgaggacctccgcctctccttggacctggcccgcatccgcaccgacctccccttggaggtggactttaaggccctgcgccgcaggacccccgacctggagggcctgagggcctttttggaggagctggagttcggaagcctccttcatgagttcggcctcctgggaggggagaagccccgggaggaggccccctggcccccgcccgaaggggccttcgtaggcttcctcctctcccgcaaggagcccatgtgggcggagcttctggccctggcggccgccgcagagggccgggtccaccgggcaacaagcccggttgaggccctggccgacctcaaggaggcccgggggttcctggccaaggacctggccgttttggccctgcgggagggggtggccctggaccccacggacgaccccctcctggtggcctacctcctggacccggccaacaccaaccccgagggggtggcccggcgctacgggggcgagttcacggaggacgcagcggagagggccctcctctccgagaggctcttccagaacctctttccccggctttccgagaagctcctctggctctaccaggaggtggagcggcccctctcccgggtcttggcccacatggaggcccggggggtgaggctggacgtcccccttctggaggccctctcctttgagctggagaaggagatggagcgcctggagggggaggtcttccgcttggccggccaccccttcaacctcaactcccgcgaccagctggaaagggtcctctttgacgagctgggccttaccccggtgggtcggacggagaagacgggcaagcgctccaccgcccagggggccctggaggccctccggggggcccaccccatcgtggagctcatcctccagtaccgggagctttccaagctcaaaagcacctacctggaccccctgccccggctcgtccacccgcggacgggccggcttcacacccgcttcaaccagacggccacggccacgggaaggctttccagctccgaccccaacctgcagaacatccccgtgcgcacccccttggggcagcgcatccgcaaggccttcgtggccgaggaggggtggctccttttggcggcggactactcccagatcgagcttcgggtcctggcccacctctcgggggacgagaacctgaagcgggtcttccgggaggggaaggacatccataccgaaaccgccgcctggatgttcggcttagaccccgctctagtggatccaaagatgcgccgggcggccaagacggtcaacttcggcgtcctctacgggatgtccgcccacaggctctcccaggagctcggcatagactacaaggaggcggaggcctttattgagcgctacttccagagcttccccaaggtgcgggcctggatagaaaggaccctggaggagggccggacgcggggctacgtggagaccctgttcggcaggaggcgctatgtgcccgacctggcctcccgggtctgttcggtgcgggaggcggcggagcggatggccttcaacatgcccgtgcagggcaccgccgccgacctgatgaagatcgccatggtcaagctcttccccaggctaaagcccctgggggcccacctcctcctccaggtgcacgacgagctggtcctggaggtgcccgaggaccgggccgaggaggccaaggccctggtcaaggaggtcatggagaacacctaccccttggacgtgcccctcgaggtggaggtgggcgtgggtcgggactggctggaggcgaagggggattgaagcggtcgac

SEQ ID NO: 2919 - DNA, 2605 bp, Artificial Sequence
  Description of Artificial Sequence: Synthetic DNA sequence of Thermus Rt41A DNA Polymerase R769G
atgaaatacctgctgccgaccgctgctgctggtctgctgctcctcgctgcccagccggcgatggccatggatatcggaattaattcggatccgaattccccactttttgacctggaggaaccccccaagcgggtgcttctggtggacggccaccacctggcctaccgcaccttctacgccctgagcctcaccacctcccggggggagccggtgcagatggtctacggcttcgcccggagcctcctcaaggccttgaaggaggacgggcaggcggtggtcgtggtctttgacgccaaggccccctccttccgccacgaggcctacgaggcctacaaggcgggccgggcccccaccccggaggacttcccccgccagctcgccttggtcaagcggctggtggaccttctgggcctggtccgcctcgaggccccgggttacgaggcggacgacgtcctgggcaccctggccaagaaggccgaaagggaggggatggaggtgcgcatcctcacgggagaccgggacttcttccagctcctctccgagaaggtctcggtcctcctgccggacgggaccctggtcaccccaaaggacgtccaggagaagtacggggtgccgccggagcgctgggtggacttccgcgccctcacgggggaccgctcggacaacatccccggggtggcggggataggggagaagaccgcccttcgactcctcgcggagtgggggagcgtggagaacctcctgaagaacctggaccgggtgaagccggactcggtccggcgcaagatagaggcgcaccttgaggacctccgcctctccttggacctggcccgcatccgcaccgacctccccttggaggtggactttaaggccctgcgccgcaggacccccgacctggagggcctgagggcctttttggaggagctggagttcggaagcctccttcatgagttcggcctcctgggaggggagaagccccgggaggaggccccctggcccccgcccgaaggggccttcgtaggcttcctcctctcccgcaaggagcccatgtgggcggagcttctggccctggcggccgccgcagagggccgggtccaccgggcaacaagcccggttgaggccctggccgacctcaaggaggcccgggggttcctggccaaggacctggccgttttggccctgcgggagggggtggccctggaccccacggacgaccccctcctggtggcctacctcctggacccggccaacaccaaccccgagggggtggcccggcgctacgggggcgagttcacggaggacgcagcggagagggccctcctctccgagaggctcttccagaacctctttccccggctttccgagaagctcctctggctctaccaggaggtggagcggcccctctcccgggtcttggcccacatggaggcccggggggtgaggctggacgtcccccttctggaggccctctcctttgagctggagaaggagatggagcgcctggagggggaggtcttccgcttggccggccaccccttcaacctcaactcccgcgaccagctggaaagggtcctctttgacgagctgggccttaccccggtgggtcggacggagaagacgggcaagcgctccaccgcccagggggccctggaggccctccggggggcccaccccatcgtggagctcatcctccagtaccgggagctttccaagctcaaaagcacctacctggaccccctgccccggctcgtccacccgcggacgggccggcttcacacccgcttcaaccagacggccacggccacgggaaggctttccagctccgaccccaacctgcagaacatccccgtgcgcacccccttggggcagcgcatccgcaaggccttcgtggccgaggaggggtggctccttttggcggcggactactcccagatcgagcttcgggtcctggcccacctctcgggggacgagaacctgaagcgggtcttccgggaggggaaggacatccataccgaaaccgccgcctggatgttcggcttagaccccgctctagtggatccaaagatgcgccgggcggccaagacggtcaacttcggcgtcctctacgggatgtccgcccacaggctctcccaggagctcggcatagactacaaggaggcggaggcctttattgagcgctacttccagagcttccccaaggtgcgggcctggatagaaaggaccctggaggagggccggacgcggggctacgtggagaccctgttcggcaggaggcgctatgtgcccgacctggcctcccgggtcggttcggtgcgggaggcggcggagcggatggccttcaacatgcccgtgcagggcaccgccgccgacctgatgaagatcgccatggtcaagctcttccccaggctaaagcccctgggggcccacctcctcctccaggtgcacgacgagctggtcctggaggtgcccgaggaccgggccgaggaggccaaggccctggtcaaggaggtcatggagaacacctaccccttggacgtgcccctcgaggtggaggtgggcgtgggtcgggactggctggaggcgaagggggattgaagcggtcgac

SEQ ID NO: 2920 - DNA, 2605 bp, Artificial Sequence
  Description of Artificial Sequence: Synthetic DNA sequence of Thermus Rt41A DNA Polymerase R769Q
atgaaatacctgctgccgaccgctgctgctggtctgctgctcctcgctgcccagccggcgatggccatggatatcggaattaattcggatccgaattccccactttttgacctggaggaaccccccaagcgggtgcttctggtggacggccaccacctggcctaccgcaccttctacgccctgagcctcaccacctcccggggggagccggtgcagatggtctacggcttcgcccggagcctcctcaaggccttgaaggaggacgggcaggcggtggtcgtggtctttgacgccaaggccccctccttccgccacgaggcctacgaggcctacaaggcgggccgggcccccaccccggaggacttcccccgccagctcgccttggtcaagcggctggtggaccttctgggcctggtccgcctcgaggccccgggttacgaggcggacgacgtcctgggcaccctggccaagaaggccgaaagggaggggatggaggtgcgcatcctcacgggagaccgggacttcttccagctcctctccgagaaggtctcggtcctcctgccggacgggaccctggtcaccccaaaggacgtccaggagaagtacggggtgccgccggagcgctgggtggacttccgcgccctcacgggggaccgctcggacaacatccccggggtggcggggataggggagaagaccgcccttcgactcctcgcggagtgggggagcgtggagaacctcctgaagaacctggaccgggtgaagccggactcggtccggcgcaagatagaggcgcaccttgaggacctccgcctctccttggacctggcccgcatccgcaccgacctccccttggaggtggactttaaggccctgcgccgcaggacccccgacctggagggcctgagggcctttttggaggagctggagttcggaagcctccttcatgagttcggcctcctgggaggggagaagccccgggaggaggccccctggcccccgcccgaaggggccttcgtaggcttcctcctctcccgcaaggagcccatgtgggcggagcttctggccctggcggccgccgcagagggccgggtccaccgggcaacaagcccggttgaggccctggccgacctcaaggaggcccgggggttcctggccaaggacctggccgttttggccctgcgggagggggtggccctggaccccacggacgaccccctcctggtggcctacctcctggacccggccaacaccaaccccgagggggtggcccggcgctacgggggcgagttcacggaggacgcagcggagagggccctcctctccgagaggctcttccagaacctctttccccggctttccgagaagctcctctggctctaccaggaggtggagcggcccctctcccgggtcttggcccacatggaggcccggggggtgaggctggacgtcccccttctggaggccctctcctttgagctggagaaggagatggagcgcctggagggggaggtcttccgcttggccggccaccccttcaacctcaactcccgcgaccagctggaaagggtcctctttgacgagctgggccttaccccggtgggtcggacggagaagacgggcaagcgctccaccgcccagggggccctggaggccctccggggggcccaccccatcgtggagctcatcctccagtaccgggagctttccaagctcaaaagcacctacctggaccccctgccccggctcgtccacccgcggacgggccggcttcacacccgcttcaaccagacggccacggccacgggaaggctttccagctccgaccccaacctgcagaacatccccgtgcgcacccccttggggcagcgcatccgcaaggccttcgtggccgaggaggggtggctccttttggcggcggactactcccagatcgagcttcgggtcctggcccacctctcgggggacgagaacctgaagcgggtcttccgggaggggaaggacatccataccgaaaccgccgcctggatgttcggcttagaccccgctctagtggatccaaagatgcgccgggcggccaagacggtcaacttcggcgtcctctacgggatgtccgcccacaggctctcccaggagctcggcatagactacaaggaggcggaggcctttattgagcgctacttccagagcttccccaaggtgcgggcctggatagaaaggaccctggaggagggccggacgcggggctacgtggagaccctgttcggcaggaggcgctatgtgcccgacctggcctcccgggtccaatcggtgcgggaggcggcggagcggatggccttcaacatgcccgtgcagggcaccgccgccgacctgatgaagatcgccatggtcaagctcttccccaggctaaagcccctgggggcccacctcctcctccaggtgcacgacgagctggtcctggaggtgcccgaggaccgggccgaggaggccaaggccctggtcaaggaggtcatggagaacacctaccccttggacgtgcccctcgaggtggaggtgggcgtgggtcgggactggctggaggcgaagggggattgaagcggtcgac

SEQ ID NO: 2921 - DNA, 2605 bp, Artificial Sequence
  Description of Artificial Sequence: Synthetic DNA sequence of Thermus Rt41A DNA Polymerase R769H
atgaaatacctgctgccgaccgctgctgctggtctgctgctcctcgctgcccagccggcgatggccatggatatcggaattaattcggatccgaattccccactttttgacctggaggaaccccccaagcgggtgcttctggtggacggccaccacctggcctaccgcaccttctacgccctgagcctcaccacctcccggggggagccggtgcagatggtctacggcttcgcccggagcctcctcaaggccttgaaggaggacgggcaggcggtggtcgtggtctttgacgccaaggccccctccttccgccacgaggcctacgaggcctacaaggcgggccgggcccccaccccggaggacttcccccgccagctcgccttggtcaagcggctggtggaccttctgggcctggtccgcctcgaggccccgggttacgaggcggacgacgtcctgggcaccctggccaagaaggccgaaagggaggggatggaggtgcgcatcctcacgggagaccgggacttcttccagctcctctccgagaaggtctcggtcctcctgccggacgggaccctggtcaccccaaaggacgtccaggagaagtacggggtgccgccggagcgctgggtggacttccgcgccctcacgggggaccgctcggacaacatccccggggtggcggggataggggagaagaccgcccttcgactcctcgcggagtgggggagcgtggagaacctcctgaagaacctggaccgggtgaagccggactcggtccggcgcaagatagaggcgcaccttgaggacctccgcctctccttggacctggcccgcatccgcaccgacctccccttggaggtggactttaaggccctgcgccgcaggacccccgacctggagggcctgagggcctttttggaggagctggagttcggaagcctccttcatgagttcggcctcctgggaggggagaagccccgggaggaggccccctggcccccgcccgaaggggccttcgtaggcttcctcctctcccgcaaggagcccatgtgggcggagcttctggccctggcggccgccgcagagggccgggtccaccgggcaacaagcccggttgaggccctggccgacctcaaggaggcccgggggttcctggccaaggacctggccgttttggccctgcgggagggggtggccctggaccccacggacgaccccctcctggtggcctacctcctggacccggccaacaccaaccccgagggggtggcccggcgctacgggggcgagttcacggaggacgcagcggagagggccctcctctccgagaggctcttccagaacctctttccccggctttccgagaagctcctctggctctaccaggaggtggagcggcccctctcccgggtcttggcccacatggaggcccggggggtgaggctggacgtcccccttctggaggccctctcctttgagctggagaaggagatggagcgcctggagggggaggtcttccgcttggccggccaccccttcaacctcaactcccgcgaccagctggaaagggtcctctttgacgagctgggccttaccccggtgggtcggacggagaagacgggcaagcgctccaccgcccagggggccctggaggccctccggggggcccaccccatcgtggagctcatcctccagtaccgggagctttccaagctcaaaagcacctacctggaccccctgccccggctcgtccacccgcggacgggccggcttcacacccgcttcaaccagacggccacggccacgggaaggctttccagctccgaccccaacctgcagaacatccccgtgcgcacccccttggggcagcgcatccgcaaggccttcgtggccgaggaggggtggctccttttggcggcggactactcccagatcgagcttcgggtcctggcccacctctcgggggacgagaacctgaagcgggtcttccgggaggggaaggacatccataccgaaaccgccgcctggatgttcggcttagaccccgctctagtggatccaaagatgcgccgggcggccaagacggtcaacttcggcgtcctctacgggatgtccgcccacaggctctcccaggagctcggcatagactacaaggaggcggaggcctttattgagcgctacttccagagcttccccaaggtgcgggcctggatagaaaggaccctggaggagggccggacgcggggctacgtggagaccctgttcggcaggaggcgctatgtgcccgacctggcctcccgggtccattcggtgcgggaggcggcggagcggatggccttcaacatgcccgtgcagggcaccgccgccgacctgatgaagatcgccatggtcaagctcttccccaggctaaagcccctgggggcccacctcctcctccaggtgcacgacgagctggtcctggaggtgcccgaggaccgggccgaggaggccaaggccctggtcaaggaggtcatggagaacacctaccccttggacgtgcccctcgaggtggaggtgggcgtgggtcgggactggctggaggcgaagggggattgaagcggtcgac

SEQ ID NO: 2922 - DNA, 2605 bp, Artificial Sequence
  Description of Artificial Sequence: Synthetic DNA sequence of Thermus Rt41A DNA Polymerase R769I
atgaaatacctgctgccgaccgctgctgctggtctgctgctcctcgctgcccagccggcgatggccatggatatcggaattaattcggatccgaattccccactttttgacctggaggaaccccccaagcgggtgcttctggtggacggccaccacctggcctaccgcaccttctacgccctgagcctcaccacctcccggggggagccggtgcagatggtctacggcttcgcccggagcctcctcaaggccttgaaggaggacgggcaggcggtggtcgtggtctttgacgccaaggccccctccttccgccacgaggcctacgaggcctacaaggcgggccgggcccccaccccggaggacttcccccgccagctcgccttggtcaagcggctggtggaccttctgggcctggtccgcctcgaggccccgggttacgaggcggacgacgtcctgggcaccctggccaagaaggccgaaagggaggggatggaggtgcgcatcctcacgggagaccgggacttcttccagctcctctccgagaaggtctcggtcctcctgccggacgggaccctggtcaccccaaaggacgtccaggagaagtacggggtgccgccggagcgctgggtggacttccgcgccctcacgggggaccgctcggacaacatccccggggtggcggggataggggagaagaccgcccttcgactcctcgcggagtgggggagcgtggagaacctcctgaagaacctggaccgggtgaagccggactcggtccggcgcaagatagaggcgcaccttgaggacctccgcctctccttggacctggcccgcatccgcaccgacctccccttggaggtggactttaaggccctgcgccgcaggacccccgacctggagggcctgagggcctttttggaggagctggagttcggaagcctccttcatgagttcggcctcctgggaggggagaagccccgggaggaggccccctggcccccgcccgaaggggccttcgtaggcttcctcctctcccgcaaggagcccatgtgggcggagcttctggccctggcggccgccgcagagggccgggtccaccgggcaacaagcccggttgaggccctggccgacctcaaggaggcccgggggttcctggccaaggacctggccgttttggccctgcgggagggggtggccctggaccccacggacgaccccctcctggtggcctacctcctggacccggccaacaccaaccccgagggggtggcccggcgctacgggggcgagttcacggaggacgcagcggagagggccctcctctccgagaggctcttccagaacctctttccccggctttccgagaagctcctctggctctaccaggaggtggagcggcccctctcccgggtcttggcccacatggaggcccggggggtgaggctggacgtcccccttctggaggccctctcctttgagctggagaaggagatggagcgcctggagggggaggtcttccgcttggccggccaccccttcaacctcaactcccgcgaccagctggaaagggtcctctttgacgagctgggccttaccccggtgggtcggacggagaagacgggcaagcgctccaccgcccagggggccctggaggccctccggggggcccaccccatcgtggagctcatcctccagtaccgggagctttccaagctcaaaagcacctacctggaccccctgccccggctcgtccacccgcggacgggccggcttcacacccgcttcaaccagacggccacggccacgggaaggctttccagctccgaccccaacctgcagaacatccccgtgcgcacccccttggggcagcgcatccgcaaggccttcgtggccgaggaggggtggctccttttggcggcggactactcccagatcgagcttcgggtcctggcccacctctcgggggacgagaacctgaagcgggtcttccgggaggggaaggacatccataccgaaaccgccgcctggatgttcggcttagaccccgctctagtggatccaaagatgcgccgggcggccaagacggtcaacttcggcgtcctctacgggatgtccgcccacaggctctcccaggagctcggcatagactacaaggaggcggaggcctttattgagcgctacttccagagcttccccaaggtgcgggcctggatagaaaggaccctggaggagggccggacgcggggctacgtggagaccctgttcggcaggaggcgctatgtgcccgacctggcctcccgggtcatttcggtgcgggaggcggcggagcggatggccttcaacatgcccgtgcagggcaccgccgccgacctgatgaagatcgccatggtcaagctcttccccaggctaaagcccctgggggcccacctcctcctccaggtgcacgacgagctggtcctggaggtgcccgaggaccgggccgaggaggccaaggccctggtcaaggaggtcatggagaacacctaccccttggacgtgcccctcgaggtggaggtgggcgtgggtcgggactggctggaggcgaagggggattgaagcggtcgac

SEQ ID NO: 2923 - DNA, 2605 bp, Artificial Sequence
  Description of Artificial Sequence: Synthetic DNA sequence of Thermus Rt41A DNA Polymerase R769L
atgaaatacctgctgccgaccgctgctgctggtctgctgctcctcgctgcccagccggcgatggccatggatatcggaattaattcggatccgaattccccactttttgacctggaggaaccccccaagcgggtgcttctggtggacggccaccacctggcctaccgcaccttctacgccctgagcctcaccacctcccggggggagccggtgcagatggtctacggcttcgcccggagcctcctcaaggccttgaaggaggacgggcaggcggtggtcgtggtctttgacgccaaggccccctccttccgccacgaggcctacgaggcctacaaggcgggccgggcccccaccccggaggacttcccccgccagctcgccttggtcaagcggctggtggaccttctgggcctggtccgcctcgaggccccgggttacgaggcggacgacgtcctgggcaccctggccaagaaggccgaaagggaggggatggaggtgcgcatcctcacgggagaccgggacttcttccagctcctctccgagaaggtctcggtcctcctgccggacgggaccctggtcaccccaaaggacgtccaggagaagtacggggtgccgccggagcgctgggtggacttccgcgccctcacgggggaccgctcggacaacatccccggggtggcggggataggggagaagaccgcccttcgactcctcgcggagtgggggagcgtggagaacctcctgaagaacctggaccgggtgaagccggactcggtccggcgcaagatagaggcgcaccttgaggacctccgcctctccttggacctggcccgcatccgcaccgacctccccttggaggtggactttaaggccctgcgccgcaggacccccgacctggagggcctgagggcctttttggaggagctggagttcggaagcctccttcatgagttcggcctcctgggaggggagaagccccgggaggaggccccctggcccccgcccgaaggggccttcgtaggcttcctcctctcccgcaaggagcccatgtgggcggagcttctggccctggcggccgccgcagagggccgggtccaccgggcaacaagcccggttgaggccctggccgacctcaaggaggcccgggggttcctggccaaggacctggccgttttggccctgcgggagggggtggccctggaccccacggacgaccccctcctggtggcctacctcctggacccggccaacaccaaccccgagggggtggcccggcgctacgggggcgagttcacggaggacgcagcggagagggccctcctctccgagaggctcttccagaacctctttccccggctttccgagaagctcctctggctctaccaggaggtggagcggcccctctcccgggtcttggcccacatggaggcccggggggtgaggctggacgtcccccttctggaggccctctcctttgagctggagaaggagatggagcgcctggagggggaggtcttccgcttggccggccaccccttcaacctcaactcccgcgaccagctggaaagggtcctctttgacgagctgggccttaccccggtgggtcggacggagaagacgggcaagcgctccaccgcccagggggccctggaggccctccggggggcccaccccatcgtggagctcatcctccagtaccgggagctttccaagctcaaaagcacctacctggaccccctgccccggctcgtccacccgcggacgggccggcttcacacccgcttcaaccagacggccacggccacgggaaggctttccagctccgaccccaacctgcagaacatccccgtgcgcacccccttggggcagcgcatccgcaaggccttcgtggccgaggaggggtggctccttttggcggcggactactcccagatcgagcttcgggtcctggcccacctctcgggggacgagaacctgaagcgggtcttccgggaggggaaggacatccataccgaaaccgccgcctggatgttcggcttagaccccgctctagtggatccaaagatgcgccgggcggccaagacggtcaacttcggcgtcctctacgggatgtccgcccacaggctctcccaggagctcggcatagactacaaggaggcggaggcctttattgagcgctacttccagagcttccccaaggtgcgggcctggatagaaaggaccctggaggagggccggacgcggggctacgtggagaccctgttcggcaggaggcgctatgtgcccgacctggcctcccgggtcttatcggtgcgggaggcggcggagcggatggccttcaacatgcccgtgcagggcaccgccgccgacctgatgaagatcgccatggtcaagctcttccccaggctaaagcccctgggggcccacctcctcctccaggtgcacgacgagctggtcctggaggtgcccgaggaccgggccgaggaggccaaggccctggtcaaggaggtcatggagaacacctaccccttggacgtgcccctcgaggtggaggtgggcgtgggtcgggactggctggaggcgaagggggattgaagcggtcgac

SEQ ID NO: 2924 - DNA, 2605 bp, Artificial Sequence
  Description of Artificial Sequence: Synthetic DNA sequence of Thermus Rt41A DNA Polymerase R769K
atgaaatacctgctgccgaccgctgctgctggtctgctgctcctcgctgcccagccggcgatggccatggatatcggaattaattcggatccgaattccccactttttgacctggaggaaccccccaagcgggtgcttctggtggacggccaccacctggcctaccgcaccttctacgccctgagcctcaccacctcccggggggagccggtgcagatggtctacggcttcgcccggagcctcctcaaggccttgaaggaggacgggcaggcggtggtcgtggtctttgacgccaaggccccctccttccgccacgaggcctacgaggcctacaaggcgggccgggcccccaccccggaggacttcccccgccagctcgccttggtcaagcggctggtggaccttctgggcctggtccgcctcgaggccccgggttacgaggcggacgacgtcctgggcaccctggccaagaaggccgaaagggaggggatggaggtgcgcatcctcacgggagaccgggacttcttccagctcctctccgagaaggtctcggtcctcctgccggacgggaccctggtcaccccaaaggacgtccaggagaagtacggggtgccgccggagcgctgggtggacttccgcgccctcacgggggaccgctcggacaacatccccggggtggcggggataggggagaagaccgcccttcgactcctcgcggagtgggggagcgtggagaacctcctgaagaacctggaccgggtgaagccggactcggtccggcgcaagatagaggcgcaccttgaggacctccgcctctccttggacctggcccgcatccgcaccgacctccccttggaggtggactttaaggccctgcgccgcaggacccccgacctggagggcctgagggcctttttggaggagctggagttcggaagcctccttcatgagttcggcctcctgggaggggagaagccccgggaggaggccccctggcccccgcccgaaggggccttcgtaggcttcctcctctcccgcaaggagcccatgtgggcggagcttctggccctggcggccgccgcagagggccgggtccaccgggcaacaagcccggttgaggccctggccgacctcaaggaggcccgggggttcctggccaaggacctggccgttttggccctgcgggagggggtggccctggaccccacggacgaccccctcctggtggcctacctcctggacccggccaacaccaaccccgagggggtggcccggcgctacgggggcgagttcacggaggacgcagcggagagggccctcctctccgagaggctcttccagaacctctttccccggctttccgagaagctcctctggctctaccaggaggtggagcggcccctctcccgggtcttggcccacatggaggcccggggggtgaggctggacgtcccccttctggaggccctctcctttgagctggagaaggagatggagcgcctggagggggaggtcttccgcttggccggccaccccttcaacctcaactcccgcgaccagctggaaagggtcctctttgacgagctgggccttaccccggtgggtcggacggagaagacgggcaagcgctccaccgcccagggggccctggaggccctccggggggcccaccccatcgtggagctcatcctccagtaccgggagctttccaagctcaaaagcacctacctggaccccctgccccggctcgtccacccgcggacgggccggcttcacacccgcttcaaccagacggccacggccacgggaaggctttccagctccgaccccaacctgcagaacatccccgtgcgcacccccttggggcagcgcatccgcaaggccttcgtggccgaggaggggtggctccttttggcggcggactactcccagatcgagcttcgggtcctggcccacctctcgggggacgagaacctgaagcgggtcttccgggaggggaaggacatccataccgaaaccgccgcctggatgttcggcttagaccccgctctagtggatccaaagatgcgccgggcggccaagacggtcaacttcggcgtcctctacgggatgtccgcccacaggctctcccaggagctcggcatagactacaaggaggcggaggcctttattgagcgctacttccagagcttccccaaggtgcgggcctggatagaaaggaccctggaggagggccggacgcggggctacgtggagaccctgttcggcaggaggcgctatgtgcccgacctggcctcccgggtcaaatcggtgcgggaggcggcggagcggatggccttcaacatgcccgtgcagggcaccgccgccgacctgatgaagatcgccatggtcaagctcttccccaggctaaagcccctgggggcccacctcctcctccaggtgcacgacgagctggtcctggaggtgcccgaggaccgggccgaggaggccaaggccctggtcaaggaggtcatggagaacacctaccccttggacgtgcccctcgaggtggaggtgggcgtgggtcgggactggctggaggcgaagggggattgaagcggtcgac

SEQ ID NO: 2925 - DNA, 2605 bp, Artificial Sequence
  Description of Artificial Sequence: Synthetic DNA sequence of Thermus Rt41A DNA Polymerase R769E
atgaaatacctgctgccgaccgctgctgctggtctgctgctcctcgctgcccagccggcgatggccatggatatcggaattaattcggatccgaattccccactttttgacctggaggaaccccccaagcgggtgcttctggtggacggccaccacctggcctaccgcaccttctacgccctgagcctcaccacctcccggggggagccggtgcagatggtctacggcttcgcccggagcctcctcaaggccttgaaggaggacgggcaggcggtggtcgtggtctttgacgccaaggccccctccttccgccacgaggcctacgaggcctacaaggcgggccgggcccccaccccggaggacttcccccgccagctcgccttggtcaagcggctggtggaccttctgggcctggtccgcctcgaggccccgggttacgaggcggacgacgtcctgggcaccctggccaagaaggccgaaagggaggggatggaggtgcgcatcctcacgggagaccgggacttcttccagctcctctccgagaaggtctcggtcctcctgccggacgggaccctggtcaccccaaaggacgtccaggagaagtacggggtgccgccggagcgctgggtggacttccgcgccctcacgggggaccgctcggacaacatccccggggtggcggggataggggagaagaccgcccttcgactcctcgcggagtgggggagcgtggagaacctcctgaagaacctggaccgggtgaagccggactcggtccggcgcaagatagaggcgcaccttgaggacctccgcctctccttggacctggcccgcatccgcaccgacctccccttggaggtggactttaaggccctgcgccgcaggacccccgacctggagggcctgagggcctttttggaggagctggagttcggaagcctccttcatgagttcggcctcctgggaggggagaagccccgggaggaggccccctggcccccgcccgaaggggccttcgtaggcttcctcctctcccgcaaggagcccatgtgggcggagcttctggccctggcggccgccgcagagggccgggtccaccgggcaacaagcccggttgaggccctggccgacctcaaggaggcccgggggttcctggccaaggacctggccgttttggccctgcgggagggggtggccctggaccccacggacgaccccctcctggtggcctacctcctggacccggccaacaccaaccccgagggggtggcccggcgctacgggggcgagttcacggaggacgcagcggagagggccctcctctccgagaggctcttccagaacctctttccccggctttccgagaagctcctctggctctaccaggaggtggagcggcccctctcccgggtcttggcccacatggaggcccggggggtgaggctggacgtcccccttctggaggccctctcctttgagctggagaaggagatggagcgcctggagggggaggtcttccgcttggccggccaccccttcaacctcaactcccgcgaccagctggaaagggtcctctttgacgagctgggccttaccccggtgggtcggacggagaagacgggcaagcgctccaccgcccagggggccctggaggccctccggggggcccaccccatcgtggagctcatcctccagtaccgggagctttccaagctcaaaagcacctacctggaccccctgccccggctcgtccacccgcggacgggccggcttcacacccgcttcaaccagacggccacggccacgggaaggctttccagctccgaccccaacctgcagaacatccccgtgcgcacccccttggggcagcgcatccgcaaggccttcgtggccgaggaggggtggctccttttggcggcggactactcccagatcgagcttcgggtcctggcccacctctcgggggacgagaacctgaagcgggtcttccgggaggggaaggacatccataccgaaaccgccgcctggatgttcggcttagaccccgctctagtggatccaaagatgcgccgggcggccaagacggtcaacttcggcgtcctctacgggatgtccgcccacaggctctcccaggagctcggcatagactacaaggaggcggaggcctttattgagcgctacttccagagcttccccaaggtgcgggcctggatagaaaggaccctggaggagggccggacgcggggctacgtggagaccctgttcggcaggaggcgctatgtgcccgacctggcctcccgggtcgaatcggtgcgggaggcggcggagcggatggccttcaacatgcccgtgcagggcaccgccgccgacctgatgaagatcgccatggtcaagctcttccccaggctaaagcccctgggggcccacctcctcctccaggtgcacgacgagctggtcctggaggtgcccgaggaccgggccgaggaggccaaggccctggtcaaggaggtcatggagaacacctaccccttggacgtgcccctcgaggtggaggtgggcgtgggtcgggactggctggaggcgaagggggattgaagcggtcgac

SEQ ID NO: 2926 - DNA, 2605 bp, Artificial Sequence
  Description of Artificial Sequence: Synthetic DNA sequence of Thermus Rt41A DNA Polymerase R769D
atgaaatacctgctgccgaccgctgctgctggtctgctgctcctcgctgcccagccggcgatggccatggatatcggaattaattcggatccgaattccccactttttgacctggaggaaccccccaagcgggtgcttctggtggacggccaccacctggcctaccgcaccttctacgccctgagcctcaccacctcccggggggagccggtgcagatggtctacggcttcgcccggagcctcctcaaggccttgaaggaggacgggcaggcggtggtcgtggtctttgacgccaaggccccctccttccgccacgaggcctacgaggcctacaaggcgggccgggcccccaccccggaggacttcccccgccagctcgccttggtcaagcggctggtggaccttctgggcctggtccgcctcgaggccccgggttacgaggcggacgacgtcctgggcaccctggccaagaaggccgaaagggaggggatggaggtgcgcatcctcacgggagaccgggacttcttccagctcctctccgagaaggtctcggtcctcctgccggacgggaccctggtcaccccaaaggacgtccaggagaagtacggggtgccgccggagcgctgggtggacttccgcgccctcacgggggaccgctcggacaacatccccggggtggcggggataggggagaagaccgcccttcgactcctcgcggagtgggggagcgtggagaacctcctgaagaacctggaccgggtgaagccggactcggtccggcgcaagatagaggcgcaccttgaggacctccgcctctccttggacctggcccgcatccgcaccgacctccccttggaggtggactttaaggccctgcgccgcaggacccccgacctggagggcctgagggcctttttggaggagctggagttcggaagcctccttcatgagttcggcctcctgggaggggagaagccccgggaggaggccccctggcccccgcccgaaggggccttcgtaggcttcctcctctcccgcaaggagcccatgtgggcggagcttctggccctggcggccgccgcagagggccgggtccaccgggcaacaagcccggttgaggccctggccgacctcaaggaggcccgggggttcctggccaaggacctggccgttttggccctgcgggagggggtggccctggaccccacggacgaccccctcctggtggcctacctcctggacccggccaacaccaaccccgagggggtggcccggcgctacgggggcgagttcacggaggacgcagcggagagggccctcctctccgagaggctcttccagaacctctttccccggctttccgagaagctcctctggctctaccaggaggtggagcggcccctctcccgggtcttggcccacatggaggcccggggggtgaggctggacgtcccccttctggaggccctctcctttgagctggagaaggagatggagcgcctggagggggaggtcttccgcttggccggccaccccttcaacctcaactcccgcgaccagctggaaagggtcctctttgacgagctgggccttaccccggtgggtcggacggagaagacgggcaagcgctccaccgcccagggggccctggaggccctccggggggcccaccccatcgtggagctcatcctccagtaccgggagctttccaagctcaaaagcacctacctggaccccctgccccggctcgtccacccgcggacgggccggcttcacacccgcttcaaccagacggccacggccacgggaaggctttccagctccgaccccaacctgcagaacatccccgtgcgcacccccttggggcagcgcatccgcaaggccttcgtggccgaggaggggtggctccttttggcggcggactactcccagatcgagcttcgggtcctggcccacctctcgggggacgagaacctgaagcgggtcttccgggaggggaaggacatccataccgaaaccgccgcctggatgttcggcttagaccccgctctagtggatccaaagatgcgccgggcggccaagacggtcaacttcggcgtcctctacgggatgtccgcccacaggctctcccaggagctcggcatagactacaaggaggcggaggcctttattgagcgctacttccagagcttccccaaggtgcgggcctggatagaaaggaccctggaggagggccggacgcggggctacgtggagaccctgttcggcaggaggcgctatgtgcccgacctggcctcccgggtcgattcggtgcgggaggcggcggagcggatggccttcaacatgcccgtgcagggcaccgccgccgacctgatgaagatcgccatggtcaagctcttccccaggctaaagcccctgggggcccacctcctcctccaggtgcacgacgagctggtcctggaggtgcccgaggaccgggccgaggaggccaaggccctggtcaaggaggtcatggagaacacctaccccttggacgtgcccctcgaggtggaggtgggcgtgggtcgggactggctggaggcgaagggggattgaagcggtcgac

SEQ ID NO: 2927 - DNA, 2605 bp, Artificial Sequence
  Description of Artificial Sequence: Synthetic DNA sequence of Thermus Rt41A DNA Polymerase R769F
atgaaatacctgctgccgaccgctgctgctggtctgctgctcctcgctgcccagccggcgatggccatggatatcggaattaattcggatccgaattccccactttttgacctggaggaaccccccaagcgggtgcttctggtggacggccaccacctggcctaccgcaccttctacgccctgagcctcaccacctcccggggggagccggtgcagatggtctacggcttcgcccggagcctcctcaaggccttgaaggaggacgggcaggcggtggtcgtggtctttgacgccaaggccccctccttccgccacgaggcctacgaggcctacaaggcgggccgggcccccaccccggaggacttcccccgccagctcgccttggtcaagcggctggtggaccttctgggcctggtccgcctcgaggccccgggttacgaggcggacgacgtcctgggcaccctggccaagaaggccgaaagggaggggatggaggtgcgcatcctcacgggagaccgggacttcttccagctcctctccgagaaggtctcggtcctcctgccggacgggaccctggtcaccccaaaggacgtccaggagaagtacggggtgccgccggagcgctgggtggacttccgcgccctcacgggggaccgctcggacaacatccccggggtggcggggataggggagaagaccgcccttcgactcctcgcggagtgggggagcgtggagaacctcctgaagaacctggaccgggtgaagccggactcggtccggcgcaagatagaggcgcaccttgaggacctccgcctctccttggacctggcccgcatccgcaccgacctccccttggaggtggactttaaggccctgcgccgcaggacccccgacctggagggcctgagggcctttttggaggagctggagttcggaagcctccttcatgagttcggcctcctgggaggggagaagccccgggaggaggccccctggcccccgcccgaaggggccttcgtaggcttcctcctctcccgcaaggagcccatgtgggcggagcttctggccctggcggccgccgcagagggccgggtccaccgggcaacaagcccggttgaggccctggccgacctcaaggaggcccgggggttcctggccaaggacctggccgttttggccctgcgggagggggtggccctggaccccacggacgaccccctcctggtggcctacctcctggacccggccaacaccaaccccgagggggtggcccggcgctacgggggcgagttcacggaggacgcagcggagagggccctcctctccgagaggctcttccagaacctctttccccggctttccgagaagctcctctggctctaccaggaggtggagcggcccctctcccgggtcttggcccacatggaggcccggggggtgaggctggacgtcccccttctggaggccctctcctttgagctggagaaggagatggagcgcctggagggggaggtcttccgcttggccggccaccccttcaacctcaactcccgcgaccagctggaaagggtcctctttgacgagctgggccttaccccggtgggtcggacggagaagacgggcaagcgctccaccgcccagggggccctggaggccctccggggggcccaccccatcgtggagctcatcctccagtaccgggagctttccaagctcaaaagcacctacctggaccccctgccccggctcgtccacccgcggacgggccggcttcacacccgcttcaaccagacggccacggccacgggaaggctttccagctccgaccccaacctgcagaacatccccgtgcgcacccccttggggcagcgcatccgcaaggccttcgtggccgaggaggggtggctccttttggcggcggactactcccagatcgagcttcgggtcctggcccacctctcgggggacgagaacctgaagcgggtcttccgggaggggaaggacatccataccgaaaccgccgcctggatgttcggcttagaccccgctctagtggatccaaagatgcgccgggcggccaagacggtcaacttcggcgtcctctacgggatgtccgcccacaggctctcccaggagctcggcatagactacaaggaggcggaggcctttattgagcgctacttccagagcttccccaaggtgcgggcctggatagaaaggaccctggaggagggccggacgcggggctacgtggagaccctgttcggcaggaggcgctatgtgcccgacctggcctcccgggtcttttcggtgcgggaggcggcggagcggatggccttcaacatgcccgtgcagggcaccgccgccgacctgatgaagatcgccatggtcaagctcttccccaggctaaagcccctgggggcccacctcctcctccaggtgcacgacgagctggtcctggaggtgcccgaggaccgggccgaggaggccaaggccctggtcaaggaggtcatggagaacacctaccccttggacgtgcccctcgaggtggaggtgggcgtgggtcgggactggctggaggcgaagggggattgaagcggtcgac

SEQ ID NO: 2928 - DNA, 2605 bp, Artificial Sequence
  Description of Artificial Sequence: Synthetic DNA sequence of Thermus Rt41A DNA Polymerase R769S
atgaaatacctgctgccgaccgctgctgctggtctgctgctcctcgctgcccagccggcgatggccatggatatcggaattaattcggatccgaattccccactttttgacctggaggaaccccccaagcgggtgcttctggtggacggccaccacctggcctaccgcaccttctacgccctgagcctcaccacctcccggggggagccggtgcagatggtctacggcttcgcccggagcctcctcaaggccttgaaggaggacgggcaggcggtggtcgtggtctttgacgccaaggccccctccttccgccacgaggcctacgaggcctacaaggcgggccgggcccccaccccggaggacttcccccgccagctcgccttggtcaagcggctggtggaccttctgggcctggtccgcctcgaggccccgggttacgaggcggacgacgtcctgggcaccctggccaagaaggccgaaagggaggggatggaggtgcgcatcctcacgggagaccgggacttcttccagctcctctccgagaaggtctcggtcctcctgccggacgggaccctggtcaccccaaaggacgtccaggagaagtacggggtgccgccggagcgctgggtggacttccgcgccctcacgggggaccgctcggacaacatccccggggtggcggggataggggagaagaccgcccttcgactcctcgcggagtgggggagcgtggagaacctcctgaagaacctggaccgggtgaagccggactcggtccggcgcaagatagaggcgcaccttgaggacctccgcctctccttggacctggcccgcatccgcaccgacctccccttggaggtggactttaaggccctgcgccgcaggacccccgacctggagggcctgagggcctttttggaggagctggagttcggaagcctccttcatgagttcggcctcctgggaggggagaagccccgggaggaggccccctggcccccgcccgaaggggccttcgtaggcttcctcctctcccgcaaggagcccatgtgggcggagcttctggccctggcggccgccgcagagggccgggtccaccgggcaacaagcccggttgaggccctggccgacctcaaggaggcccgggggttcctggccaaggacctggccgttttggccctgcgggagggggtggccctggaccccacggacgaccccctcctggtggcctacctcctggacccggccaacaccaaccccgagggggtggcccggcgctacgggggcgagttcacggaggacgcagcggagagggccctcctctccgagaggctcttccagaacctctttccccggctttccgagaagctcctctggctctaccaggaggtggagcggcccctctcccgggtcttggcccacatggaggcccggggggtgaggctggacgtcccccttctggaggccctctcctttgagctggagaaggagatggagcgcctggagggggaggtcttccgcttggccggccaccccttcaacctcaactcccgcgaccagctggaaagggtcctctttgacgagctgggccttaccccggtgggtcggacggagaagacgggcaagcgctccaccgcccagggggccctggaggccctccggggggcccaccccatcgtggagctcatcctccagtaccgggagctttccaagctcaaaagcacctacctggaccccctgccccggctcgtccacccgcggacgggccggcttcacacccgcttcaaccagacggccacggccacgggaaggctttccagctccgaccccaacctgcagaacatccccgtgcgcacccccttggggcagcgcatccgcaaggccttcgtggccgaggaggggtggctccttttggcggcggactactcccagatcgagcttcgggtcctggcccacctctcgggggacgagaacctgaagcgggtcttccgggaggggaaggacatccataccgaaaccgccgcctggatgttcggcttagaccccgctctagtggatccaaagatgcgccgggcggccaagacggtcaacttcggcgtcctctacgggatgtccgcccacaggctctcccaggagctcggcatagactacaaggaggcggaggcctttattgagcgctacttccagagcttccccaaggtgcgggcctggatagaaaggaccctggaggagggccggacgcggggctacgtggagaccctgttcggcaggaggcgctatgtgcccgacctggcctcccgggtctcttcggtgcgggaggcggcggagcggatggccttcaacatgcccgtgcagggcaccgccgccgacctgatgaagatcgccatggtcaagctcttccccaggctaaagcccctgggggcccacctcctcctccaggtgcacgacgagctggtcctggaggtgcccgaggaccgggccgaggaggccaaggccctggtcaaggaggtcatggagaacacctaccccttggacgtgcccctcgaggtggaggtgggcgtgggtcgggactggctggaggcgaagggggattgaagcggtcgac

SEQ ID NO: 2929 - DNA, 2605 bp, Artificial Sequence
  Description of Artificial Sequence: Synthetic DNA sequence of Thermus Rt41A DNA Polymerase R769Y
atgaaatacctgctgccgaccgctgctgctggtctgctgctcctcgctgcccagccggcgatggccatggatatcggaattaattcggatccgaattccccactttttgacctggaggaaccccccaagcgggtgcttctggtggacggccaccacctggcctaccgcaccttctacgccctgagcctcaccacctcccggggggagccggtgcagatggtctacggcttcgcccggagcctcctcaaggccttgaaggaggacgggcaggcggtggtcgtggtctttgacgccaaggccccctccttccgccacgaggcctacgaggcctacaaggcgggccgggcccccaccccggaggacttcccccgccagctcgccttggtcaagcggctggtggaccttctgggcctggtccgcctcgaggccccgggttacgaggcggacgacgtcctgggcaccctggccaagaaggccgaaagggaggggatggaggtgcgcatcctcacgggagaccgggacttcttccagctcctctccgagaaggtctcggtcctcctgccggacgggaccctggtcaccccaaaggacgtccaggagaagtacggggtgccgccggagcgctgggtggacttccgcgccctcacgggggaccgctcggacaacatccccggggtggcggggataggggagaagaccgcccttcgactcctcgcggagtgggggagcgtggagaacctcctgaagaacctggaccgggtgaagccggactcggtccggcgcaagatagaggcgcaccttgaggacctccgcctctccttggacctggcccgcatccgcaccgacctccccttggaggtggactttaaggccctgcgccgcaggacccccgacctggagggcctgagggcctttttggaggagctggagttcggaagcctccttcatgagttcggcctcctgggaggggagaagccccgggaggaggccccctggcccccgcccgaaggggccttcgtaggcttcctcctctcccgcaaggagcccatgtgggcggagcttctggccctggcggccgccgcagagggccgggtccaccgggcaacaagcccggttgaggccctggccgacctcaaggaggcccgggggttcctggccaaggacctggccgttttggccctgcgggagggggtggccctggaccccacggacgaccccctcctggtggcctacctcctggacccggccaacaccaaccccgagggggtggcccggcgctacgggggcgagttcacggaggacgcagcggagagggccctcctctccgagaggctcttccagaacctctttccccggctttccgagaagctcctctggctctaccaggaggtggagcggcccctctcccgggtcttggcccacatggaggcccggggggtgaggctggacgtcccccttctggaggccctctcctttgagctggagaaggagatggagcgcctggagggggaggtcttccgcttggccggccaccccttcaacctcaactcccgcgaccagctggaaagggtcctctttgacgagctgggccttaccccggtgggtcggacggagaagacgggcaagcgctccaccgcccagggggccctggaggccctccggggggcccaccccatcgtggagctcatcctccagtaccgggagctttccaagctcaaaagcacctacctggaccccctgccccggctcgtccacccgcggacgggccggcttcacacccgcttcaaccagacggccacggccacgggaaggctttccagctccgaccccaacctgcagaacatccccgtgcgcacccccttggggcagcgcatccgcaaggccttcgtggccgaggaggggtggctccttttggcggcggactactcccagatcgagcttcgggtcctggcccacctctcgggggacgagaacctgaagcgggtcttccgggaggggaaggacatccataccgaaaccgccgcctggatgttcggcttagaccccgctctagtggatccaaagatgcgccgggcggccaagacggtcaacttcggcgtcctctacgggatgtccgcccacaggctctcccaggagctcggcatagactacaaggaggcggaggcctttattgagcgctacttccagagcttccccaaggtgcgggcctggatagaaaggaccctggaggagggccggacgcggggctacgtggagaccctgttcggcaggaggcgctatgtgcccgacctggcctcccgggtctattcggtgcgggaggcggcggagcggatggccttcaacatgcccgtgcagggcaccgccgccgacctgatgaagatcgccatggtcaagctcttccccaggctaaagcccctgggggcccacctcctcctccaggtgcacgacgagctggtcctggaggtgcccgaggaccgggccgaggaggccaaggccctggtcaaggaggtcatggagaacacctaccccttggacgtgcccctcgaggtggaggtgggcgtgggtcgggactggctggaggcgaagggggattgaagcggtcgac

SEQ ID NO: 2930 - DNA, 2605 bp, Artificial Sequence
  Description of Artificial Sequence: Synthetic DNA sequence of Thermus Rt41A DNA Polymerase R769W
atgaaatacctgctgccgaccgctgctgctggtctgctgctcctcgctgcccagccggcgatggccatggatatcggaattaattcggatccgaattccccactttttgacctggaggaaccccccaagcgggtgcttctggtggacggccaccacctggcctaccgcaccttctacgccctgagcctcaccacctcccggggggagccggtgcagatggtctacggcttcgcccggagcctcctcaaggccttgaaggaggacgggcaggcggtggtcgtggtctttgacgccaaggccccctccttccgccacgaggcctacgaggcctacaaggcgggccgggcccccaccccggaggacttcccccgccagctcgccttggtcaagcggctggtggaccttctgggcctggtccgcctcgaggccccgggttacgaggcggacgacgtcctgggcaccctggccaagaaggccgaaagggaggggatggaggtgcgcatcctcacgggagaccgggacttcttccagctcctctccgagaaggtctcggtcctcctgccggacgggaccctggtcaccccaaaggacgtccaggagaagtacggggtgccgccggagcgctgggtggacttccgcgccctcacgggggaccgctcggacaacatccccggggtggcggggataggggagaagaccgcccttcgactcctcgcggagtgggggagcgtggagaacctcctgaagaacctggaccgggtgaagccggactcggtccggcgcaagatagaggcgcaccttgaggacctccgcctctccttggacctggcccgcatccgcaccgacctccccttggaggtggactttaaggccctgcgccgcaggacccccgacctggagggcctgagggcctttttggaggagctggagttcggaagcctccttcatgagttcggcctcctgggaggggagaagccccgggaggaggccccctggcccccgcccgaaggggccttcgtaggcttcctcctctcccgcaaggagcccatgtgggcggagcttctggccctggcggccgccgcagagggccgggtccaccgggcaacaagcccggttgaggccctggccgacctcaaggaggcccgggggttcctggccaaggacctggccgttttggccctgcgggagggggtggccctggaccccacggacgaccccctcctggtggcctacctcctggacccggccaacaccaaccccgagggggtggcccggcgctacgggggcgagttcacggaggacgcagcggagagggccctcctctccgagaggctcttccagaacctctttccccggctttccgagaagctcctctggctctaccaggaggtggagcggcccctctcccgggtcttggcccacatggaggcccggggggtgaggctggacgtcccccttctggaggccctctcctttgagctggagaaggagatggagcgcctggagggggaggtcttccgcttggccggccaccccttcaacctcaactcccgcgaccagctggaaagggtcctctttgacgagctgggccttaccccggtgggtcggacggagaagacgggcaagcgctccaccgcccagggggccctggaggccctccggggggcccaccccatcgtggagctcatcctccagtaccgggagctttccaagctcaaaagcacctacctggaccccctgccccggctcgtccacccgcggacgggccggcttcacacccgcttcaaccagacggccacggccacgggaaggctttccagctccgaccccaacctgcagaacatccccgtgcgcacccccttggggcagcgcatccgcaaggccttcgtggccgaggaggggtggctccttttggcggcggactactcccagatcgagcttcgggtcctggcccacctctcgggggacgagaacctgaagcgggtcttccgggaggggaaggacatccataccgaaaccgccgcctggatgttcggcttagaccccgctctagtggatccaaagatgcgccgggcggccaagacggtcaacttcggcgtcctctacgggatgtccgcccacaggctctcccaggagctcggcatagactacaaggaggcggaggcctttattgagcgctacttccagagcttccccaaggtgcgggcctggatagaaaggaccctggaggagggccggacgcggggctacgtggagaccctgttcggcaggaggcgctatgtgcccgacctggcctcccgggtctggtcggtgcgggaggcggcggagcggatggccttcaacatgcccgtgcagggcaccgccgccgacctgatgaagatcgccatggtcaagctcttccccaggctaaagcccctgggggcccacctcctcctccaggtgcacgacgagctggtcctggaggtgcccgaggaccgggccgaggaggccaaggccctggtcaaggaggtcatggagaacacctaccccttggacgtgcccctcgaggtggaggtgggcgtgggtcgggactggctggaggcgaagggggattgaagcggtcgac

SEQ ID NO: 2931 - DNA, 2605 bp, Artificial Sequence
  Description of Artificial Sequence: Synthetic DNA sequence of Thermus Rt41A DNA Polymerase R769P
atgaaatacctgctgccgaccgctgctgctggtctgctgctcctcgctgcccagccggcgatggccatggatatcggaattaattcggatccgaattccccactttttgacctggaggaaccccccaagcgggtgcttctggtggacggccaccacctggcctaccgcaccttctacgccctgagcctcaccacctcccggggggagccggtgcagatggtctacggcttcgcccggagcctcctcaaggccttgaaggaggacgggcaggcggtggtcgtggtctttgacgccaaggccccctccttccgccacgaggcctacgaggcctacaaggcgggccgggcccccaccccggaggacttcccccgccagctcgccttggtcaagcggctggtggaccttctgggcctggtccgcctcgaggccccgggttacgaggcggacgacgtcctgggcaccctggccaagaaggccgaaagggaggggatggaggtgcgcatcctcacgggagaccgggacttcttccagctcctctccgagaaggtctcggtcctcctgccggacgggaccctggtcaccccaaaggacgtccaggagaagtacggggtgccgccggagcgctgggtggacttccgcgccctcacgggggaccgctcggacaacatccccggggtggcggggataggggagaagaccgcccttcgactcctcgcggagtgggggagcgtggagaacctcctgaagaacctggaccgggtgaagccggactcggtccggcgcaagatagaggcgcaccttgaggacctccgcctctccttggacctggcccgcatccgcaccgacctccccttggaggtggactttaaggccctgcgccgcaggacccccgacctggagggcctgagggcctttttggaggagctggagttcggaagcctccttcatgagttcggcctcctgggaggggagaagccccgggaggaggccccctggcccccgcccgaaggggccttcgtaggcttcctcctctcccgcaaggagcccatgtgggcggagcttctggccctggcggccgccgcagagggccgggtccaccgggcaacaagcccggttgaggccctggccgacctcaaggaggcccgggggttcctggccaaggacctggccgttttggccctgcgggagggggtggccctggaccccacggacgaccccctcctggtggcctacctcctggacccggccaacaccaaccccgagggggtggcccggcgctacgggggcgagttcacggaggacgcagcggagagggccctcctctccgagaggctcttccagaacctctttccccggctttccgagaagctcctctggctctaccaggaggtggagcggcccctctcccgggtcttggcccacatggaggcccggggggtgaggctggacgtcccccttctggaggccctctcctttgagctggagaaggagatggagcgcctggagggggaggtcttccgcttggccggccaccccttcaacctcaactcccgcgaccagctggaaagggtcctctttgacgagctgggccttaccccggtgggtcggacggagaagacgggcaagcgctccaccgcccagggggccctggaggccctccggggggcccaccccatcgtggagctcatcctccagtaccgggagctttccaagctcaaaagcacctacctggaccccctgccccggctcgtccacccgcggacgggccggcttcacacccgcttcaaccagacggccacggccacgggaaggctttccagctccgaccccaacctgcagaacatccccgtgcgcacccccttggggcagcgcatccgcaaggccttcgtggccgaggaggggtggctccttttggcggcggactactcccagatcgagcttcgggtcctggcccacctctcgggggacgagaacctgaagcgggtcttccgggaggggaaggacatccataccgaaaccgccgcctggatgttcggcttagaccccgctctagtggatccaaagatgcgccgggcggccaagacggtcaacttcggcgtcctctacgggatgtccgcccacaggctctcccaggagctcggcatagactacaaggaggcggaggcctttattgagcgctacttccagagcttccccaaggtgcgggcctggatagaaaggaccctggaggagggccggacgcggggctacgtggagaccctgttcggcaggaggcgctatgtgcccgacctggcctcccgggtcccttcggtgcgggaggcggcggagcggatggccttcaacatgcccgtgcagggcaccgccgccgacctgatgaagatcgccatggtcaagctcttccccaggctaaagcccctgggggcccacctcctcctccaggtgcacgacgagctggtcctggaggtgcccgaggaccgggccgaggaggccaaggccctggtcaaggaggtcatggagaacacctaccccttggacgtgcccctcgaggtggaggtgggcgtgggtcgggactggctggaggcgaagggggattgaagcggtcgac

SEQ ID NO: 2932 - DNA, 2605 bp, Artificial Sequence
  Description of Artificial Sequence: Synthetic DNA sequence of Thermus Rt41A DNA Polymerase R769M
atgaaatacctgctgccgaccgctgctgctggtctgctgctcctcgctgcccagccggcgatggccatggatatcggaattaattcggatccgaattccccactttttgacctggaggaaccccccaagcgggtgcttctggtggacggccaccacctggcctaccgcaccttctacgccctgagcctcaccacctcccggggggagccggtgcagatggtctacggcttcgcccggagcctcctcaaggccttgaaggaggacgggcaggcggtggtcgtggtctttgacgccaaggccccctccttccgccacgaggcctacgaggcctacaaggcgggccgggcccccaccccggaggacttcccccgccagctcgccttggtcaagcggctggtggaccttctgggcctggtccgcctcgaggccccgggttacgaggcggacgacgtcctgggcaccctggccaagaaggccgaaagggaggggatggaggtgcgcatcctcacgggagaccgggacttcttccagctcctctccgagaaggtctcggtcctcctgccggacgggaccctggtcaccccaaaggacgtccaggagaagtacggggtgccgccggagcgctgggtggacttccgcgccctcacgggggaccgctcggacaacatccccggggtggcggggataggggagaagaccgcccttcgactcctcgcggagtgggggagcgtggagaacctcctgaagaacctggaccgggtgaagccggactcggtccggcgcaagatagaggcgcaccttgaggacctccgcctctccttggacctggcccgcatccgcaccgacctccccttggaggtggactttaaggccctgcgccgcaggacccccgacctggagggcctgagggcctttttggaggagctggagttcggaagcctccttcatgagttcggcctcctgggaggggagaagccccgggaggaggccccctggcccccgcccgaaggggccttcgtaggcttcctcctctcccgcaaggagcccatgtgggcggagcttctggccctggcggccgccgcagagggccgggtccaccgggcaacaagcccggttgaggccctggccgacctcaaggaggcccgggggttcctggccaaggacctggccgttttggccctgcgggagggggtggccctggaccccacggacgaccccctcctggtggcctacctcctggacccggccaacaccaaccccgagggggtggcccggcgctacgggggcgagttcacggaggacgcagcggagagggccctcctctccgagaggctcttccagaacctctttccccggctttccgagaagctcctctggctctaccaggaggtggagcggcccctctcccgggtcttggcccacatggaggcccggggggtgaggctggacgtcccccttctggaggccctctcctttgagctggagaaggagatggagcgcctggagggggaggtcttccgcttggccggccaccccttcaacctcaactcccgcgaccagctggaaagggtcctctttgacgagctgggccttaccccggtgggtcggacggagaagacgggcaagcgctccaccgcccagggggccctggaggccctccggggggcccaccccatcgtggagctcatcctccagtaccgggagctttccaagctcaaaagcacctacctggaccccctgccccggctcgtccacccgcggacgggccggcttcacacccgcttcaaccagacggccacggccacgggaaggctttccagctccgaccccaacctgcagaacatccccgtgcgcacccccttggggcagcgcatccgcaaggccttcgtggccgaggaggggtggctccttttggcggcggactactcccagatcgagcttcgggtcctggcccacctctcgggggacgagaacctgaagcgggtcttccgggaggggaaggacatccataccgaaaccgccgcctggatgttcggcttagaccccgctctagtggatccaaagatgcgccgggcggccaagacggtcaacttcggcgtcctctacgggatgtccgcccacaggctctcccaggagctcggcatagactacaaggaggcggaggcctttattgagcgctacttccagagcttccccaaggtgcgggcctggatagaaaggaccctggaggagggccggacgcggggctacgtggagaccctgttcggcaggaggcgctatgtgcccgacctggcctcccgggtcatgtcggtgcgggaggcggcggagcggatggccttcaacatgcccgtgcagggcaccgccgccgacctgatgaagatcgccatggtcaagctcttccccaggctaaagcccctgggggcccacctcctcctccaggtgcacgacgagctggtcctggaggtgcccgaggaccgggccgaggaggccaaggccctggtcaaggaggtcatggagaacacctaccccttggacgtgcccctcgaggtggaggtgggcgtgggtcgggactggctggaggcgaagggggattgaagcggtcgac

SEQ ID NO: 2933 - DNA, 2605 bp, Artificial Sequence
  Description of Artificial Sequence: Synthetic DNA sequence of Thermus Rt41A DNA Polymerase R769T
atgaaatacctgctgccgaccgctgctgctggtctgctgctcctcgctgcccagccggcgatggccatggatatcggaattaattcggatccgaattccccactttttgacctggaggaaccccccaagcgggtgcttctggtggacggccaccacctggcctaccgcaccttctacgccctgagcctcaccacctcccggggggagccggtgcagatggtctacggcttcgcccggagcctcctcaaggccttgaaggaggacgggcaggcggtggtcgtggtctttgacgccaaggccccctccttccgccacgaggcctacgaggcctacaaggcgggccgggcccccaccccggaggacttcccccgccagctcgccttggtcaagcggctggtggaccttctgggcctggtccgcctcgaggccccgggttacgaggcggacgacgtcctgggcaccctggccaagaaggccgaaagggaggggatggaggtgcgcatcctcacgggagaccgggacttcttccagctcctctccgagaaggtctcggtcctcctgccggacgggaccctggtcaccccaaaggacgtccaggagaagtacggggtgccgccggagcgctgggtggacttccgcgccctcacgggggaccgctcggacaacatccccggggtggcggggataggggagaagaccgcccttcgactcctcgcggagtgggggagcgtggagaacctcctgaagaacctggaccgggtgaagccggactcggtccggcgcaagatagaggcgcaccttgaggacctccgcctctccttggacctggcccgcatccgcaccgacctccccttggaggtggactttaaggccctgcgccgcaggacccccgacctggagggcctgagggcctttttggaggagctggagttcggaagcctccttcatgagttcggcctcctgggaggggagaagccccgggaggaggccccctggcccccgcccgaaggggccttcgtaggcttcctcctctcccgcaaggagcccatgtgggcggagcttctggccctggcggccgccgcagagggccgggtccaccgggcaacaagcccggttgaggccctggccgacctcaaggaggcccgggggttcctggccaaggacctggccgttttggccctgcgggagggggtggccctggaccccacggacgaccccctcctggtggcctacctcctggacccggccaacaccaaccccgagggggtggcccggcgctacgggggcgagttcacggaggacgcagcggagagggccctcctctccgagaggctcttccagaacctctttccccggctttccgagaagctcctctggctctaccaggaggtggagcggcccctctcccgggtcttggcccacatggaggcccggggggtgaggctggacgtcccccttctggaggccctctcctttgagctggagaaggagatggagcgcctggagggggaggtcttccgcttggccggccaccccttcaacctcaactcccgcgaccagctggaaagggtcctctttgacgagctgggccttaccccggtgggtcggacggagaagacgggcaagcgctccaccgcccagggggccctggaggccctccggggggcccaccccatcgtggagctcatcctccagtaccgggagctttccaagctcaaaagcacctacctggaccccctgccccggctcgtccacccgcggacgggccggcttcacacccgcttcaaccagacggccacggccacgggaaggctttccagctccgaccccaacctgcagaacatccccgtgcgcacccccttggggcagcgcatccgcaaggccttcgtggccgaggaggggtggctccttttggcggcggactactcccagatcgagcttcgggtcctggcccacctctcgggggacgagaacctgaagcgggtcttccgggaggggaaggacatccataccgaaaccgccgcctggatgttcggcttagaccccgctctagtggatccaaagatgcgccgggcggccaagacggtcaacttcggcgtcctctacgggatgtccgcccacaggctctcccaggagctcggcatagactacaaggaggcggaggcctttattgagcgctacttccagagcttccccaaggtgcgggcctggatagaaaggaccctggaggagggccggacgcggggctacgtggagaccctgttcggcaggaggcgctatgtgcccgacctggcctcccgggtcacttcggtgcgggaggcggcggagcggatggccttcaacatgcccgtgcagggcaccgccgccgacctgatgaagatcgccatggtcaagctcttccccaggctaaagcccctgggggcccacctcctcctccaggtgcacgacgagctggtcctggaggtgcccgaggaccgggccgaggaggccaaggccctggtcaaggaggtcatggagaacacctaccccttggacgtgcccctcgaggtggaggtgggcgtgggtcgggactggctggaggcgaagggggattgaagcggtcgac

SEQ ID NO: 2934 - DNA, 2605 bp, Artificial Sequence
  Description of Artificial Sequence: Synthetic DNA sequence of Thermus Rt41A DNA Polymerase R769N
atgaaatacctgctgccgaccgctgctgctggtctgctgctcctcgctgcccagccggcgatggccatggatatcggaattaattcggatccgaattccccactttttgacctggaggaaccccccaagcgggtgcttctggtggacggccaccacctggcctaccgcaccttctacgccctgagcctcaccacctcccggggggagccggtgcagatggtctacggcttcgcccggagcctcctcaaggccttgaaggaggacgggcaggcggtggtcgtggtctttgacgccaaggccccctccttccgccacgaggcctacgaggcctacaaggcgggccgggcccccaccccggaggacttcccccgccagctcgccttggtcaagcggctggtggaccttctgggcctggtccgcctcgaggccccgggttacgaggcggacgacgtcctgggcaccctggccaagaaggccgaaagggaggggatggaggtgcgcatcctcacgggagaccgggacttcttccagctcctctccgagaaggtctcggtcctcctgccggacgggaccctggtcaccccaaaggacgtccaggagaagtacggggtgccgccggagcgctgggtggacttccgcgccctcacgggggaccgctcggacaacatccccggggtggcggggataggggagaagaccgcccttcgactcctcgcggagtgggggagcgtggagaacctcctgaagaacctggaccgggtgaagccggactcggtccggcgcaagatagaggcgcaccttgaggacctccgcctctccttggacctggcccgcatccgcaccgacctccccttggaggtggactttaaggccctgcgccgcaggacccccgacctggagggcctgagggcctttttggaggagctggagttcggaagcctccttcatgagttcggcctcctgggaggggagaagccccgggaggaggccccctggcccccgcccgaaggggccttcgtaggcttcctcctctcccgcaaggagcccatgtgggcggagcttctggccctggcggccgccgcagagggccgggtccaccgggcaacaagcccggttgaggccctggccgacctcaaggaggcccgggggttcctggccaaggacctggccgttttggccctgcgggagggggtggccctggaccccacggacgaccccctcctggtggcctacctcctggacccggccaacaccaaccccgagggggtggcccggcgctacgggggcgagttcacggaggacgcagcggagagggccctcctctccgagaggctcttccagaacctctttccccggctttccgagaagctcctctggctctaccaggaggtggagcggcccctctcccgggtcttggcccacatggaggcccggggggtgaggctggacgtcccccttctggaggccctctcctttgagctggagaaggagatggagcgcctggagggggaggtcttccgcttggccggccaccccttcaacctcaactcccgcgaccagctggaaagggtcctctttgacgagctgggccttaccccggtgggtcggacggagaagacgggcaagcgctccaccgcccagggggccctggaggccctccggggggcccaccccatcgtggagctcatcctccagtaccgggagctttccaagctcaaaagcacctacctggaccccctgccccggctcgtccacccgcggacgggccggcttcacacccgcttcaaccagacggccacggccacgggaaggctttccagctccgaccccaacctgcagaacatccccgtgcgcacccccttggggcagcgcatccgcaaggccttcgtggccgaggaggggtggctccttttggcggcggactactcccagatcgagcttcgggtcctggcccacctctcgggggacgagaacctgaagcgggtcttccgggaggggaaggacatccataccgaaaccgccgcctggatgttcggcttagaccccgctctagtggatccaaagatgcgccgggcggccaagacggtcaacttcggcgtcctctacgggatgtccgcccacaggctctcccaggagctcggcatagactacaaggaggcggaggcctttattgagcgctacttccagagcttccccaaggtgcgggcctggatagaaaggaccctggaggagggccggacgcggggctacgtggagaccctgttcggcaggaggcgctatgtgcccgacctggcctcccgggtcaattcggtgcgggaggcggcggagcggatggccttcaacatgcccgtgcagggcaccgccgccgacctgatgaagatcgccatggtcaagctcttccccaggctaaagcccctgggggcccacctcctcctccaggtgcacgacgagctggtcctggaggtgcccgaggaccgggccgaggaggccaaggccctggtcaaggaggtcatggagaacacctaccccttggacgtgcccctcgaggtggaggtgggcgtgggtcgggactggctggaggcgaagggggattgaagcggtcgac

SEQ ID NO: 2935 - DNA, 2605 bp, Artificial Sequence
  Description of Artificial Sequence: Synthetic DNA sequence of Thermus Rt41A DNA Polymerase R769V
atgaaatacctgctgccgaccgctgctgctggtctgctgctcctcgctgcccagccggcgatggccatggatatcggaattaattcggatccgaattccccactttttgacctggaggaaccccccaagcgggtgcttctggtggacggccaccacctggcctaccgcaccttctacgccctgagcctcaccacctcccggggggagccggtgcagatggtctacggcttcgcccggagcctcctcaaggccttgaaggaggacgggcaggcggtggtcgtggtctttgacgccaaggccccctccttccgccacgaggcctacgaggcctacaaggcgggccgggcccccaccccggaggacttcccccgccagctcgccttggtcaagcggctggtggaccttctgggcctggtccgcctcgaggccccgggttacgaggcggacgacgtcctgggcaccctggccaagaaggccgaaagggaggggatggaggtgcgcatcctcacgggagaccgggacttcttccagctcctctccgagaaggtctcggtcctcctgccggacgggaccctggtcaccccaaaggacgtccaggagaagtacggggtgccgccggagcgctgggtggacttccgcgccctcacgggggaccgctcggacaacatccccggggtggcggggataggggagaagaccgcccttcgactcctcgcggagtgggggagcgtggagaacctcctgaagaacctggaccgggtgaagccggactcggtccggcgcaagatagaggcgcaccttgaggacctccgcctctccttggacctggcccgcatccgcaccgacctccccttggaggtggactttaaggccctgcgccgcaggacccccgacctggagggcctgagggcctttttggaggagctggagttcggaagcctccttcatgagttcggcctcctgggaggggagaagccccgggaggaggccccctggcccccgcccgaaggggccttcgtaggcttcctcctctcccgcaaggagcccatgtgggcggagcttctggccctggcggccgccgcagagggccgggtccaccgggcaacaagcccggttgaggccctggccgacctcaaggaggcccgggggttcctggccaaggacctggccgttttggccctgcgggagggggtggccctggaccccacggacgaccccctcctggtggcctacctcctggacccggccaacaccaaccccgagggggtggcccggcgctacgggggcgagttcacggaggacgcagcggagagggccctcctctccgagaggctcttccagaacctctttccccggctttccgagaagctcctctggctctaccaggaggtggagcggcccctctcccgggtcttggcccacatggaggcccggggggtgaggctggacgtcccccttctggaggccctctcctttgagctggagaaggagatggagcgcctggagggggaggtcttccgcttggccggccaccccttcaacctcaactcccgcgaccagctggaaagggtcctctttgacgagctgggccttaccccggtgggtcggacggagaagacgggcaagcgctccaccgcccagggggccctggaggccctccggggggcccaccccatcgtggagctcatcctccagtaccgggagctttccaagctcaaaagcacctacctggaccccctgccccggctcgtccacccgcggacgggccggcttcacacccgcttcaaccagacggccacggccacgggaaggctttccagctccgaccccaacctgcagaacatccccgtgcgcacccccttggggcagcgcatccgcaaggccttcgtggccgaggaggggtggctccttttggcggcggactactcccagatcgagcttcgggtcctggcccacctctcgggggacgagaacctgaagcgggtcttccgggaggggaaggacatccataccgaaaccgccgcctggatgttcggcttagaccccgctctagtggatccaaagatgcgccgggcggccaagacggtcaacttcggcgtcctctacgggatgtccgcccacaggctctcccaggagctcggcatagactacaaggaggcggaggcctttattgagcgctacttccagagcttccccaaggtgcgggcctggatagaaaggaccctggaggagggccggacgcggggctacgtggagaccctgttcggcaggaggcgctatgtgcccgacctggcctcccgggtcgtctcggtgcgggaggcggcggagcggatggccttcaacatgcccgtgcagggcaccgccgccgacctgatgaagatcgccatggtcaagctcttccccaggctaaagcccctgggggcccacctcctcctccaggtgcacgacgagctggtcctggaggtgcccgaggaccgggccgaggaggccaaggccctggtcaaggaggtcatggagaacacctaccccttggacgtgcccctcgaggtggaggtgggcgtgggtcgggactggctggaggcgaagggggattgaagcggtcgac

SEQ ID NO: 2936 - DNA, 2605 bp, Artificial Sequence
  Description of Artificial Sequence: Synthetic DNA sequence of Thermus Rt41A DNA Polymerase S770A
atgaaatacctgctgccgaccgctgctgctggtctgctgctcctcgctgcccagccggcgatggccatggatatcggaattaattcggatccgaattccccactttttgacctggaggaaccccccaagcgggtgcttctggtggacggccaccacctggcctaccgcaccttctacgccctgagcctcaccacctcccggggggagccggtgcagatggtctacggcttcgcccggagcctcctcaaggccttgaaggaggacgggcaggcggtggtcgtggtctttgacgccaaggccccctccttccgccacgaggcctacgaggcctacaaggcgggccgggcccccaccccggaggacttcccccgccagctcgccttggtcaagcggctggtggaccttctgggcctggtccgcctcgaggccccgggttacgaggcggacgacgtcctgggcaccctggccaagaaggccgaaagggaggggatggaggtgcgcatcctcacgggagaccgggacttcttccagctcctctccgagaaggtctcggtcctcctgccggacgggaccctggtcaccccaaaggacgtccaggagaagtacggggtgccgccggagcgctgggtggacttccgcgccctcacgggggaccgctcggacaacatccccggggtggcggggataggggagaagaccgcccttcgactcctcgcggagtgggggagcgtggagaacctcctgaagaacctggaccgggtgaagccggactcggtccggcgcaagatagaggcgcaccttgaggacctccgcctctccttggacctggcccgcatccgcaccgacctccccttggaggtggactttaaggccctgcgccgcaggacccccgacctggagggcctgagggcctttttggaggagctggagttcggaagcctccttcatgagttcggcctcctgggaggggagaagccccgggaggaggccccctggcccccgcccgaaggggccttcgtaggcttcctcctctcccgcaaggagcccatgtgggcggagcttctggccctggcggccgccgcagagggccgggtccaccgggcaacaagcccggttgaggccctggccgacctcaaggaggcccgggggttcctggccaaggacctggccgttttggccctgcgggagggggtggccctggaccccacggacgaccccctcctggtggcctacctcctggacccggccaacaccaaccccgagggggtggcccggcgctacgggggcgagttcacggaggacgcagcggagagggccctcctctccgagaggctcttccagaacctctttccccggctttccgagaagctcctctggctctaccaggaggtggagcggcccctctcccgggtcttggcccacatggaggcccggggggtgaggctggacgtcccccttctggaggccctctcctttgagctggagaaggagatggagcgcctggagggggaggtcttccgcttggccggccaccccttcaacctcaactcccgcgaccagctggaaagggtcctctttgacgagctgggccttaccccggtgggtcggacggagaagacgggcaagcgctccaccgcccagggggccctggaggccctccggggggcccaccccatcgtggagctcatcctccagtaccgggagctttccaagctcaaaagcacctacctggaccccctgccccggctcgtccacccgcggacgggccggcttcacacccgcttcaaccagacggccacggccacgggaaggctttccagctccgaccccaacctgcagaacatccccgtgcgcacccccttggggcagcgcatccgcaaggccttcgtggccgaggaggggtggctccttttggcggcggactactcccagatcgagcttcgggtcctggcccacctctcgggggacgagaacctgaagcgggtcttccgggaggggaaggacatccataccgaaaccgccgcctggatgttcggcttagaccccgctctagtggatccaaagatgcgccgggcggccaagacggtcaacttcggcgtcctctacgggatgtccgcccacaggctctcccaggagctcggcatagactacaaggaggcggaggcctttattgagcgctacttccagagcttccccaaggtgcgggcctggatagaaaggaccctggaggagggccggacgcggggctacgtggagaccctgttcggcaggaggcgctatgtgcccgacctggcctcccgggtccgcgctgtgcgggaggcggcggagcggatggccttcaacatgcccgtgcagggcaccgccgccgacctgatgaagatcgccatggtcaagctcttccccaggctaaagcccctgggggcccacctcctcctccaggtgcacgacgagctggtcctggaggtgcccgaggaccgggccgaggaggccaaggccctggtcaaggaggtcatggagaacacctaccccttggacgtgcccctcgaggtggaggtgggcgtgggtcgggactggctggaggcgaagggggattgaagcggtcgac

SEQ ID NO: 2937 - DNA, 2605 bp, Artificial Sequence
  Description of Artificial Sequence: Synthetic DNA sequence of Thermus Rt41A DNA Polymerase S770R
atgaaatacctgctgccgaccgctgctgctggtctgctgctcctcgctgcccagccggcgatggccatggatatcggaattaattcggatccgaattccccactttttgacctggaggaaccccccaagcgggtgcttctggtggacggccaccacctggcctaccgcaccttctacgccctgagcctcaccacctcccggggggagccggtgcagatggtctacggcttcgcccggagcctcctcaaggccttgaaggaggacgggcaggcggtggtcgtggtctttgacgccaaggccccctccttccgccacgaggcctacgaggcctacaaggcgggccgggcccccaccccggaggacttcccccgccagctcgccttggtcaagcggctggtggaccttctgggcctggtccgcctcgaggccccgggttacgaggcggacgacgtcctgggcaccctggccaagaaggccgaaagggaggggatggaggtgcgcatcctcacgggagaccgggacttcttccagctcctctccgagaaggtctcggtcctcctgccggacgggaccctggtcaccccaaaggacgtccaggagaagtacggggtgccgccggagcgctgggtggacttccgcgccctcacgggggaccgctcggacaacatccccggggtggcggggataggggagaagaccgcccttcgactcctcgcggagtgggggagcgtggagaacctcctgaagaacctggaccgggtgaagccggactcggtccggcgcaagatagaggcgcaccttgaggacctccgcctctccttggacctggcccgcatccgcaccgacctccccttggaggtggactttaaggccctgcgccgcaggacccccgacctggagggcctgagggcctttttggaggagctggagttcggaagcctccttcatgagttcggcctcctgggaggggagaagccccgggaggaggccccctggcccccgcccgaaggggccttcgtaggcttcctcctctcccgcaaggagcccatgtgggcggagcttctggccctggcggccgccgcagagggccgggtccaccgggcaacaagcccggttgaggccctggccgacctcaaggaggcccgggggttcctggccaaggacctggccgttttggccctgcgggagggggtggccctggaccccacggacgaccccctcctggtggcctacctcctggacccggccaacaccaaccccgagggggtggcccggcgctacgggggcgagttcacggaggacgcagcggagagggccctcctctccgagaggctcttccagaacctctttccccggctttccgagaagctcctctggctctaccaggaggtggagcggcccctctcccgggtcttggcccacatggaggcccggggggtgaggctggacgtcccccttctggaggccctctcctttgagctggagaaggagatggagcgcctggagggggaggtcttccgcttggccggccaccccttcaacctcaactcccgcgaccagctggaaagggtcctctttgacgagctgggccttaccccggtgggtcggacggagaagacgggcaagcgctccaccgcccagggggccctggaggccctccggggggcccaccccatcgtggagctcatcctccagtaccgggagctttccaagctcaaaagcacctacctggaccccctgccccggctcgtccacccgcggacgggccggcttcacacccgcttcaaccagacggccacggccacgggaaggctttccagctccgaccccaacctgcagaacatccccgtgcgcacccccttggggcagcgcatccgcaaggccttcgtggccgaggaggggtggctccttttggcggcggactactcccagatcgagcttcgggtcctggcccacctctcgggggacgagaacctgaagcgggtcttccgggaggggaaggacatccataccgaaaccgccgcctggatgttcggcttagaccccgctctagtggatccaaagatgcgccgggcggccaagacggtcaacttcggcgtcctctacgggatgtccgcccacaggctctcccaggagctcggcatagactacaaggaggcggaggcctttattgagcgctacttccagagcttccccaaggtgcgggcctggatagaaaggaccctggaggagggccggacgcggggctacgtggagaccctgttcggcaggaggcgctatgtgcccgacctggcctcccgggtccgccgagtgcgggaggcggcggagcggatggccttcaacatgcccgtgcagggcaccgccgccgacctgatgaagatcgccatggtcaagctcttccccaggctaaagcccctgggggcccacctcctcctccaggtgcacgacgagctggtcctggaggtgcccgaggaccgggccgaggaggccaaggccctggtcaaggaggtcatggagaacacctaccccttggacgtgcccctcgaggtggaggtgggcgtgggtcgggactggctggaggcgaagggggattgaagcggtcgac

SEQ ID NO: 2938 - DNA, 2605 bp, Artificial Sequence
  Description of Artificial Sequence: Synthetic DNA sequence of Thermus Rt41A DNA Polymerase S770C
atgaaatacctgctgccgaccgctgctgctggtctgctgctcctcgctgcccagccggcgatggccatggatatcggaattaattcggatccgaattccccactttttgacctggaggaaccccccaagcgggtgcttctggtggacggccaccacctggcctaccgcaccttctacgccctgagcctcaccacctcccggggggagccggtgcagatggtctacggcttcgcccggagcctcctcaaggccttgaaggaggacgggcaggcggtggtcgtggtctttgacgccaaggccccctccttccgccacgaggcctacgaggcctacaaggcgggccgggcccccaccccggaggacttcccccgccagctcgccttggtcaagcggctggtggaccttctgggcctggtccgcctcgaggccccgggttacgaggcggacgacgtcctgggcaccctggccaagaaggccgaaagggaggggatggaggtgcgcatcctcacgggagaccgggacttcttccagctcctctccgagaaggtctcggtcctcctgccggacgggaccctggtcaccccaaaggacgtccaggagaagtacggggtgccgccggagcgctgggtggacttccgcgccctcacgggggaccgctcggacaacatccccggggtggcggggataggggagaagaccgcccttcgactcctcgcggagtgggggagcgtggagaacctcctgaagaacctggaccgggtgaagccggactcggtccggcgcaagatagaggcgcaccttgaggacctccgcctctccttggacctggcccgcatccgcaccgacctccccttggaggtggactttaaggccctgcgccgcaggacccccgacctggagggcctgagggcctttttggaggagctggagttcggaagcctccttcatgagttcggcctcctgggaggggagaagccccgggaggaggccccctggcccccgcccgaaggggccttcgtaggcttcctcctctcccgcaaggagcccatgtgggcggagcttctggccctggcggccgccgcagagggccgggtccaccgggcaacaagcccggttgaggccctggccgacctcaaggaggcccgggggttcctggccaaggacctggccgttttggccctgcgggagggggtggccctggaccccacggacgaccccctcctggtggcctacctcctggacccggccaacaccaaccccgagggggtggcccggcgctacgggggcgagttcacggaggacgcagcggagagggccctcctctccgagaggctcttccagaacctctttccccggctttccgagaagctcctctggctctaccaggaggtggagcggcccctctcccgggtcttggcccacatggaggcccggggggtgaggctggacgtcccccttctggaggccctctcctttgagctggagaaggagatggagcgcctggagggggaggtcttccgcttggccggccaccccttcaacctcaactcccgcgaccagctggaaagggtcctctttgacgagctgggccttaccccggtgggtcggacggagaagacgggcaagcgctccaccgcccagggggccctggaggccctccggggggcccaccccatcgtggagctcatcctccagtaccgggagctttccaagctcaaaagcacctacctggaccccctgccccggctcgtccacccgcggacgggccggcttcacacccgcttcaaccagacggccacggccacgggaaggctttccagctccgaccccaacctgcagaacatccccgtgcgcacccccttggggcagcgcatccgcaaggccttcgtggccgaggaggggtggctccttttggcggcggactactcccagatcgagcttcgggtcctggcccacctctcgggggacgagaacctgaagcgggtcttccgggaggggaaggacatccataccgaaaccgccgcctggatgttcggcttagaccccgctctagtggatccaaagatgcgccgggcggccaagacggtcaacttcggcgtcctctacgggatgtccgcccacaggctctcccaggagctcggcatagactacaaggaggcggaggcctttattgagcgctacttccagagcttccccaaggtgcgggcctggatagaaaggaccctggaggagggccggacgcggggctacgtggagaccctgttcggcaggaggcgctatgtgcccgacctggcctcccgggtccgctgtgtgcgggaggcggcggagcggatggccttcaacatgcccgtgcagggcaccgccgccgacctgatgaagatcgccatggtcaagctcttccccaggctaaagcccctgggggcccacctcctcctccaggtgcacgacgagctggtcctggaggtgcccgaggaccgggccgaggaggccaaggccctggtcaaggaggtcatggagaacacctaccccttggacgtgcccctcgaggtggaggtgggcgtgggtcgggactggctggaggcgaagggggattgaagcggtcgac

SEQ ID NO: 2939 - DNA, 2605 bp, Artificial Sequence
  Description of Artificial Sequence: Synthetic DNA sequence of Thermus Rt41A DNA Polymerase S770G
atgaaatacctgctgccgaccgctgctgctggtctgctgctcctcgctgcccagccggcgatggccatggatatcggaattaattcggatccgaattccccactttttgacctggaggaaccccccaagcgggtgcttctggtggacggccaccacctggcctaccgcaccttctacgccctgagcctcaccacctcccggggggagccggtgcagatggtctacggcttcgcccggagcctcctcaaggccttgaaggaggacgggcaggcggtggtcgtggtctttgacgccaaggccccctccttccgccacgaggcctacgaggcctacaaggcgggccgggcccccaccccggaggacttcccccgccagctcgccttggtcaagcggctggtggaccttctgggcctggtccgcctcgaggccccgggttacgaggcggacgacgtcctgggcaccctggccaagaaggccgaaagggaggggatggaggtgcgcatcctcacgggagaccgggacttcttccagctcctctccgagaaggtctcggtcctcctgccggacgggaccctggtcaccccaaaggacgtccaggagaagtacggggtgccgccggagcgctgggtggacttccgcgccctcacgggggaccgctcggacaacatccccggggtggcggggataggggagaagaccgcccttcgactcctcgcggagtgggggagcgtggagaacctcctgaagaacctggaccgggtgaagccggactcggtccggcgcaagatagaggcgcaccttgaggacctccgcctctccttggacctggcccgcatccgcaccgacctccccttggaggtggactttaaggccctgcgccgcaggacccccgacctggagggcctgagggcctttttggaggagctggagttcggaagcctccttcatgagttcggcctcctgggaggggagaagccccgggaggaggccccctggcccccgcccgaaggggccttcgtaggcttcctcctctcccgcaaggagcccatgtgggcggagcttctggccctggcggccgccgcagagggccgggtccaccgggcaacaagcccggttgaggccctggccgacctcaaggaggcccgggggttcctggccaaggacctggccgttttggccctgcgggagggggtggccctggaccccacggacgaccccctcctggtggcctacctcctggacccggccaacaccaaccccgagggggtggcccggcgctacgggggcgagttcacggaggacgcagcggagagggccctcctctccgagaggctcttccagaacctctttccccggctttccgagaagctcctctggctctaccaggaggtggagcggcccctctcccgggtcttggcccacatggaggcccggggggtgaggctggacgtcccccttctggaggccctctcctttgagctggagaaggagatggagcgcctggagggggaggtcttccgcttggccggccaccccttcaacctcaactcccgcgaccagctggaaagggtcctctttgacgagctgggccttaccccggtgggtcggacggagaagacgggcaagcgctccaccgcccagggggccctggaggccctccggggggcccaccccatcgtggagctcatcctccagtaccgggagctttccaagctcaaaagcacctacctggaccccctgccccggctcgtccacccgcggacgggccggcttcacacccgcttcaaccagacggccacggccacgggaaggctttccagctccgaccccaacctgcagaacatccccgtgcgcacccccttggggcagcgcatccgcaaggccttcgtggccgaggaggggtggctccttttggcggcggactactcccagatcgagcttcgggtcctggcccacctctcgggggacgagaacctgaagcgggtcttccgggaggggaaggacatccataccgaaaccgccgcctggatgttcggcttagaccccgctctagtggatccaaagatgcgccgggcggccaagacggtcaacttcggcgtcctctacgggatgtccgcccacaggctctcccaggagctcggcatagactacaaggaggcggaggcctttattgagcgctacttccagagcttccccaaggtgcgggcctggatagaaaggaccctggaggagggccggacgcggggctacgtggagaccctgttcggcaggaggcgctatgtgcccgacctggcctcccgggtccgcggtgtgcgggaggcggcggagcggatggccttcaacatgcccgtgcagggcaccgccgccgacctgatgaagatcgccatggtcaagctcttccccaggctaaagcccctgggggcccacctcctcctccaggtgcacgacgagctggtcctggaggtgcccgaggaccgggccgaggaggccaaggccctggtcaaggaggtcatggagaacacctaccccttggacgtgcccctcgaggtggaggtgggcgtgggtcgggactggctggaggcgaagggggattgaagcggtcgac

SEQ ID NO: 2940 - DNA, 2605 bp, Artificial Sequence
  Description of Artificial Sequence: Synthetic DNA sequence of Thermus Rt41A DNA Polymerase S770Q
atgaaatacctgctgccgaccgctgctgctggtctgctgctcctcgctgcccagccggcgatggccatggatatcggaattaattcggatccgaattccccactttttgacctggaggaaccccccaagcgggtgcttctggtggacggccaccacctggcctaccgcaccttctacgccctgagcctcaccacctcccggggggagccggtgcagatggtctacggcttcgcccggagcctcctcaaggccttgaaggaggacgggcaggcggtggtcgtggtctttgacgccaaggccccctccttccgccacgaggcctacgaggcctacaaggcgggccgggcccccaccccggaggacttcccccgccagctcgccttggtcaagcggctggtggaccttctgggcctggtccgcctcgaggccccgggttacgaggcggacgacgtcctgggcaccctggccaagaaggccgaaagggaggggatggaggtgcgcatcctcacgggagaccgggacttcttccagctcctctccgagaaggtctcggtcctcctgccggacgggaccctggtcaccccaaaggacgtccaggagaagtacggggtgccgccggagcgctgggtggacttccgcgccctcacgggggaccgctcggacaacatccccggggtggcggggataggggagaagaccgcccttcgactcctcgcggagtgggggagcgtggagaacctcctgaagaacctggaccgggtgaagccggactcggtccggcgcaagatagaggcgcaccttgaggacctccgcctctccttggacctggcccgcatccgcaccgacctccccttggaggtggactttaaggccctgcgccgcaggacccccgacctggagggcctgagggcctttttggaggagctggagttcggaagcctccttcatgagttcggcctcctgggaggggagaagccccgggaggaggccccctggcccccgcccgaaggggccttcgtaggcttcctcctctcccgcaaggagcccatgtgggcggagcttctggccctggcggccgccgcagagggccgggtccaccgggcaacaagcccggttgaggccctggccgacctcaaggaggcccgggggttcctggccaaggacctggccgttttggccctgcgggagggggtggccctggaccccacggacgaccccctcctggtggcctacctcctggacccggccaacaccaaccccgagggggtggcccggcgctacgggggcgagttcacggaggacgcagcggagagggccctcctctccgagaggctcttccagaacctctttccccggctttccgagaagctcctctggctctaccaggaggtggagcggcccctctcccgggtcttggcccacatggaggcccggggggtgaggctggacgtcccccttctggaggccctctcctttgagctggagaaggagatggagcgcctggagggggaggtcttccgcttggccggccaccccttcaacctcaactcccgcgaccagctggaaagggtcctctttgacgagctgggccttaccccggtgggtcggacggagaagacgggcaagcgctccaccgcccagggggccctggaggccctccggggggcccaccccatcgtggagctcatcctccagtaccgggagctttccaagctcaaaagcacctacctggaccccctgccccggctcgtccacccgcggacgggccggcttcacacccgcttcaaccagacggccacggccacgggaaggctttccagctccgaccccaacctgcagaacatccccgtgcgcacccccttggggcagcgcatccgcaaggccttcgtggccgaggaggggtggctccttttggcggcggactactcccagatcgagcttcgggtcctggcccacctctcgggggacgagaacctgaagcgggtcttccgggaggggaaggacatccataccgaaaccgccgcctggatgttcggcttagaccccgctctagtggatccaaagatgcgccgggcggccaagacggtcaacttcggcgtcctctacgggatgtccgcccacaggctctcccaggagctcggcatagactacaaggaggcggaggcctttattgagcgctacttccagagcttccccaaggtgcgggcctggatagaaaggaccctggaggagggccggacgcggggctacgtggagaccctgttcggcaggaggcgctatgtgcccgacctggcctcccgggtccgccaagtgcgggaggcggcggagcggatggccttcaacatgcccgtgcagggcaccgccgccgacctgatgaagatcgccatggtcaagctcttccccaggctaaagcccctgggggcccacctcctcctccaggtgcacgacgagctggtcctggaggtgcccgaggaccgggccgaggaggccaaggccctggtcaaggaggtcatggagaacacctaccccttggacgtgcccctcgaggtggaggtgggcgtgggtcgggactggctggaggcgaagggggattgaagcggtcgac

SEQ ID NO: 2941 - DNA, 2605 bp, Artificial Sequence
  Description of Artificial Sequence: Synthetic DNA sequence of Thermus Rt41A DNA Polymerase S770H
atgaaatacctgctgccgaccgctgctgctggtctgctgctcctcgctgcccagccggcgatggccatggatatcggaattaattcggatccgaattccccactttttgacctggaggaaccccccaagcgggtgcttctggtggacggccaccacctggcctaccgcaccttctacgccctgagcctcaccacctcccggggggagccggtgcagatggtctacggcttcgcccggagcctcctcaaggccttgaaggaggacgggcaggcggtggtcgtggtctttgacgccaaggccccctccttccgccacgaggcctacgaggcctacaaggcgggccgggcccccaccccggaggacttcccccgccagctcgccttggtcaagcggctggtggaccttctgggcctggtccgcctcgaggccccgggttacgaggcggacgacgtcctgggcaccctggccaagaaggccgaaagggaggggatggaggtgcgcatcctcacgggagaccgggacttcttccagctcctctccgagaaggtctcggtcctcctgccggacgggaccctggtcaccccaaaggacgtccaggagaagtacggggtgccgccggagcgctgggtggacttccgcgccctcacgggggaccgctcggacaacatccccggggtggcggggataggggagaagaccgcccttcgactcctcgcggagtgggggagcgtggagaacctcctgaagaacctggaccgggtgaagccggactcggtccggcgcaagatagaggcgcaccttgaggacctccgcctctccttggacctggcccgcatccgcaccgacctccccttggaggtggactttaaggccctgcgccgcaggacccccgacctggagggcctgagggcctttttggaggagctggagttcggaagcctccttcatgagttcggcctcctgggaggggagaagccccgggaggaggccccctggcccccgcccgaaggggccttcgtaggcttcctcctctcccgcaaggagcccatgtgggcggagcttctggccctggcggccgccgcagagggccgggtccaccgggcaacaagcccggttgaggccctggccgacctcaaggaggcccgggggttcctggccaaggacctggccgttttggccctgcgggagggggtggccctggaccccacggacgaccccctcctggtggcctacctcctggacccggccaacaccaaccccgagggggtggcccggcgctacgggggcgagttcacggaggacgcagcggagagggccctcctctccgagaggctcttccagaacctctttccccggctttccgagaagctcctctggctctaccaggaggtggagcggcccctctcccgggtcttggcccacatggaggcccggggggtgaggctggacgtcccccttctggaggccctctcctttgagctggagaaggagatggagcgcctggagggggaggtcttccgcttggccggccaccccttcaacctcaactcccgcgaccagctggaaagggtcctctttgacgagctgggccttaccccggtgggtcggacggagaagacgggcaagcgctccaccgcccagggggccctggaggccctccggggggcccaccccatcgtggagctcatcctccagtaccgggagctttccaagctcaaaagcacctacctggaccccctgccccggctcgtccacccgcggacgggccggcttcacacccgcttcaaccagacggccacggccacgggaaggctttccagctccgaccccaacctgcagaacatccccgtgcgcacccccttggggcagcgcatccgcaaggccttcgtggccgaggaggggtggctccttttggcggcggactactcccagatcgagcttcgggtcctggcccacctctcgggggacgagaacctgaagcgggtcttccgggaggggaaggacatccataccgaaaccgccgcctggatgttcggcttagaccccgctctagtggatccaaagatgcgccgggcggccaagacggtcaacttcggcgtcctctacgggatgtccgcccacaggctctcccaggagctcggcatagactacaaggaggcggaggcctttattgagcgctacttccagagcttccccaaggtgcgggcctggatagaaaggaccctggaggagggccggacgcggggctacgtggagaccctgttcggcaggaggcgctatgtgcccgacctggcctcccgggtccgccatgtgcgggaggcggcggagcggatggccttcaacatgcccgtgcagggcaccgccgccgacctgatgaagatcgccatggtcaagctcttccccaggctaaagcccctgggggcccacctcctcctccaggtgcacgacgagctggtcctggaggtgcccgaggaccgggccgaggaggccaaggccctggtcaaggaggtcatggagaacacctaccccttggacgtgcccctcgaggtggaggtgggcgtgggtcgggactggctggaggcgaagggggattgaagcggtcgac

SEQ ID NO: 2942 - DNA, 2605 bp, Artificial Sequence
  Description of Artificial Sequence: Synthetic DNA sequence of Thermus Rt41A DNA Polymerase S770I
atgaaatacctgctgccgaccgctgctgctggtctgctgctcctcgctgcccagccggcgatggccatggatatcggaattaattcggatccgaattccccactttttgacctggaggaaccccccaagcgggtgcttctggtggacggccaccacctggcctaccgcaccttctacgccctgagcctcaccacctcccggggggagccggtgcagatggtctacggcttcgcccggagcctcctcaaggccttgaaggaggacgggcaggcggtggtcgtggtctttgacgccaaggccccctccttccgccacgaggcctacgaggcctacaaggcgggccgggcccccaccccggaggacttcccccgccagctcgccttggtcaagcggctggtggaccttctgggcctggtccgcctcgaggccccgggttacgaggcggacgacgtcctgggcaccctggccaagaaggccgaaagggaggggatggaggtgcgcatcctcacgggagaccgggacttcttccagctcctctccgagaaggtctcggtcctcctgccggacgggaccctggtcaccccaaaggacgtccaggagaagtacggggtgccgccggagcgctgggtggacttccgcgccctcacgggggaccgctcggacaacatccccggggtggcggggataggggagaagaccgcccttcgactcctcgcggagtgggggagcgtggagaacctcctgaagaacctggaccgggtgaagccggactcggtccggcgcaagatagaggcgcaccttgaggacctccgcctctccttggacctggcccgcatccgcaccgacctccccttggaggtggactttaaggccctgcgccgcaggacccccgacctggagggcctgagggcctttttggaggagctggagttcggaagcctccttcatgagttcggcctcctgggaggggagaagccccgggaggaggccccctggcccccgcccgaaggggccttcgtaggcttcctcctctcccgcaaggagcccatgtgggcggagcttctggccctggcggccgccgcagagggccgggtccaccgggcaacaagcccggttgaggccctggccgacctcaaggaggcccgggggttcctggccaaggacctggccgttttggccctgcgggagggggtggccctggaccccacggacgaccccctcctggtggcctacctcctggacccggccaacaccaaccccgagggggtggcccggcgctacgggggcgagttcacggaggacgcagcggagagggccctcctctccgagaggctcttccagaacctctttccccggctttccgagaagctcctctggctctaccaggaggtggagcggcccctctcccgggtcttggcccacatggaggcccggggggtgaggctggacgtcccccttctggaggccctctcctttgagctggagaaggagatggagcgcctggagggggaggtcttccgcttggccggccaccccttcaacctcaactcccgcgaccagctggaaagggtcctctttgacgagctgggccttaccccggtgggtcggacggagaagacgggcaagcgctccaccgcccagggggccctggaggccctccggggggcccaccccatcgtggagctcatcctccagtaccgggagctttccaagctcaaaagcacctacctggaccccctgccccggctcgtccacccgcggacgggccggcttcacacccgcttcaaccagacggccacggccacgggaaggctttccagctccgaccccaacctgcagaacatccccgtgcgcacccccttggggcagcgcatccgcaaggccttcgtggccgaggaggggtggctccttttggcggcggactactcccagatcgagcttcgggtcctggcccacctctcgggggacgagaacctgaagcgggtcttccgggaggggaaggacatccataccgaaaccgccgcctggatgttcggcttagaccccgctctagtggatccaaagatgcgccgggcggccaagacggtcaacttcggcgtcctctacgggatgtccgcccacaggctctcccaggagctcggcatagactacaaggaggcggaggcctttattgagcgctacttccagagcttccccaaggtgcgggcctggatagaaaggaccctggaggagggccggacgcggggctacgtggagaccctgttcggcaggaggcgctatgtgcccgacctggcctcccgggtccgcattgtgcgggaggcggcggagcggatggccttcaacatgcccgtgcagggcaccgccgccgacctgatgaagatcgccatggtcaagctcttccccaggctaaagcccctgggggcccacctcctcctccaggtgcacgacgagctggtcctggaggtgcccgaggaccgggccgaggaggccaaggccctggtcaaggaggtcatggagaacacctaccccttggacgtgcccctcgaggtggaggtgggcgtgggtcgggactggctggaggcgaagggggattgaagcggtcgac

SEQ ID NO: 2943 - DNA, 2605 bp, Artificial Sequence
  Description of Artificial Sequence: Synthetic DNA sequence of Thermus Rt41A DNA Polymerase S770L
atgaaatacctgctgccgaccgctgctgctggtctgctgctcctcgctgcccagccggcgatggccatggatatcggaattaattcggatccgaattccccactttttgacctggaggaaccccccaagcgggtgcttctggtggacggccaccacctggcctaccgcaccttctacgccctgagcctcaccacctcccggggggagccggtgcagatggtctacggcttcgcccggagcctcctcaaggccttgaaggaggacgggcaggcggtggtcgtggtctttgacgccaaggccccctccttccgccacgaggcctacgaggcctacaaggcgggccgggcccccaccccggaggacttcccccgccagctcgccttggtcaagcggctggtggaccttctgggcctggtccgcctcgaggccccgggttacgaggcggacgacgtcctgggcaccctggccaagaaggccgaaagggaggggatggaggtgcgcatcctcacgggagaccgggacttcttccagctcctctccgagaaggtctcggtcctcctgccggacgggaccctggtcaccccaaaggacgtccaggagaagtacggggtgccgccggagcgctgggtggacttccgcgccctcacgggggaccgctcggacaacatccccggggtggcggggataggggagaagaccgcccttcgactcctcgcggagtgggggagcgtggagaacctcctgaagaacctggaccgggtgaagccggactcggtccggcgcaagatagaggcgcaccttgaggacctccgcctctccttggacctggcccgcatccgcaccgacctccccttggaggtggactttaaggccctgcgccgcaggacccccgacctggagggcctgagggcctttttggaggagctggagttcggaagcctccttcatgagttcggcctcctgggaggggagaagccccgggaggaggccccctggcccccgcccgaaggggccttcgtaggcttcctcctctcccgcaaggagcccatgtgggcggagcttctggccctggcggccgccgcagagggccgggtccaccgggcaacaagcccggttgaggccctggccgacctcaaggaggcccgggggttcctggccaaggacctggccgttttggccctgcgggagggggtggccctggaccccacggacgaccccctcctggtggcctacctcctggacccggccaacaccaaccccgagggggtggcccggcgctacgggggcgagttcacggaggacgcagcggagagggccctcctctccgagaggctcttccagaacctctttccccggctttccgagaagctcctctggctctaccaggaggtggagcggcccctctcccgggtcttggcccacatggaggcccggggggtgaggctggacgtcccccttctggaggccctctcctttgagctggagaaggagatggagcgcctggagggggaggtcttccgcttggccggccaccccttcaacctcaactcccgcgaccagctggaaagggtcctctttgacgagctgggccttaccccggtgggtcggacggagaagacgggcaagcgctccaccgcccagggggccctggaggccctccggggggcccaccccatcgtggagctcatcctccagtaccgggagctttccaagctcaaaagcacctacctggaccccctgccccggctcgtccacccgcggacgggccggcttcacacccgcttcaaccagacggccacggccacgggaaggctttccagctccgaccccaacctgcagaacatccccgtgcgcacccccttggggcagcgcatccgcaaggccttcgtggccgaggaggggtggctccttttggcggcggactactcccagatcgagcttcgggtcctggcccacctctcgggggacgagaacctgaagcgggtcttccgggaggggaaggacatccataccgaaaccgccgcctggatgttcggcttagaccccgctctagtggatccaaagatgcgccgggcggccaagacggtcaacttcggcgtcctctacgggatgtccgcccacaggctctcccaggagctcggcatagactacaaggaggcggaggcctttattgagcgctacttccagagcttccccaaggtgcgggcctggatagaaaggaccctggaggagggccggacgcggggctacgtggagaccctgttcggcaggaggcgctatgtgcccgacctggcctcccgggtccgcttagtgcgggaggcggcggagcggatggccttcaacatgcccgtgcagggcaccgccgccgacctgatgaagatcgccatggtcaagctcttccccaggctaaagcccctgggggcccacctcctcctccaggtgcacgacgagctggtcctggaggtgcccgaggaccgggccgaggaggccaaggccctggtcaaggaggtcatggagaacacctaccccttggacgtgcccctcgaggtggaggtgggcgtgggtcgggactggctggaggcgaagggggattgaagcggtcgac

SEQ ID NO: 2944 - DNA, 2605 bp, Artificial Sequence
  Description of Artificial Sequence: Synthetic DNA sequence of Thermus Rt41A DNA Polymerase S770K
atgaaatacctgctgccgaccgctgctgctggtctgctgctcctcgctgcccagccggcgatggccatggatatcggaattaattcggatccgaattccccactttttgacctggaggaaccccccaagcgggtgcttctggtggacggccaccacctggcctaccgcaccttctacgccctgagcctcaccacctcccggggggagccggtgcagatggtctacggcttcgcccggagcctcctcaaggccttgaaggaggacgggcaggcggtggtcgtggtctttgacgccaaggccccctccttccgccacgaggcctacgaggcctacaaggcgggccgggcccccaccccggaggacttcccccgccagctcgccttggtcaagcggctggtggaccttctgggcctggtccgcctcgaggccccgggttacgaggcggacgacgtcctgggcaccctggccaagaaggccgaaagggaggggatggaggtgcgcatcctcacgggagaccgggacttcttccagctcctctccgagaaggtctcggtcctcctgccggacgggaccctggtcaccccaaaggacgtccaggagaagtacggggtgccgccggagcgctgggtggacttccgcgccctcacgggggaccgctcggacaacatccccggggtggcggggataggggagaagaccgcccttcgactcctcgcggagtgggggagcgtggagaacctcctgaagaacctggaccgggtgaagccggactcggtccggcgcaagatagaggcgcaccttgaggacctccgcctctccttggacctggcccgcatccgcaccgacctccccttggaggtggactttaaggccctgcgccgcaggacccccgacctggagggcctgagggcctttttggaggagctggagttcggaagcctccttcatgagttcggcctcctgggaggggagaagccccgggaggaggccccctggcccccgcccgaaggggccttcgtaggcttcctcctctcccgcaaggagcccatgtgggcggagcttctggccctggcggccgccgcagagggccgggtccaccgggcaacaagcccggttgaggccctggccgacctcaaggaggcccgggggttcctggccaaggacctggccgttttggccctgcgggagggggtggccctggaccccacggacgaccccctcctggtggcctacctcctggacccggccaacaccaaccccgagggggtggcccggcgctacgggggcgagttcacggaggacgcagcggagagggccctcctctccgagaggctcttccagaacctctttccccggctttccgagaagctcctctggctctaccaggaggtggagcggcccctctcccgggtcttggcccacatggaggcccggggggtgaggctggacgtcccccttctggaggccctctcctttgagctggagaaggagatggagcgcctggagggggaggtcttccgcttggccggccaccccttcaacctcaactcccgcgaccagctggaaagggtcctctttgacgagctgggccttaccccggtgggtcggacggagaagacgggcaagcgctccaccgcccagggggccctggaggccctccggggggcccaccccatcgtggagctcatcctccagtaccgggagctttccaagctcaaaagcacctacctggaccccctgccccggctcgtccacccgcggacgggccggcttcacacccgcttcaaccagacggccacggccacgggaaggctttccagctccgaccccaacctgcagaacatccccgtgcgcacccccttggggcagcgcatccgcaaggccttcgtggccgaggaggggtggctccttttggcggcggactactcccagatcgagcttcgggtcctggcccacctctcgggggacgagaacctgaagcgggtcttccgggaggggaaggacatccataccgaaaccgccgcctggatgttcggcttagaccccgctctagtggatccaaagatgcgccgggcggccaagacggtcaacttcggcgtcctctacgggatgtccgcccacaggctctcccaggagctcggcatagactacaaggaggcggaggcctttattgagcgctacttccagagcttccccaaggtgcgggcctggatagaaaggaccctggaggagggccggacgcggggctacgtggagaccctgttcggcaggaggcgctatgtgcccgacctggcctcccgggtccgcaaagtgcgggaggcggcggagcggatggccttcaacatgcccgtgcagggcaccgccgccgacctgatgaagatcgccatggtcaagctcttccccaggctaaagcccctgggggcccacctcctcctccaggtgcacgacgagctggtcctggaggtgcccgaggaccgggccgaggaggccaaggccctggtcaaggaggtcatggagaacacctaccccttggacgtgcccctcgaggtggaggtgggcgtgggtcgggactggctggaggcgaagggggattgaagcggtcgac

SEQ ID NO: 2945 - DNA, 2605 bp, Artificial Sequence
  Description of Artificial Sequence: Synthetic DNA sequence of Thermus Rt41A DNA Polymerase S770E
atgaaatacctgctgccgaccgctgctgctggtctgctgctcctcgctgcccagccggcgatggccatggatatcggaattaattcggatccgaattccccactttttgacctggaggaaccccccaagcgggtgcttctggtggacggccaccacctggcctaccgcaccttctacgccctgagcctcaccacctcccggggggagccggtgcagatggtctacggcttcgcccggagcctcctcaaggccttgaaggaggacgggcaggcggtggtcgtggtctttgacgccaaggccccctccttccgccacgaggcctacgaggcctacaaggcgggccgggcccccaccccggaggacttcccccgccagctcgccttggtcaagcggctggtggaccttctgggcctggtccgcctcgaggccccgggttacgaggcggacgacgtcctgggcaccctggccaagaaggccgaaagggaggggatggaggtgcgcatcctcacgggagaccgggacttcttccagctcctctccgagaaggtctcggtcctcctgccggacgggaccctggtcaccccaaaggacgtccaggagaagtacggggtgccgccggagcgctgggtggacttccgcgccctcacgggggaccgctcggacaacatccccggggtggcggggataggggagaagaccgcccttcgactcctcgcggagtgggggagcgtggagaacctcctgaagaacctggaccgggtgaagccggactcggtccggcgcaagatagaggcgcaccttgaggacctccgcctctccttggacctggcccgcatccgcaccgacctccccttggaggtggactttaaggccctgcgccgcaggacccccgacctggagggcctgagggcctttttggaggagctggagttcggaagcctccttcatgagttcggcctcctgggaggggagaagccccgggaggaggccccctggcccccgcccgaaggggccttcgtaggcttcctcctctcccgcaaggagcccatgtgggcggagcttctggccctggcggccgccgcagagggccgggtccaccgggcaacaagcccggttgaggccctggccgacctcaaggaggcccgggggttcctggccaaggacctggccgttttggccctgcgggagggggtggccctggaccccacggacgaccccctcctggtggcctacctcctggacccggccaacaccaaccccgagggggtggcccggcgctacgggggcgagttcacggaggacgcagcggagagggccctcctctccgagaggctcttccagaacctctttccccggctttccgagaagctcctctggctctaccaggaggtggagcggcccctctcccgggtcttggcccacatggaggcccggggggtgaggctggacgtcccccttctggaggccctctcctttgagctggagaaggagatggagcgcctggagggggaggtcttccgcttggccggccaccccttcaacctcaactcccgcgaccagctggaaagggtcctctttgacgagctgggccttaccccggtgggtcggacggagaagacgggcaagcgctccaccgcccagggggccctggaggccctccggggggcccaccccatcgtggagctcatcctccagtaccgggagctttccaagctcaaaagcacctacctggaccccctgccccggctcgtccacccgcggacgggccggcttcacacccgcttcaaccagacggccacggccacgggaaggctttccagctccgaccccaacctgcagaacatccccgtgcgcacccccttggggcagcgcatccgcaaggccttcgtggccgaggaggggtggctccttttggcggcggactactcccagatcgagcttcgggtcctggcccacctctcgggggacgagaacctgaagcgggtcttccgggaggggaaggacatccataccgaaaccgccgcctggatgttcggcttagaccccgctctagtggatccaaagatgcgccgggcggccaagacggtcaacttcggcgtcctctacgggatgtccgcccacaggctctcccaggagctcggcatagactacaaggaggcggaggcctttattgagcgctacttccagagcttccccaaggtgcgggcctggatagaaaggaccctggaggagggccggacgcggggctacgtggagaccctgttcggcaggaggcgctatgtgcccgacctggcctcccgggtccgcgaagtgcgggaggcggcggagcggatggccttcaacatgcccgtgcagggcaccgccgccgacctgatgaagatcgccatggtcaagctcttccccaggctaaagcccctgggggcccacctcctcctccaggtgcacgacgagctggtcctggaggtgcccgaggaccgggccgaggaggccaaggccctggtcaaggaggtcatggagaacacctaccccttggacgtgcccctcgaggtggaggtgggcgtgggtcgggactggctggaggcgaagggggattgaagcggtcgac

SEQ ID NO: 2946 - DNA, 2605 bp, Artificial Sequence
  Description of Artificial Sequence: Synthetic DNA sequence of Thermus Rt41A DNA Polymerase S770D
atgaaatacctgctgccgaccgctgctgctggtctgctgctcctcgctgcccagccggcgatggccatggatatcggaattaattcggatccgaattccccactttttgacctggaggaaccccccaagcgggtgcttctggtggacggccaccacctggcctaccgcaccttctacgccctgagcctcaccacctcccggggggagccggtgcagatggtctacggcttcgcccggagcctcctcaaggccttgaaggaggacgggcaggcggtggtcgtggtctttgacgccaaggccccctccttccgccacgaggcctacgaggcctacaaggcgggccgggcccccaccccggaggacttcccccgccagctcgccttggtcaagcggctggtggaccttctgggcctggtccgcctcgaggccccgggttacgaggcggacgacgtcctgggcaccctggccaagaaggccgaaagggaggggatggaggtgcgcatcctcacgggagaccgggacttcttccagctcctctccgagaaggtctcggtcctcctgccggacgggaccctggtcaccccaaaggacgtccaggagaagtacggggtgccgccggagcgctgggtggacttccgcgccctcacgggggaccgctcggacaacatccccggggtggcggggataggggagaagaccgcccttcgactcctcgcggagtgggggagcgtggagaacctcctgaagaacctggaccgggtgaagccggactcggtccggcgcaagatagaggcgcaccttgaggacctccgcctctccttggacctggcccgcatccgcaccgacctccccttggaggtggactttaaggccctgcgccgcaggacccccgacctggagggcctgagggcctttttggaggagctggagttcggaagcctccttcatgagttcggcctcctgggaggggagaagccccgggaggaggccccctggcccccgcccgaaggggccttcgtaggcttcctcctctcccgcaaggagcccatgtgggcggagcttctggccctggcggccgccgcagagggccgggtccaccgggcaacaagcccggttgaggccctggccgacctcaaggaggcccgggggttcctggccaaggacctggccgttttggccctgcgggagggggtggccctggaccccacggacgaccccctcctggtggcctacctcctggacccggccaacaccaaccccgagggggtggcccggcgctacgggggcgagttcacggaggacgcagcggagagggccctcctctccgagaggctcttccagaacctctttccccggctttccgagaagctcctctggctctaccaggaggtggagcggcccctctcccgggtcttggcccacatggaggcccggggggtgaggctggacgtcccccttctggaggccctctcctttgagctggagaaggagatggagcgcctggagggggaggtcttccgcttggccggccaccccttcaacctcaactcccgcgaccagctggaaagggtcctctttgacgagctgggccttaccccggtgggtcggacggagaagacgggcaagcgctccaccgcccagggggccctggaggccctccggggggcccaccccatcgtggagctcatcctccagtaccgggagctttccaagctcaaaagcacctacctggaccccctgccccggctcgtccacccgcggacgggccggcttcacacccgcttcaaccagacggccacggccacgggaaggctttccagctccgaccccaacctgcagaacatccccgtgcgcacccccttggggcagcgcatccgcaaggccttcgtggccgaggaggggtggctccttttggcggcggactactcccagatcgagcttcgggtcctggcccacctctcgggggacgagaacctgaagcgggtcttccgggaggggaaggacatccataccgaaaccgccgcctggatgttcggcttagaccccgctctagtggatccaaagatgcgccgggcggccaagacggtcaacttcggcgtcctctacgggatgtccgcccacaggctctcccaggagctcggcatagactacaaggaggcggaggcctttattgagcgctacttccagagcttccccaaggtgcgggcctggatagaaaggaccctggaggagggccggacgcggggctacgtggagaccctgttcggcaggaggcgctatgtgcccgacctggcctcccgggtccgcgatgtgcgggaggcggcggagcggatggccttcaacatgcccgtgcagggcaccgccgccgacctgatgaagatcgccatggtcaagctcttccccaggctaaagcccctgggggcccacctcctcctccaggtgcacgacgagctggtcctggaggtgcccgaggaccgggccgaggaggccaaggccctggtcaaggaggtcatggagaacacctaccccttggacgtgcccctcgaggtggaggtgggcgtgggtcgggactggctggaggcgaagggggattgaagcggtcgac

SEQ ID NO: 2947 - DNA, 2605 bp, Artificial Sequence
  Description of Artificial Sequence: Synthetic DNA sequence of Thermus Rt41A DNA Polymerase S770F
atgaaatacctgctgccgaccgctgctgctggtctgctgctcctcgctgcccagccggcgatggccatggatatcggaattaattcggatccgaattccccactttttgacctggaggaaccccccaagcgggtgcttctggtggacggccaccacctggcctaccgcaccttctacgccctgagcctcaccacctcccggggggagccggtgcagatggtctacggcttcgcccggagcctcctcaaggccttgaaggaggacgggcaggcggtggtcgtggtctttgacgccaaggccccctccttccgccacgaggcctacgaggcctacaaggcgggccgggcccccaccccggaggacttcccccgccagctcgccttggtcaagcggctggtggaccttctgggcctggtccgcctcgaggccccgggttacgaggcggacgacgtcctgggcaccctggccaagaaggccgaaagggaggggatggaggtgcgcatcctcacgggagaccgggacttcttccagctcctctccgagaaggtctcggtcctcctgccggacgggaccctggtcaccccaaaggacgtccaggagaagtacggggtgccgccggagcgctgggtggacttccgcgccctcacgggggaccgctcggacaacatccccggggtggcggggataggggagaagaccgcccttcgactcctcgcggagtgggggagcgtggagaacctcctgaagaacctggaccgggtgaagccggactcggtccggcgcaagatagaggcgcaccttgaggacctccgcctctccttggacctggcccgcatccgcaccgacctccccttggaggtggactttaaggccctgcgccgcaggacccccgacctggagggcctgagggcctttttggaggagctggagttcggaagcctccttcatgagttcggcctcctgggaggggagaagccccgggaggaggccccctggcccccgcccgaaggggccttcgtaggcttcctcctctcccgcaaggagcccatgtgggcggagcttctggccctggcggccgccgcagagggccgggtccaccgggcaacaagcccggttgaggccctggccgacctcaaggaggcccgggggttcctggccaaggacctggccgttttggccctgcgggagggggtggccctggaccccacggacgaccccctcctggtggcctacctcctggacccggccaacaccaaccccgagggggtggcccggcgctacgggggcgagttcacggaggacgcagcggagagggccctcctctccgagaggctcttccagaacctctttccccggctttccgagaagctcctctggctctaccaggaggtggagcggcccctctcccgggtcttggcccacatggaggcccggggggtgaggctggacgtcccccttctggaggccctctcctttgagctggagaaggagatggagcgcctggagggggaggtcttccgcttggccggccaccccttcaacctcaactcccgcgaccagctggaaagggtcctctttgacgagctgggccttaccccggtgggtcggacggagaagacgggcaagcgctccaccgcccagggggccctggaggccctccggggggcccaccccatcgtggagctcatcctccagtaccgggagctttccaagctcaaaagcacctacctggaccccctgccccggctcgtccacccgcggacgggccggcttcacacccgcttcaaccagacggccacggccacgggaaggctttccagctccgaccccaacctgcagaacatccccgtgcgcacccccttggggcagcgcatccgcaaggccttcgtggccgaggaggggtggctccttttggcggcggactactcccagatcgagcttcgggtcctggcccacctctcgggggacgagaacctgaagcgggtcttccgggaggggaaggacatccataccgaaaccgccgcctggatgttcggcttagaccccgctctagtggatccaaagatgcgccgggcggccaagacggtcaacttcggcgtcctctacgggatgtccgcccacaggctctcccaggagctcggcatagactacaaggaggcggaggcctttattgagcgctacttccagagcttccccaaggtgcgggcctggatagaaaggaccctggaggagggccggacgcggggctacgtggagaccctgttcggcaggaggcgctatgtgcccgacctggcctcccgggtccgctttgtgcgggaggcggcggagcggatggccttcaacatgcccgtgcagggcaccgccgccgacctgatgaagatcgccatggtcaagctcttccccaggctaaagcccctgggggcccacctcctcctccaggtgcacgacgagctggtcctggaggtgcccgaggaccgggccgaggaggccaaggccctggtcaaggaggtcatggagaacacctaccccttggacgtgcccctcgaggtggaggtgggcgtgggtcgggactggctggaggcgaagggggattgaagcggtcgac

SEQ ID NO: 2948 - DNA, 2605 bp, Artificial Sequence
  Description of Artificial Sequence: Synthetic DNA sequence of Thermus Rt41A DNA Polymerase S770Y
atgaaatacctgctgccgaccgctgctgctggtctgctgctcctcgctgcccagccggcgatggccatggatatcggaattaattcggatccgaattccccactttttgacctggaggaaccccccaagcgggtgcttctggtggacggccaccacctggcctaccgcaccttctacgccctgagcctcaccacctcccggggggagccggtgcagatggtctacggcttcgcccggagcctcctcaaggccttgaaggaggacgggcaggcggtggtcgtggtctttgacgccaaggccccctccttccgccacgaggcctacgaggcctacaaggcgggccgggcccccaccccggaggacttcccccgccagctcgccttggtcaagcggctggtggaccttctgggcctggtccgcctcgaggccccgggttacgaggcggacgacgtcctgggcaccctggccaagaaggccgaaagggaggggatggaggtgcgcatcctcacgggagaccgggacttcttccagctcctctccgagaaggtctcggtcctcctgccggacgggaccctggtcaccccaaaggacgtccaggagaagtacggggtgccgccggagcgctgggtggacttccgcgccctcacgggggaccgctcggacaacatccccggggtggcggggataggggagaagaccgcccttcgactcctcgcggagtgggggagcgtggagaacctcctgaagaacctggaccgggtgaagccggactcggtccggcgcaagatagaggcgcaccttgaggacctccgcctctccttggacctggcccgcatccgcaccgacctccccttggaggtggactttaaggccctgcgccgcaggacccccgacctggagggcctgagggcctttttggaggagctggagttcggaagcctccttcatgagttcggcctcctgggaggggagaagccccgggaggaggccccctggcccccgcccgaaggggccttcgtaggcttcctcctctcccgcaaggagcccatgtgggcggagcttctggccctggcggccgccgcagagggccgggtccaccgggcaacaagcccggttgaggccctggccgacctcaaggaggcccgggggttcctggccaaggacctggccgttttggccctgcgggagggggtggccctggaccccacggacgaccccctcctggtggcctacctcctggacccggccaacaccaaccccgagggggtggcccggcgctacgggggcgagttcacggaggacgcagcggagagggccctcctctccgagaggctcttccagaacctctttccccggctttccgagaagctcctctggctctaccaggaggtggagcggcccctctcccgggtcttggcccacatggaggcccggggggtgaggctggacgtcccccttctggaggccctctcctttgagctggagaaggagatggagcgcctggagggggaggtcttccgcttggccggccaccccttcaacctcaactcccgcgaccagctggaaagggtcctctttgacgagctgggccttaccccggtgggtcggacggagaagacgggcaagcgctccaccgcccagggggccctggaggccctccggggggcccaccccatcgtggagctcatcctccagtaccgggagctttccaagctcaaaagcacctacctggaccccctgccccggctcgtccacccgcggacgggccggcttcacacccgcttcaaccagacggccacggccacgggaaggctttccagctccgaccccaacctgcagaacatccccgtgcgcacccccttggggcagcgcatccgcaaggccttcgtggccgaggaggggtggctccttttggcggcggactactcccagatcgagcttcgggtcctggcccacctctcgggggacgagaacctgaagcgggtcttccgggaggggaaggacatccataccgaaaccgccgcctggatgttcggcttagaccccgctctagtggatccaaagatgcgccgggcggccaagacggtcaacttcggcgtcctctacgggatgtccgcccacaggctctcccaggagctcggcatagactacaaggaggcggaggcctttattgagcgctacttccagagcttccccaaggtgcgggcctggatagaaaggaccctggaggagggccggacgcggggctacgtggagaccctgttcggcaggaggcgctatgtgcccgacctggcctcccgggtccgctatgtgcgggaggcggcggagcggatggccttcaacatgcccgtgcagggcaccgccgccgacctgatgaagatcgccatggtcaagctcttccccaggctaaagcccctgggggcccacctcctcctccaggtgcacgacgagctggtcctggaggtgcccgaggaccgggccgaggaggccaaggccctggtcaaggaggtcatggagaacacctaccccttggacgtgcccctcgaggtggaggtgggcgtgggtcgggactggctggaggcgaagggggattgaagcggtcgac

SEQ ID NO: 2949 - DNA, 2605 bp, Artificial Sequence
  Description of Artificial Sequence: Synthetic DNA sequence of Thermus Rt41A DNA Polymerase S770W
atgaaatacctgctgccgaccgctgctgctggtctgctgctcctcgctgcccagccggcgatggccatggatatcggaattaattcggatccgaattccccactttttgacctggaggaaccccccaagcgggtgcttctggtggacggccaccacctggcctaccgcaccttctacgccctgagcctcaccacctcccggggggagccggtgcagatggtctacggcttcgcccggagcctcctcaaggccttgaaggaggacgggcaggcggtggtcgtggtctttgacgccaaggccccctccttccgccacgaggcctacgaggcctacaaggcgggccgggcccccaccccggaggacttcccccgccagctcgccttggtcaagcggctggtggaccttctgggcctggtccgcctcgaggccccgggttacgaggcggacgacgtcctgggcaccctggccaagaaggccgaaagggaggggatggaggtgcgcatcctcacgggagaccgggacttcttccagctcctctccgagaaggtctcggtcctcctgccggacgggaccctggtcaccccaaaggacgtccaggagaagtacggggtgccgccggagcgctgggtggacttccgcgccctcacgggggaccgctcggacaacatccccggggtggcggggataggggagaagaccgcccttcgactcctcgcggagtgggggagcgtggagaacctcctgaagaacctggaccgggtgaagccggactcggtccggcgcaagatagaggcgcaccttgaggacctccgcctctccttggacctggcccgcatccgcaccgacctccccttggaggtggactttaaggccctgcgccgcaggacccccgacctggagggcctgagggcctttttggaggagctggagttcggaagcctccttcatgagttcggcctcctgggaggggagaagccccgggaggaggccccctggcccccgcccgaaggggccttcgtaggcttcctcctctcccgcaaggagcccatgtgggcggagcttctggccctggcggccgccgcagagggccgggtccaccgggcaacaagcccggttgaggccctggccgacctcaaggaggcccgggggttcctggccaaggacctggccgttttggccctgcgggagggggtggccctggaccccacggacgaccccctcctggtggcctacctcctggacccggccaacaccaaccccgagggggtggcccggcgctacgggggcgagttcacggaggacgcagcggagagggccctcctctccgagaggctcttccagaacctctttccccggctttccgagaagctcctctggctctaccaggaggtggagcggcccctctcccgggtcttggcccacatggaggcccggggggtgaggctggacgtcccccttctggaggccctctcctttgagctggagaaggagatggagcgcctggagggggaggtcttccgcttggccggccaccccttcaacctcaactcccgcgaccagctggaaagggtcctctttgacgagctgggccttaccccggtgggtcggacggagaagacgggcaagcgctccaccgcccagggggccctggaggccctccggggggcccaccccatcgtggagctcatcctccagtaccgggagctttccaagctcaaaagcacctacctggaccccctgccccggctcgtccacccgcggacgggccggcttcacacccgcttcaaccagacggccacggccacgggaaggctttccagctccgaccccaacctgcagaacatccccgtgcgcacccccttggggcagcgcatccgcaaggccttcgtggccgaggaggggtggctccttttggcggcggactactcccagatcgagcttcgggtcctggcccacctctcgggggacgagaacctgaagcgggtcttccgggaggggaaggacatccataccgaaaccgccgcctggatgttcggcttagaccccgctctagtggatccaaagatgcgccgggcggccaagacggtcaacttcggcgtcctctacgggatgtccgcccacaggctctcccaggagctcggcatagactacaaggaggcggaggcctttattgagcgctacttccagagcttccccaaggtgcgggcctggatagaaaggaccctggaggagggccggacgcggggctacgtggagaccctgttcggcaggaggcgctatgtgcccgacctggcctcccgggtccgctgggtgcgggaggcggcggagcggatggccttcaacatgcccgtgcagggcaccgccgccgacctgatgaagatcgccatggtcaagctcttccccaggctaaagcccctgggggcccacctcctcctccaggtgcacgacgagctggtcctggaggtgcccgaggaccgggccgaggaggccaaggccctggtcaaggaggtcatggagaacacctaccccttggacgtgcccctcgaggtggaggtgggcgtgggtcgggactggctggaggcgaagggggattgaagcggtcgac

SEQ ID NO: 2950 - DNA, 2605 bp, Artificial Sequence
  Description of Artificial Sequence: Synthetic DNA sequence of Thermus Rt41A DNA Polymerase S770P
atgaaatacctgctgccgaccgctgctgctggtctgctgctcctcgctgcccagccggcgatggccatggatatcggaattaattcggatccgaattccccactttttgacctggaggaaccccccaagcgggtgcttctggtggacggccaccacctggcctaccgcaccttctacgccctgagcctcaccacctcccggggggagccggtgcagatggtctacggcttcgcccggagcctcctcaaggccttgaaggaggacgggcaggcggtggtcgtggtctttgacgccaaggccccctccttccgccacgaggcctacgaggcctacaaggcgggccgggcccccaccccggaggacttcccccgccagctcgccttggtcaagcggctggtggaccttctgggcctggtccgcctcgaggccccgggttacgaggcggacgacgtcctgggcaccctggccaagaaggccgaaagggaggggatggaggtgcgcatcctcacgggagaccgggacttcttccagctcctctccgagaaggtctcggtcctcctgccggacgggaccctggtcaccccaaaggacgtccaggagaagtacggggtgccgccggagcgctgggtggacttccgcgccctcacgggggaccgctcggacaacatccccggggtggcggggataggggagaagaccgcccttcgactcctcgcggagtgggggagcgtggagaacctcctgaagaacctggaccgggtgaagccggactcggtccggcgcaagatagaggcgcaccttgaggacctccgcctctccttggacctggcccgcatccgcaccgacctccccttggaggtggactttaaggccctgcgccgcaggacccccgacctggagggcctgagggcctttttggaggagctggagttcggaagcctccttcatgagttcggcctcctgggaggggagaagccccgggaggaggccccctggcccccgcccgaaggggccttcgtaggcttcctcctctcccgcaaggagcccatgtgggcggagcttctggccctggcggccgccgcagagggccgggtccaccgggcaacaagcccggttgaggccctggccgacctcaaggaggcccgggggttcctggccaaggacctggccgttttggccctgcgggagggggtggccctggaccccacggacgaccccctcctggtggcctacctcctggacccggccaacaccaaccccgagggggtggcccggcgctacgggggcgagttcacggaggacgcagcggagagggccctcctctccgagaggctcttccagaacctctttccccggctttccgagaagctcctctggctctaccaggaggtggagcggcccctctcccgggtcttggcccacatggaggcccggggggtgaggctggacgtcccccttctggaggccctctcctttgagctggagaaggagatggagcgcctggagggggaggtcttccgcttggccggccaccccttcaacctcaactcccgcgaccagctggaaagggtcctctttgacgagctgggccttaccccggtgggtcggacggagaagacgggcaagcgctccaccgcccagggggccctggaggccctccggggggcccaccccatcgtggagctcatcctccagtaccgggagctttccaagctcaaaagcacctacctggaccccctgccccggctcgtccacccgcggacgggccggcttcacacccgcttcaaccagacggccacggccacgggaaggctttccagctccgaccccaacctgcagaacatccccgtgcgcacccccttggggcagcgcatccgcaaggccttcgtggccgaggaggggtggctccttttggcggcggactactcccagatcgagcttcgggtcctggcccacctctcgggggacgagaacctgaagcgggtcttccgggaggggaaggacatccataccgaaaccgccgcctggatgttcggcttagaccccgctctagtggatccaaagatgcgccgggcggccaagacggtcaacttcggcgtcctctacgggatgtccgcccacaggctctcccaggagctcggcatagactacaaggaggcggaggcctttattgagcgctacttccagagcttccccaaggtgcgggcctggatagaaaggaccctggaggagggccggacgcggggctacgtggagaccctgttcggcaggaggcgctatgtgcccgacctggcctcccgggtccgccctgtgcgggaggcggcggagcggatggccttcaacatgcccgtgcagggcaccgccgccgacctgatgaagatcgccatggtcaagctcttccccaggctaaagcccctgggggcccacctcctcctccaggtgcacgacgagctggtcctggaggtgcccgaggaccgggccgaggaggccaaggccctggtcaaggaggtcatggagaacacctaccccttggacgtgcccctcgaggtggaggtgggcgtgggtcgggactggctggaggcgaagggggattgaagcggtcgac

SEQ ID NO: 2951 - DNA, 2605 bp, Artificial Sequence
  Description of Artificial Sequence: Synthetic DNA sequence of Thermus Rt41A DNA Polymerase S770M
atgaaatacctgctgccgaccgctgctgctggtctgctgctcctcgctgcccagccggcgatggccatggatatcggaattaattcggatccgaattccccactttttgacctggaggaaccccccaagcgggtgcttctggtggacggccaccacctggcctaccgcaccttctacgccctgagcctcaccacctcccggggggagccggtgcagatggtctacggcttcgcccggagcctcctcaaggccttgaaggaggacgggcaggcggtggtcgtggtctttgacgccaaggccccctccttccgccacgaggcctacgaggcctacaaggcgggccgggcccccaccccggaggacttcccccgccagctcgccttggtcaagcggctggtggaccttctgggcctggtccgcctcgaggccccgggttacgaggcggacgacgtcctgggcaccctggccaagaaggccgaaagggaggggatggaggtgcgcatcctcacgggagaccgggacttcttccagctcctctccgagaaggtctcggtcctcctgccggacgggaccctggtcaccccaaaggacgtccaggagaagtacggggtgccgccggagcgctgggtggacttccgcgccctcacgggggaccgctcggacaacatccccggggtggcggggataggggagaagaccgcccttcgactcctcgcggagtgggggagcgtggagaacctcctgaagaacctggaccgggtgaagccggactcggtccggcgcaagatagaggcgcaccttgaggacctccgcctctccttggacctggcccgcatccgcaccgacctccccttggaggtggactttaaggccctgcgccgcaggacccccgacctggagggcctgagggcctttttggaggagctggagttcggaagcctccttcatgagttcggcctcctgggaggggagaagccccgggaggaggccccctggcccccgcccgaaggggccttcgtaggcttcctcctctcccgcaaggagcccatgtgggcggagcttctggccctggcggccgccgcagagggccgggtccaccgggcaacaagcccggttgaggccctggccgacctcaaggaggcccgggggttcctggccaaggacctggccgttttggccctgcgggagggggtggccctggaccccacggacgaccccctcctggtggcctacctcctggacccggccaacaccaaccccgagggggtggcccggcgctacgggggcgagttcacggaggacgcagcggagagggccctcctctccgagaggctcttccagaacctctttccccggctttccgagaagctcctctggctctaccaggaggtggagcggcccctctcccgggtcttggcccacatggaggcccggggggtgaggctggacgtcccccttctggaggccctctcctttgagctggagaaggagatggagcgcctggagggggaggtcttccgcttggccggccaccccttcaacctcaactcccgcgaccagctggaaagggtcctctttgacgagctgggccttaccccggtgggtcggacggagaagacgggcaagcgctccaccgcccagggggccctggaggccctccggggggcccaccccatcgtggagctcatcctccagtaccgggagctttccaagctcaaaagcacctacctggaccccctgccccggctcgtccacccgcggacgggccggcttcacacccgcttcaaccagacggccacggccacgggaaggctttccagctccgaccccaacctgcagaacatccccgtgcgcacccccttggggcagcgcatccgcaaggccttcgtggccgaggaggggtggctccttttggcggcggactactcccagatcgagcttcgggtcctggcccacctctcgggggacgagaacctgaagcgggtcttccgggaggggaaggacatccataccgaaaccgccgcctggatgttcggcttagaccccgctctagtggatccaaagatgcgccgggcggccaagacggtcaacttcggcgtcctctacgggatgtccgcccacaggctctcccaggagctcggcatagactacaaggaggcggaggcctttattgagcgctacttccagagcttccccaaggtgcgggcctggatagaaaggaccctggaggagggccggacgcggggctacgtggagaccctgttcggcaggaggcgctatgtgcccgacctggcctcccgggtccgcatggtgcgggaggcggcggagcggatggccttcaacatgcccgtgcagggcaccgccgccgacctgatgaagatcgccatggtcaagctcttccccaggctaaagcccctgggggcccacctcctcctccaggtgcacgacgagctggtcctggaggtgcccgaggaccgggccgaggaggccaaggccctggtcaaggaggtcatggagaacacctaccccttggacgtgcccctcgaggtggaggtgggcgtgggtcgggactggctggaggcgaagggggattgaagcggtcgac

SEQ ID NO: 2952 - DNA, 2605 bp, Artificial Sequence
  Description of Artificial Sequence: Synthetic DNA sequence of Thermus Rt41A DNA Polymerase S770T
atgaaatacctgctgccgaccgctgctgctggtctgctgctcctcgctgcccagccggcgatggccatggatatcggaattaattcggatccgaattccccactttttgacctggaggaaccccccaagcgggtgcttctggtggacggccaccacctggcctaccgcaccttctacgccctgagcctcaccacctcccggggggagccggtgcagatggtctacggcttcgcccggagcctcctcaaggccttgaaggaggacgggcaggcggtggtcgtggtctttgacgccaaggccccctccttccgccacgaggcctacgaggcctacaaggcgggccgggcccccaccccggaggacttcccccgccagctcgccttggtcaagcggctggtggaccttctgggcctggtccgcctcgaggccccgggttacgaggcggacgacgtcctgggcaccctggccaagaaggccgaaagggaggggatggaggtgcgcatcctcacgggagaccgggacttcttccagctcctctccgagaaggtctcggtcctcctgccggacgggaccctggtcaccccaaaggacgtccaggagaagtacggggtgccgccggagcgctgggtggacttccgcgccctcacgggggaccgctcggacaacatccccggggtggcggggataggggagaagaccgcccttcgactcctcgcggagtgggggagcgtggagaacctcctgaagaacctggaccgggtgaagccggactcggtccggcgcaagatagaggcgcaccttgaggacctccgcctctccttggacctggcccgcatccgcaccgacctccccttggaggtggactttaaggccctgcgccgcaggacccccgacctggagggcctgagggcctttttggaggagctggagttcggaagcctccttcatgagttcggcctcctgggaggggagaagccccgggaggaggccccctggcccccgcccgaaggggccttcgtaggcttcctcctctcccgcaaggagcccatgtgggcggagcttctggccctggcggccgccgcagagggccgggtccaccgggcaacaagcccggttgaggccctggccgacctcaaggaggcccgggggttcctggccaaggacctggccgttttggccctgcgggagggggtggccctggaccccacggacgaccccctcctggtggcctacctcctggacccggccaacaccaaccccgagggggtggcccggcgctacgggggcgagttcacggaggacgcagcggagagggccctcctctccgagaggctcttccagaacctctttccccggctttccgagaagctcctctggctctaccaggaggtggagcggcccctctcccgggtcttggcccacatggaggcccggggggtgaggctggacgtcccccttctggaggccctctcctttgagctggagaaggagatggagcgcctggagggggaggtcttccgcttggccggccaccccttcaacctcaactcccgcgaccagctggaaagggtcctctttgacgagctgggccttaccccggtgggtcggacggagaagacgggcaagcgctccaccgcccagggggccctggaggccctccggggggcccaccccatcgtggagctcatcctccagtaccgggagctttccaagctcaaaagcacctacctggaccccctgccccggctcgtccacccgcggacgggccggcttcacacccgcttcaaccagacggccacggccacgggaaggctttccagctccgaccccaacctgcagaacatccccgtgcgcacccccttggggcagcgcatccgcaaggccttcgtggccgaggaggggtggctccttttggcggcggactactcccagatcgagcttcgggtcctggcccacctctcgggggacgagaacctgaagcgggtcttccgggaggggaaggacatccataccgaaaccgccgcctggatgttcggcttagaccccgctctagtggatccaaagatgcgccgggcggccaagacggtcaacttcggcgtcctctacgggatgtccgcccacaggctctcccaggagctcggcatagactacaaggaggcggaggcctttattgagcgctacttccagagcttccccaaggtgcgggcctggatagaaaggaccctggaggagggccggacgcggggctacgtggagaccctgttcggcaggaggcgctatgtgcccgacctggcctcccgggtccgcactgtgcgggaggcggcggagcggatggccttcaacatgcccgtgcagggcaccgccgccgacctgatgaagatcgccatggtcaagctcttccccaggctaaagcccctgggggcccacctcctcctccaggtgcacgacgagctggtcctggaggtgcccgaggaccgggccgaggaggccaaggccctggtcaaggaggtcatggagaacacctaccccttggacgtgcccctcgaggtggaggtgggcgtgggtcgggactggctggaggcgaagggggattgaagcggtcgac

SEQ ID NO: 2953 - DNA, 2605 bp, Artificial Sequence
  Description of Artificial Sequence: Synthetic DNA sequence of Thermus Rt41A DNA Polymerase S770N
atgaaatacctgctgccgaccgctgctgctggtctgctgctcctcgctgcccagccggcgatggccatggatatcggaattaattcggatccgaattccccactttttgacctggaggaaccccccaagcgggtgcttctggtggacggccaccacctggcctaccgcaccttctacgccctgagcctcaccacctcccggggggagccggtgcagatggtctacggcttcgcccggagcctcctcaaggccttgaaggaggacgggcaggcggtggtcgtggtctttgacgccaaggccccctccttccgccacgaggcctacgaggcctacaaggcgggccgggcccccaccccggaggacttcccccgccagctcgccttggtcaagcggctggtggaccttctgggcctggtccgcctcgaggccccgggttacgaggcggacgacgtcctgggcaccctggccaagaaggccgaaagggaggggatggaggtgcgcatcctcacgggagaccgggacttcttccagctcctctccgagaaggtctcggtcctcctgccggacgggaccctggtcaccccaaaggacgtccaggagaagtacggggtgccgccggagcgctgggtggacttccgcgccctcacgggggaccgctcggacaacatccccggggtggcggggataggggagaagaccgcccttcgactcctcgcggagtgggggagcgtggagaacctcctgaagaacctggaccgggtgaagccggactcggtccggcgcaagatagaggcgcaccttgaggacctccgcctctccttggacctggcccgcatccgcaccgacctccccttggaggtggactttaaggccctgcgccgcaggacccccgacctggagggcctgagggcctttttggaggagctggagttcggaagcctccttcatgagttcggcctcctgggaggggagaagccccgggaggaggccccctggcccccgcccgaaggggccttcgtaggcttcctcctctcccgcaaggagcccatgtgggcggagcttctggccctggcggccgccgcagagggccgggtccaccgggcaacaagcccggttgaggccctggccgacctcaaggaggcccgggggttcctggccaaggacctggccgttttggccctgcgggagggggtggccctggaccccacggacgaccccctcctggtggcctacctcctggacccggccaacaccaaccccgagggggtggcccggcgctacgggggcgagttcacggaggacgcagcggagagggccctcctctccgagaggctcttccagaacctctttccccggctttccgagaagctcctctggctctaccaggaggtggagcggcccctctcccgggtcttggcccacatggaggcccggggggtgaggctggacgtcccccttctggaggccctctcctttgagctggagaaggagatggagcgcctggagggggaggtcttccgcttggccggccaccccttcaacctcaactcccgcgaccagctggaaagggtcctctttgacgagctgggccttaccccggtgggtcggacggagaagacgggcaagcgctccaccgcccagggggccctggaggccctccggggggcccaccccatcgtggagctcatcctccagtaccgggagctttccaagctcaaaagcacctacctggaccccctgccccggctcgtccacccgcggacgggccggcttcacacccgcttcaaccagacggccacggccacgggaaggctttccagctccgaccccaacctgcagaacatccccgtgcgcacccccttggggcagcgcatccgcaaggccttcgtggccgaggaggggtggctccttttggcggcggactactcccagatcgagcttcgggtcctggcccacctctcgggggacgagaacctgaagcgggtcttccgggaggggaaggacatccataccgaaaccgccgcctggatgttcggcttagaccccgctctagtggatccaaagatgcgccgggcggccaagacggtcaacttcggcgtcctctacgggatgtccgcccacaggctctcccaggagctcggcatagactacaaggaggcggaggcctttattgagcgctacttccagagcttccccaaggtgcgggcctggatagaaaggaccctggaggagggccggacgcggggctacgtggagaccctgttcggcaggaggcgctatgtgcccgacctggcctcccgggtccgcaatgtgcgggaggcggcggagcggatggccttcaacatgcccgtgcagggcaccgccgccgacctgatgaagatcgccatggtcaagctcttccccaggctaaagcccctgggggcccacctcctcctccaggtgcacgacgagctggtcctggaggtgcccgaggaccgggccgaggaggccaaggccctggtcaaggaggtcatggagaacacctaccccttggacgtgcccctcgaggtggaggtgggcgtgggtcgggactggctggaggcgaagggggattgaagcggtcgac

SEQ ID NO: 2954 - DNA, 2605 bp, Artificial Sequence
  Description of Artificial Sequence: Synthetic DNA sequence of Thermus Rt41A DNA Polymerase S770V
atgaaatacctgctgccgaccgctgctgctggtctgctgctcctcgctgcccagccggcgatggccatggatatcggaattaattcggatccgaattccccactttttgacctggaggaaccccccaagcgggtgcttctggtggacggccaccacctggcctaccgcaccttctacgccctgagcctcaccacctcccggggggagccggtgcagatggtctacggcttcgcccggagcctcctcaaggccttgaaggaggacgggcaggcggtggtcgtggtctttgacgccaaggccccctccttccgccacgaggcctacgaggcctacaaggcgggccgggcccccaccccggaggacttcccccgccagctcgccttggtcaagcggctggtggaccttctgggcctggtccgcctcgaggccccgggttacgaggcggacgacgtcctgggcaccctggccaagaaggccgaaagggaggggatggaggtgcgcatcctcacgggagaccgggacttcttccagctcctctccgagaaggtctcggtcctcctgccggacgggaccctggtcaccccaaaggacgtccaggagaagtacggggtgccgccggagcgctgggtggacttccgcgccctcacgggggaccgctcggacaacatccccggggtggcggggataggggagaagaccgcccttcgactcctcgcggagtgggggagcgtggagaacctcctgaagaacctggaccgggtgaagccggactcggtccggcgcaagatagaggcgcaccttgaggacctccgcctctccttggacctggcccgcatccgcaccgacctccccttggaggtggactttaaggccctgcgccgcaggacccccgacctggagggcctgagggcctttttggaggagctggagttcggaagcctccttcatgagttcggcctcctgggaggggagaagccccgggaggaggccccctggcccccgcccgaaggggccttcgtaggcttcctcctctcccgcaaggagcccatgtgggcggagcttctggccctggcggccgccgcagagggccgggtccaccgggcaacaagcccggttgaggccctggccgacctcaaggaggcccgggggttcctggccaaggacctggccgttttggccctgcgggagggggtggccctggaccccacggacgaccccctcctggtggcctacctcctggacccggccaacaccaaccccgagggggtggcccggcgctacgggggcgagttcacggaggacgcagcggagagggccctcctctccgagaggctcttccagaacctctttccccggctttccgagaagctcctctggctctaccaggaggtggagcggcccctctcccgggtcttggcccacatggaggcccggggggtgaggctggacgtcccccttctggaggccctctcctttgagctggagaaggagatggagcgcctggagggggaggtcttccgcttggccggccaccccttcaacctcaactcccgcgaccagctggaaagggtcctctttgacgagctgggccttaccccggtgggtcggacggagaagacgggcaagcgctccaccgcccagggggccctggaggccctccggggggcccaccccatcgtggagctcatcctccagtaccgggagctttccaagctcaaaagcacctacctggaccccctgccccggctcgtccacccgcggacgggccggcttcacacccgcttcaaccagacggccacggccacgggaaggctttccagctccgaccccaacctgcagaacatccccgtgcgcacccccttggggcagcgcatccgcaaggccttcgtggccgaggaggggtggctccttttggcggcggactactcccagatcgagcttcgggtcctggcccacctctcgggggacgagaacctgaagcgggtcttccgggaggggaaggacatccataccgaaaccgccgcctggatgttcggcttagaccccgctctagtggatccaaagatgcgccgggcggccaagacggtcaacttcggcgtcctctacgggatgtccgcccacaggctctcccaggagctcggcatagactacaaggaggcggaggcctttattgagcgctacttccagagcttccccaaggtgcgggcctggatagaaaggaccctggaggagggccggacgcggggctacgtggagaccctgttcggcaggaggcgctatgtgcccgacctggcctcccgggtccgcgtcgtgcgggaggcggcggagcggatggccttcaacatgcccgtgcagggcaccgccgccgacctgatgaagatcgccatggtcaagctcttccccaggctaaagcccctgggggcccacctcctcctccaggtgcacgacgagctggtcctggaggtgcccgaggaccgggccgaggaggccaaggccctggtcaaggaggtcatggagaacacctaccccttggacgtgcccctcgaggtggaggtgggcgtgggtcgggactggctggaggcgaagggggattgaagcggtcgac

SEQ ID NO: 2955 - DNA, 2605 bp, Artificial Sequence
  Description of Artificial Sequence: Synthetic DNA sequence of Thermus Rt41A DNA Polymerase V771A
atgaaatacctgctgccgaccgctgctgctggtctgctgctcctcgctgcccagccggcgatggccatggatatcggaattaattcggatccgaattccccactttttgacctggaggaaccccccaagcgggtgcttctggtggacggccaccacctggcctaccgcaccttctacgccctgagcctcaccacctcccggggggagccggtgcagatggtctacggcttcgcccggagcctcctcaaggccttgaaggaggacgggcaggcggtggtcgtggtctttgacgccaaggccccctccttccgccacgaggcctacgaggcctacaaggcgggccgggcccccaccccggaggacttcccccgccagctcgccttggtcaagcggctggtggaccttctgggcctggtccgcctcgaggccccgggttacgaggcggacgacgtcctgggcaccctggccaagaaggccgaaagggaggggatggaggtgcgcatcctcacgggagaccgggacttcttccagctcctctccgagaaggtctcggtcctcctgccggacgggaccctggtcaccccaaaggacgtccaggagaagtacggggtgccgccggagcgctgggtggacttccgcgccctcacgggggaccgctcggacaacatccccggggtggcggggataggggagaagaccgcccttcgactcctcgcggagtgggggagcgtggagaacctcctgaagaacctggaccgggtgaagccggactcggtccggcgcaagatagaggcgcaccttgaggacctccgcctctccttggacctggcccgcatccgcaccgacctccccttggaggtggactttaaggccctgcgccgcaggacccccgacctggagggcctgagggcctttttggaggagctggagttcggaagcctccttcatgagttcggcctcctgggaggggagaagccccgggaggaggccccctggcccccgcccgaaggggccttcgtaggcttcctcctctcccgcaaggagcccatgtgggcggagcttctggccctggcggccgccgcagagggccgggtccaccgggcaacaagcccggttgaggccctggccgacctcaaggaggcccgggggttcctggccaaggacctggccgttttggccctgcgggagggggtggccctggaccccacggacgaccccctcctggtggcctacctcctggacccggccaacaccaaccccgagggggtggcccggcgctacgggggcgagttcacggaggacgcagcggagagggccctcctctccgagaggctcttccagaacctctttccccggctttccgagaagctcctctggctctaccaggaggtggagcggcccctctcccgggtcttggcccacatggaggcccggggggtgaggctggacgtcccccttctggaggccctctcctttgagctggagaaggagatggagcgcctggagggggaggtcttccgcttggccggccaccccttcaacctcaactcccgcgaccagctggaaagggtcctctttgacgagctgggccttaccccggtgggtcggacggagaagacgggcaagcgctccaccgcccagggggccctggaggccctccggggggcccaccccatcgtggagctcatcctccagtaccgggagctttccaagctcaaaagcacctacctggaccccctgccccggctcgtccacccgcggacgggccggcttcacacccgcttcaaccagacggccacggccacgggaaggctttccagctccgaccccaacctgcagaacatccccgtgcgcacccccttggggcagcgcatccgcaaggccttcgtggccgaggaggggtggctccttttggcggcggactactcccagatcgagcttcgggtcctggcccacctctcgggggacgagaacctgaagcgggtcttccgggaggggaaggacatccataccgaaaccgccgcctggatgttcggcttagaccccgctctagtggatccaaagatgcgccgggcggccaagacggtcaacttcggcgtcctctacgggatgtccgcccacaggctctcccaggagctcggcatagactacaaggaggcggaggcctttattgagcgctacttccagagcttccccaaggtgcgggcctggatagaaaggaccctggaggagggccggacgcggggctacgtggagaccctgttcggcaggaggcgctatgtgcccgacctggcctcccgggtccgctcggctcgggaggcggcggagcggatggccttcaacatgcccgtgcagggcaccgccgccgacctgatgaagatcgccatggtcaagctcttccccaggctaaagcccctgggggcccacctcctcctccaggtgcacgacgagctggtcctggaggtgcccgaggaccgggccgaggaggccaaggccctggtcaaggaggtcatggagaacacctaccccttggacgtgcccctcgaggtggaggtgggcgtgggtcgggactggctggaggcgaagggggattgaagcggtcgac

SEQ ID NO: 2956 - DNA, 2605 bp, Artificial Sequence
  Description of Artificial Sequence: Synthetic DNA sequence of Thermus Rt41A DNA Polymerase V771R
atgaaatacctgctgccgaccgctgctgctggtctgctgctcctcgctgcccagccggcgatggccatggatatcggaattaattcggatccgaattccccactttttgacctggaggaaccccccaagcgggtgcttctggtggacggccaccacctggcctaccgcaccttctacgccctgagcctcaccacctcccggggggagccggtgcagatggtctacggcttcgcccggagcctcctcaaggccttgaaggaggacgggcaggcggtggtcgtggtctttgacgccaaggccccctccttccgccacgaggcctacgaggcctacaaggcgggccgggcccccaccccggaggacttcccccgccagctcgccttggtcaagcggctggtggaccttctgggcctggtccgcctcgaggccccgggttacgaggcggacgacgtcctgggcaccctggccaagaaggccgaaagggaggggatggaggtgcgcatcctcacgggagaccgggacttcttccagctcctctccgagaaggtctcggtcctcctgccggacgggaccctggtcaccccaaaggacgtccaggagaagtacggggtgccgccggagcgctgggtggacttccgcgccctcacgggggaccgctcggacaacatccccggggtggcggggataggggagaagaccgcccttcgactcctcgcggagtgggggagcgtggagaacctcctgaagaacctggaccgggtgaagccggactcggtccggcgcaagatagaggcgcaccttgaggacctccgcctctccttggacctggcccgcatccgcaccgacctccccttggaggtggactttaaggccctgcgccgcaggacccccgacctggagggcctgagggcctttttggaggagctggagttcggaagcctccttcatgagttcggcctcctgggaggggagaagccccgggaggaggccccctggcccccgcccgaaggggccttcgtaggcttcctcctctcccgcaaggagcccatgtgggcggagcttctggccctggcggccgccgcagagggccgggtccaccgggcaacaagcccggttgaggccctggccgacctcaaggaggcccgggggttcctggccaaggacctggccgttttggccctgcgggagggggtggccctggaccccacggacgaccccctcctggtggcctacctcctggacccggccaacaccaaccccgagggggtggcccggcgctacgggggcgagttcacggaggacgcagcggagagggccctcctctccgagaggctcttccagaacctctttccccggctttccgagaagctcctctggctctaccaggaggtggagcggcccctctcccgggtcttggcccacatggaggcccggggggtgaggctggacgtcccccttctggaggccctctcctttgagctggagaaggagatggagcgcctggagggggaggtcttccgcttggccggccaccccttcaacctcaactcccgcgaccagctggaaagggtcctctttgacgagctgggccttaccccggtgggtcggacggagaagacgggcaagcgctccaccgcccagggggccctggaggccctccggggggcccaccccatcgtggagctcatcctccagtaccgggagctttccaagctcaaaagcacctacctggaccccctgccccggctcgtccacccgcggacgggccggcttcacacccgcttcaaccagacggccacggccacgggaaggctttccagctccgaccccaacctgcagaacatccccgtgcgcacccccttggggcagcgcatccgcaaggccttcgtggccgaggaggggtggctccttttggcggcggactactcccagatcgagcttcgggtcctggcccacctctcgggggacgagaacctgaagcgggtcttccgggaggggaaggacatccataccgaaaccgccgcctggatgttcggcttagaccccgctctagtggatccaaagatgcgccgggcggccaagacggtcaacttcggcgtcctctacgggatgtccgcccacaggctctcccaggagctcggcatagactacaaggaggcggaggcctttattgagcgctacttccagagcttccccaaggtgcgggcctggatagaaaggaccctggaggagggccggacgcggggctacgtggagaccctgttcggcaggaggcgctatgtgcccgacctggcctcccgggtccgctcgcgacgggaggcggcggagcggatggccttcaacatgcccgtgcagggcaccgccgccgacctgatgaagatcgccatggtcaagctcttccccaggctaaagcccctgggggcccacctcctcctccaggtgcacgacgagctggtcctggaggtgcccgaggaccgggccgaggaggccaaggccctggtcaaggaggtcatggagaacacctaccccttggacgtgcccctcgaggtggaggtgggcgtgggtcgggactggctggaggcgaagggggattgaagcggtcgac

SEQ ID NO: 2957 - DNA, 2605 bp, Artificial Sequence
  Description of Artificial Sequence: Synthetic DNA sequence of Thermus Rt41A DNA Polymerase V771C
atgaaatacctgctgccgaccgctgctgctggtctgctgctcctcgctgcccagccggcgatggccatggatatcggaattaattcggatccgaattccccactttttgacctggaggaaccccccaagcgggtgcttctggtggacggccaccacctggcctaccgcaccttctacgccctgagcctcaccacctcccggggggagccggtgcagatggtctacggcttcgcccggagcctcctcaaggccttgaaggaggacgggcaggcggtggtcgtggtctttgacgccaaggccccctccttccgccacgaggcctacgaggcctacaaggcgggccgggcccccaccccggaggacttcccccgccagctcgccttggtcaagcggctggtggaccttctgggcctggtccgcctcgaggccccgggttacgaggcggacgacgtcctgggcaccctggccaagaaggccgaaagggaggggatggaggtgcgcatcctcacgggagaccgggacttcttccagctcctctccgagaaggtctcggtcctcctgccggacgggaccctggtcaccccaaaggacgtccaggagaagtacggggtgccgccggagcgctgggtggacttccgcgccctcacgggggaccgctcggacaacatccccggggtggcggggataggggagaagaccgcccttcgactcctcgcggagtgggggagcgtggagaacctcctgaagaacctggaccgggtgaagccggactcggtccggcgcaagatagaggcgcaccttgaggacctccgcctctccttggacctggcccgcatccgcaccgacctccccttggaggtggactttaaggccctgcgccgcaggacccccgacctggagggcctgagggcctttttggaggagctggagttcggaagcctccttcatgagttcggcctcctgggaggggagaagccccgggaggaggccccctggcccccgcccgaaggggccttcgtaggcttcctcctctcccgcaaggagcccatgtgggcggagcttctggccctggcggccgccgcagagggccgggtccaccgggcaacaagcccggttgaggccctggccgacctcaaggaggcccgggggttcctggccaaggacctggccgttttggccctgcgggagggggtggccctggaccccacggacgaccccctcctggtggcctacctcctggacccggccaacaccaaccccgagggggtggcccggcgctacgggggcgagttcacggaggacgcagcggagagggccctcctctccgagaggctcttccagaacctctttccccggctttccgagaagctcctctggctctaccaggaggtggagcggcccctctcccgggtcttggcccacatggaggcccggggggtgaggctggacgtcccccttctggaggccctctcctttgagctggagaaggagatggagcgcctggagggggaggtcttccgcttggccggccaccccttcaacctcaactcccgcgaccagctggaaagggtcctctttgacgagctgggccttaccccggtgggtcggacggagaagacgggcaagcgctccaccgcccagggggccctggaggccctccggggggcccaccccatcgtggagctcatcctccagtaccgggagctttccaagctcaaaagcacctacctggaccccctgccccggctcgtccacccgcggacgggccggcttcacacccgcttcaaccagacggccacggccacgggaaggctttccagctccgaccccaacctgcagaacatccccgtgcgcacccccttggggcagcgcatccgcaaggccttcgtggccgaggaggggtggctccttttggcggcggactactcccagatcgagcttcgggtcctggcccacctctcgggggacgagaacctgaagcgggtcttccgggaggggaaggacatccataccgaaaccgccgcctggatgttcggcttagaccccgctctagtggatccaaagatgcgccgggcggccaagacggtcaacttcggcgtcctctacgggatgtccgcccacaggctctcccaggagctcggcatagactacaaggaggcggaggcctttattgagcgctacttccagagcttccccaaggtgcgggcctggatagaaaggaccctggaggagggccggacgcggggctacgtggagaccctgttcggcaggaggcgctatgtgcccgacctggcctcccgggtccgctcgtgtcgggaggcggcggagcggatggccttcaacatgcccgtgcagggcaccgccgccgacctgatgaagatcgccatggtcaagctcttccccaggctaaagcccctgggggcccacctcctcctccaggtgcacgacgagctggtcctggaggtgcccgaggaccgggccgaggaggccaaggccctggtcaaggaggtcatggagaacacctaccccttggacgtgcccctcgaggtggaggtgggcgtgggtcgggactggctggaggcgaagggggattgaagcggtcgac

SEQ ID NO: 2958 - DNA, 2605 bp, Artificial Sequence
  Description of Artificial Sequence: Synthetic DNA sequence of Thermus Rt41A DNA Polymerase V771G
atgaaatacctgctgccgaccgctgctgctggtctgctgctcctcgctgcccagccggcgatggccatggatatcggaattaattcggatccgaattccccactttttgacctggaggaaccccccaagcgggtgcttctggtggacggccaccacctggcctaccgcaccttctacgccctgagcctcaccacctcccggggggagccggtgcagatggtctacggcttcgcccggagcctcctcaaggccttgaaggaggacgggcaggcggtggtcgtggtctttgacgccaaggccccctccttccgccacgaggcctacgaggcctacaaggcgggccgggcccccaccccggaggacttcccccgccagctcgccttggtcaagcggctggtggaccttctgggcctggtccgcctcgaggccccgggttacgaggcggacgacgtcctgggcaccctggccaagaaggccgaaagggaggggatggaggtgcgcatcctcacgggagaccgggacttcttccagctcctctccgagaaggtctcggtcctcctgccggacgggaccctggtcaccccaaaggacgtccaggagaagtacggggtgccgccggagcgctgggtggacttccgcgccctcacgggggaccgctcggacaacatccccggggtggcggggataggggagaagaccgcccttcgactcctcgcggagtgggggagcgtggagaacctcctgaagaacctggaccgggtgaagccggactcggtccggcgcaagatagaggcgcaccttgaggacctccgcctctccttggacctggcccgcatccgcaccgacctccccttggaggtggactttaaggccctgcgccgcaggacccccgacctggagggcctgagggcctttttggaggagctggagttcggaagcctccttcatgagttcggcctcctgggaggggagaagccccgggaggaggccccctggcccccgcccgaaggggccttcgtaggcttcctcctctcccgcaaggagcccatgtgggcggagcttctggccctggcggccgccgcagagggccgggtccaccgggcaacaagcccggttgaggccctggccgacctcaaggaggcccgggggttcctggccaaggacctggccgttttggccctgcgggagggggtggccctggaccccacggacgaccccctcctggtggcctacctcctggacccggccaacaccaaccccgagggggtggcccggcgctacgggggcgagttcacggaggacgcagcggagagggccctcctctccgagaggctcttccagaacctctttccccggctttccgagaagctcctctggctctaccaggaggtggagcggcccctctcccgggtcttggcccacatggaggcccggggggtgaggctggacgtcccccttctggaggccctctcctttgagctggagaaggagatggagcgcctggagggggaggtcttccgcttggccggccaccccttcaacctcaactcccgcgaccagctggaaagggtcctctttgacgagctgggccttaccccggtgggtcggacggagaagacgggcaagcgctccaccgcccagggggccctggaggccctccggggggcccaccccatcgtggagctcatcctccagtaccgggagctttccaagctcaaaagcacctacctggaccccctgccccggctcgtccacccgcggacgggccggcttcacacccgcttcaaccagacggccacggccacgggaaggctttccagctccgaccccaacctgcagaacatccccgtgcgcacccccttggggcagcgcatccgcaaggccttcgtggccgaggaggggtggctccttttggcggcggactactcccagatcgagcttcgggtcctggcccacctctcgggggacgagaacctgaagcgggtcttccgggaggggaaggacatccataccgaaaccgccgcctggatgttcggcttagaccccgctctagtggatccaaagatgcgccgggcggccaagacggtcaacttcggcgtcctctacgggatgtccgcccacaggctctcccaggagctcggcatagactacaaggaggcggaggcctttattgagcgctacttccagagcttccccaaggtgcgggcctggatagaaaggaccctggaggagggccggacgcggggctacgtggagaccctgttcggcaggaggcgctatgtgcccgacctggcctcccgggtccgctcgggtcgggaggcggcggagcggatggccttcaacatgcccgtgcagggcaccgccgccgacctgatgaagatcgccatggtcaagctcttccccaggctaaagcccctgggggcccacctcctcctccaggtgcacgacgagctggtcctggaggtgcccgaggaccgggccgaggaggccaaggccctggtcaaggaggtcatggagaacacctaccccttggacgtgcccctcgaggtggaggtgggcgtgggtcgggactggctggaggcgaagggggattgaagcggtcgac

SEQ ID NO: 2959 - DNA, 2605 bp, Artificial Sequence
  Description of Artificial Sequence: Synthetic DNA sequence of Thermus Rt41A DNA Polymerase V771Q
atgaaatacctgctgccgaccgctgctgctggtctgctgctcctcgctgcccagccggcgatggccatggatatcggaattaattcggatccgaattccccactttttgacctggaggaaccccccaagcgggtgcttctggtggacggccaccacctggcctaccgcaccttctacgccctgagcctcaccacctcccggggggagccggtgcagatggtctacggcttcgcccggagcctcctcaaggccttgaaggaggacgggcaggcggtggtcgtggtctttgacgccaaggccccctccttccgccacgaggcctacgaggcctacaaggcgggccgggcccccaccccggaggacttcccccgccagctcgccttggtcaagcggctggtggaccttctgggcctggtccgcctcgaggccccgggttacgaggcggacgacgtcctgggcaccctggccaagaaggccgaaagggaggggatggaggtgcgcatcctcacgggagaccgggacttcttccagctcctctccgagaaggtctcggtcctcctgccggacgggaccctggtcaccccaaaggacgtccaggagaagtacggggtgccgccggagcgctgggtggacttccgcgccctcacgggggaccgctcggacaacatccccggggtggcggggataggggagaagaccgcccttcgactcctcgcggagtgggggagcgtggagaacctcctgaagaacctggaccgggtgaagccggactcggtccggcgcaagatagaggcgcaccttgaggacctccgcctctccttggacctggcccgcatccgcaccgacctccccttggaggtggactttaaggccctgcgccgcaggacccccgacctggagggcctgagggcctttttggaggagctggagttcggaagcctccttcatgagttcggcctcctgggaggggagaagccccgggaggaggccccctggcccccgcccgaaggggccttcgtaggcttcctcctctcccgcaaggagcccatgtgggcggagcttctggccctggcggccgccgcagagggccgggtccaccgggcaacaagcccggttgaggccctggccgacctcaaggaggcccgggggttcctggccaaggacctggccgttttggccctgcgggagggggtggccctggaccccacggacgaccccctcctggtggcctacctcctggacccggccaacaccaaccccgagggggtggcccggcgctacgggggcgagttcacggaggacgcagcggagagggccctcctctccgagaggctcttccagaacctctttccccggctttccgagaagctcctctggctctaccaggaggtggagcggcccctctcccgggtcttggcccacatggaggcccggggggtgaggctggacgtcccccttctggaggccctctcctttgagctggagaaggagatggagcgcctggagggggaggtcttccgcttggccggccaccccttcaacctcaactcccgcgaccagctggaaagggtcctctttgacgagctgggccttaccccggtgggtcggacggagaagacgggcaagcgctccaccgcccagggggccctggaggccctccggggggcccaccccatcgtggagctcatcctccagtaccgggagctttccaagctcaaaagcacctacctggaccccctgccccggctcgtccacccgcggacgggccggcttcacacccgcttcaaccagacggccacggccacgggaaggctttccagctccgaccccaacctgcagaacatccccgtgcgcacccccttggggcagcgcatccgcaaggccttcgtggccgaggaggggtggctccttttggcggcggactactcccagatcgagcttcgggtcctggcccacctctcgggggacgagaacctgaagcgggtcttccgggaggggaaggacatccataccgaaaccgccgcctggatgttcggcttagaccccgctctagtggatccaaagatgcgccgggcggccaagacggtcaacttcggcgtcctctacgggatgtccgcccacaggctctcccaggagctcggcatagactacaaggaggcggaggcctttattgagcgctacttccagagcttccccaaggtgcgggcctggatagaaaggaccctggaggagggccggacgcggggctacgtggagaccctgttcggcaggaggcgctatgtgcccgacctggcctcccgggtccgctcgcaacgggaggcggcggagcggatggccttcaacatgcccgtgcagggcaccgccgccgacctgatgaagatcgccatggtcaagctcttccccaggctaaagcccctgggggcccacctcctcctccaggtgcacgacgagctggtcctggaggtgcccgaggaccgggccgaggaggccaaggccctggtcaaggaggtcatggagaacacctaccccttggacgtgcccctcgaggtggaggtgggcgtgggtcgggactggctggaggcgaagggggattgaagcggtcgac

SEQ ID NO: 2960 - DNA, 2605 bp, Artificial Sequence
  Description of Artificial Sequence: Synthetic DNA sequence of Thermus Rt41A DNA Polymerase V771H
atgaaatacctgctgccgaccgctgctgctggtctgctgctcctcgctgcccagccggcgatggccatggatatcggaattaattcggatccgaattccccactttttgacctggaggaaccccccaagcgggtgcttctggtggacggccaccacctggcctaccgcaccttctacgccctgagcctcaccacctcccggggggagccggtgcagatggtctacggcttcgcccggagcctcctcaaggccttgaaggaggacgggcaggcggtggtcgtggtctttgacgccaaggccccctccttccgccacgaggcctacgaggcctacaaggcgggccgggcccccaccccggaggacttcccccgccagctcgccttggtcaagcggctggtggaccttctgggcctggtccgcctcgaggccccgggttacgaggcggacgacgtcctgggcaccctggccaagaaggccgaaagggaggggatggaggtgcgcatcctcacgggagaccgggacttcttccagctcctctccgagaaggtctcggtcctcctgccggacgggaccctggtcaccccaaaggacgtccaggagaagtacggggtgccgccggagcgctgggtggacttccgcgccctcacgggggaccgctcggacaacatccccggggtggcggggataggggagaagaccgcccttcgactcctcgcggagtgggggagcgtggagaacctcctgaagaacctggaccgggtgaagccggactcggtccggcgcaagatagaggcgcaccttgaggacctccgcctctccttggacctggcccgcatccgcaccgacctccccttggaggtggactttaaggccctgcgccgcaggacccccgacctggagggcctgagggcctttttggaggagctggagttcggaagcctccttcatgagttcggcctcctgggaggggagaagccccgggaggaggccccctggcccccgcccgaaggggccttcgtaggcttcctcctctcccgcaaggagcccatgtgggcggagcttctggccctggcggccgccgcagagggccgggtccaccgggcaacaagcccggttgaggccctggccgacctcaaggaggcccgggggttcctggccaaggacctggccgttttggccctgcgggagggggtggccctggaccccacggacgaccccctcctggtggcctacctcctggacccggccaacaccaaccccgagggggtggcccggcgctacgggggcgagttcacggaggacgcagcggagagggccctcctctccgagaggctcttccagaacctctttccccggctttccgagaagctcctctggctctaccaggaggtggagcggcccctctcccgggtcttggcccacatggaggcccggggggtgaggctggacgtcccccttctggaggccctctcctttgagctggagaaggagatggagcgcctggagggggaggtcttccgcttggccggccaccccttcaacctcaactcccgcgaccagctggaaagggtcctctttgacgagctgggccttaccccggtgggtcggacggagaagacgggcaagcgctccaccgcccagggggccctggaggccctccggggggcccaccccatcgtggagctcatcctccagtaccgggagctttccaagctcaaaagcacctacctggaccccctgccccggctcgtccacccgcggacgggccggcttcacacccgcttcaaccagacggccacggccacgggaaggctttccagctccgaccccaacctgcagaacatccccgtgcgcacccccttggggcagcgcatccgcaaggccttcgtggccgaggaggggtggctccttttggcggcggactactcccagatcgagcttcgggtcctggcccacctctcgggggacgagaacctgaagcgggtcttccgggaggggaaggacatccataccgaaaccgccgcctggatgttcggcttagaccccgctctagtggatccaaagatgcgccgggcggccaagacggtcaacttcggcgtcctctacgggatgtccgcccacaggctctcccaggagctcggcatagactacaaggaggcggaggcctttattgagcgctacttccagagcttccccaaggtgcgggcctggatagaaaggaccctggaggagggccggacgcggggctacgtggagaccctgttcggcaggaggcgctatgtgcccgacctggcctcccgggtccgctcgcatcgggaggcggcggagcggatggccttcaacatgcccgtgcagggcaccgccgccgacctgatgaagatcgccatggtcaagctcttccccaggctaaagcccctgggggcccacctcctcctccaggtgcacgacgagctggtcctggaggtgcccgaggaccgggccgaggaggccaaggccctggtcaaggaggtcatggagaacacctaccccttggacgtgcccctcgaggtggaggtgggcgtgggtcgggactggctggaggcgaagggggattgaagcggtcgac

SEQ ID NO: 2961 - DNA, 2605 bp, Artificial Sequence
  Description of Artificial Sequence: Synthetic DNA sequence of Thermus Rt41A DNA Polymerase V771I
atgaaatacctgctgccgaccgctgctgctggtctgctgctcctcgctgcccagccggcgatggccatggatatcggaattaattcggatccgaattccccactttttgacctggaggaaccccccaagcgggtgcttctggtggacggccaccacctggcctaccgcaccttctacgccctgagcctcaccacctcccggggggagccggtgcagatggtctacggcttcgcccggagcctcctcaaggccttgaaggaggacgggcaggcggtggtcgtggtctttgacgccaaggccccctccttccgccacgaggcctacgaggcctacaaggcgggccgggcccccaccccggaggacttcccccgccagctcgccttggtcaagcggctggtggaccttctgggcctggtccgcctcgaggccccgggttacgaggcggacgacgtcctgggcaccctggccaagaaggccgaaagggaggggatggaggtgcgcatcctcacgggagaccgggacttcttccagctcctctccgagaaggtctcggtcctcctgccggacgggaccctggtcaccccaaaggacgtccaggagaagtacggggtgccgccggagcgctgggtggacttccgcgccctcacgggggaccgctcggacaacatccccggggtggcggggataggggagaagaccgcccttcgactcctcgcggagtgggggagcgtggagaacctcctgaagaacctggaccgggtgaagccggactcggtccggcgcaagatagaggcgcaccttgaggacctccgcctctccttggacctggcccgcatccgcaccgacctccccttggaggtggactttaaggccctgcgccgcaggacccccgacctggagggcctgagggcctttttggaggagctggagttcggaagcctccttcatgagttcggcctcctgggaggggagaagccccgggaggaggccccctggcccccgcccgaaggggccttcgtaggcttcctcctctcccgcaaggagcccatgtgggcggagcttctggccctggcggccgccgcagagggccgggtccaccgggcaacaagcccggttgaggccctggccgacctcaaggaggcccgggggttcctggccaaggacctggccgttttggccctgcgggagggggtggccctggaccccacggacgaccccctcctggtggcctacctcctggacccggccaacaccaaccccgagggggtggcccggcgctacgggggcgagttcacggaggacgcagcggagagggccctcctctccgagaggctcttccagaacctctttccccggctttccgagaagctcctctggctctaccaggaggtggagcggcccctctcccgggtcttggcccacatggaggcccggggggtgaggctggacgtcccccttctggaggccctctcctttgagctggagaaggagatggagcgcctggagggggaggtcttccgcttggccggccaccccttcaacctcaactcccgcgaccagctggaaagggtcctctttgacgagctgggccttaccccggtgggtcggacggagaagacgggcaagcgctccaccgcccagggggccctggaggccctccggggggcccaccccatcgtggagctcatcctccagtaccgggagctttccaagctcaaaagcacctacctggaccccctgccccggctcgtccacccgcggacgggccggcttcacacccgcttcaaccagacggccacggccacgggaaggctttccagctccgaccccaacctgcagaacatccccgtgcgcacccccttggggcagcgcatccgcaaggccttcgtggccgaggaggggtggctccttttggcggcggactactcccagatcgagcttcgggtcctggcccacctctcgggggacgagaacctgaagcgggtcttccgggaggggaaggacatccataccgaaaccgccgcctggatgttcggcttagaccccgctctagtggatccaaagatgcgccgggcggccaagacggtcaacttcggcgtcctctacgggatgtccgcccacaggctctcccaggagctcggcatagactacaaggaggcggaggcctttattgagcgctacttccagagcttccccaaggtgcgggcctggatagaaaggaccctggaggagggccggacgcggggctacgtggagaccctgttcggcaggaggcgctatgtgcccgacctggcctcccgggtccgctcgattcgggaggcggcggagcggatggccttcaacatgcccgtgcagggcaccgccgccgacctgatgaagatcgccatggtcaagctcttccccaggctaaagcccctgggggcccacctcctcctccaggtgcacgacgagctggtcctggaggtgcccgaggaccgggccgaggaggccaaggccctggtcaaggaggtcatggagaacacctaccccttggacgtgcccctcgaggtggaggtgggcgtgggtcgggactggctggaggcgaagggggattgaagcggtcgac

SEQ ID NO: 2962 - DNA, 2605 bp, Artificial Sequence
  Description of Artificial Sequence: Synthetic DNA sequence of Thermus Rt41A DNA Polymerase V771L
atgaaatacctgctgccgaccgctgctgctggtctgctgctcctcgctgcccagccggcgatggccatggatatcggaattaattcggatccgaattccccactttttgacctggaggaaccccccaagcgggtgcttctggtggacggccaccacctggcctaccgcaccttctacgccctgagcctcaccacctcccggggggagccggtgcagatggtctacggcttcgcccggagcctcctcaaggccttgaaggaggacgggcaggcggtggtcgtggtctttgacgccaaggccccctccttccgccacgaggcctacgaggcctacaaggcgggccgggcccccaccccggaggacttcccccgccagctcgccttggtcaagcggctggtggaccttctgggcctggtccgcctcgaggccccgggttacgaggcggacgacgtcctgggcaccctggccaagaaggccgaaagggaggggatggaggtgcgcatcctcacgggagaccgggacttcttccagctcctctccgagaaggtctcggtcctcctgccggacgggaccctggtcaccccaaaggacgtccaggagaagtacggggtgccgccggagcgctgggtggacttccgcgccctcacgggggaccgctcggacaacatccccggggtggcggggataggggagaagaccgcccttcgactcctcgcggagtgggggagcgtggagaacctcctgaagaacctggaccgggtgaagccggactcggtccggcgcaagatagaggcgcaccttgaggacctccgcctctccttggacctggcccgcatccgcaccgacctccccttggaggtggactttaaggccctgcgccgcaggacccccgacctggagggcctgagggcctttttggaggagctggagttcggaagcctccttcatgagttcggcctcctgggaggggagaagccccgggaggaggccccctggcccccgcccgaaggggccttcgtaggcttcctcctctcccgcaaggagcccatgtgggcggagcttctggccctggcggccgccgcagagggccgggtccaccgggcaacaagcccggttgaggccctggccgacctcaaggaggcccgggggttcctggccaaggacctggccgttttggccctgcgggagggggtggccctggaccccacggacgaccccctcctggtggcctacctcctggacccggccaacaccaaccccgagggggtggcccggcgctacgggggcgagttcacggaggacgcagcggagagggccctcctctccgagaggctcttccagaacctctttccccggctttccgagaagctcctctggctctaccaggaggtggagcggcccctctcccgggtcttggcccacatggaggcccggggggtgaggctggacgtcccccttctggaggccctctcctttgagctggagaaggagatggagcgcctggagggggaggtcttccgcttggccggccaccccttcaacctcaactcccgcgaccagctggaaagggtcctctttgacgagctgggccttaccccggtgggtcggacggagaagacgggcaagcgctccaccgcccagggggccctggaggccctccggggggcccaccccatcgtggagctcatcctccagtaccgggagctttccaagctcaaaagcacctacctggaccccctgccccggctcgtccacccgcggacgggccggcttcacacccgcttcaaccagacggccacggccacgggaaggctttccagctccgaccccaacctgcagaacatccccgtgcgcacccccttggggcagcgcatccgcaaggccttcgtggccgaggaggggtggctccttttggcggcggactactcccagatcgagcttcgggtcctggcccacctctcgggggacgagaacctgaagcgggtcttccgggaggggaaggacatccataccgaaaccgccgcctggatgttcggcttagaccccgctctagtggatccaaagatgcgccgggcggccaagacggtcaacttcggcgtcctctacgggatgtccgcccacaggctctcccaggagctcggcatagactacaaggaggcggaggcctttattgagcgctacttccagagcttccccaaggtgcgggcctggatagaaaggaccctggaggagggccggacgcggggctacgtggagaccctgttcggcaggaggcgctatgtgcccgacctggcctcccgggtccgctcgttacgggaggcggcggagcggatggccttcaacatgcccgtgcagggcaccgccgccgacctgatgaagatcgccatggtcaagctcttccccaggctaaagcccctgggggcccacctcctcctccaggtgcacgacgagctggtcctggaggtgcccgaggaccgggccgaggaggccaaggccctggtcaaggaggtcatggagaacacctaccccttggacgtgcccctcgaggtggaggtgggcgtgggtcgggactggctggaggcgaagggggattgaagcggtcgac

SEQ ID NO: 2963 - DNA, 2605 bp, Artificial Sequence
  Description of Artificial Sequence: Synthetic DNA sequence of Thermus Rt41A DNA Polymerase V771K
atgaaatacctgctgccgaccgctgctgctggtctgctgctcctcgctgcccagccggcgatggccatggatatcggaattaattcggatccgaattccccactttttgacctggaggaaccccccaagcgggtgcttctggtggacggccaccacctggcctaccgcaccttctacgccctgagcctcaccacctcccggggggagccggtgcagatggtctacggcttcgcccggagcctcctcaaggccttgaaggaggacgggcaggcggtggtcgtggtctttgacgccaaggccccctccttccgccacgaggcctacgaggcctacaaggcgggccgggcccccaccccggaggacttcccccgccagctcgccttggtcaagcggctggtggaccttctgggcctggtccgcctcgaggccccgggttacgaggcggacgacgtcctgggcaccctggccaagaaggccgaaagggaggggatggaggtgcgcatcctcacgggagaccgggacttcttccagctcctctccgagaaggtctcggtcctcctgccggacgggaccctggtcaccccaaaggacgtccaggagaagtacggggtgccgccggagcgctgggtggacttccgcgccctcacgggggaccgctcggacaacatccccggggtggcggggataggggagaagaccgcccttcgactcctcgcggagtgggggagcgtggagaacctcctgaagaacctggaccgggtgaagccggactcggtccggcgcaagatagaggcgcaccttgaggacctccgcctctccttggacctggcccgcatccgcaccgacctccccttggaggtggactttaaggccctgcgccgcaggacccccgacctggagggcctgagggcctttttggaggagctggagttcggaagcctccttcatgagttcggcctcctgggaggggagaagccccgggaggaggccccctggcccccgcccgaaggggccttcgtaggcttcctcctctcccgcaaggagcccatgtgggcggagcttctggccctggcggccgccgcagagggccgggtccaccgggcaacaagcccggttgaggccctggccgacctcaaggaggcccgggggttcctggccaaggacctggccgttttggccctgcgggagggggtggccctggaccccacggacgaccccctcctggtggcctacctcctggacccggccaacaccaaccccgagggggtggcccggcgctacgggggcgagttcacggaggacgcagcggagagggccctcctctccgagaggctcttccagaacctctttccccggctttccgagaagctcctctggctctaccaggaggtggagcggcccctctcccgggtcttggcccacatggaggcccggggggtgaggctggacgtcccccttctggaggccctctcctttgagctggagaaggagatggagcgcctggagggggaggtcttccgcttggccggccaccccttcaacctcaactcccgcgaccagctggaaagggtcctctttgacgagctgggccttaccccggtgggtcggacggagaagacgggcaagcgctccaccgcccagggggccctggaggccctccggggggcccaccccatcgtggagctcatcctccagtaccgggagctttccaagctcaaaagcacctacctggaccccctgccccggctcgtccacccgcggacgggccggcttcacacccgcttcaaccagacggccacggccacgggaaggctttccagctccgaccccaacctgcagaacatccccgtgcgcacccccttggggcagcgcatccgcaaggccttcgtggccgaggaggggtggctccttttggcggcggactactcccagatcgagcttcgggtcctggcccacctctcgggggacgagaacctgaagcgggtcttccgggaggggaaggacatccataccgaaaccgccgcctggatgttcggcttagaccccgctctagtggatccaaagatgcgccgggcggccaagacggtcaacttcggcgtcctctacgggatgtccgcccacaggctctcccaggagctcggcatagactacaaggaggcggaggcctttattgagcgctacttccagagcttccccaaggtgcgggcctggatagaaaggaccctggaggagggccggacgcggggctacgtggagaccctgttcggcaggaggcgctatgtgcccgacctggcctcccgggtccgctcgaaacgggaggcggcggagcggatggccttcaacatgcccgtgcagggcaccgccgccgacctgatgaagatcgccatggtcaagctcttccccaggctaaagcccctgggggcccacctcctcctccaggtgcacgacgagctggtcctggaggtgcccgaggaccgggccgaggaggccaaggccctggtcaaggaggtcatggagaacacctaccccttggacgtgcccctcgaggtggaggtgggcgtgggtcgggactggctggaggcgaagggggattgaagcggtcgac

SEQ ID NO: 2964 - DNA, 2605 bp, Artificial Sequence
  Description of Artificial Sequence: Synthetic DNA sequence of Thermus Rt41A DNA Polymerase V771E
atgaaatacctgctgccgaccgctgctgctggtctgctgctcctcgctgcccagccggcgatggccatggatatcggaattaattcggatccgaattccccactttttgacctggaggaaccccccaagcgggtgcttctggtggacggccaccacctggcctaccgcaccttctacgccctgagcctcaccacctcccggggggagccggtgcagatggtctacggcttcgcccggagcctcctcaaggccttgaaggaggacgggcaggcggtggtcgtggtctttgacgccaaggccccctccttccgccacgaggcctacgaggcctacaaggcgggccgggcccccaccccggaggacttcccccgccagctcgccttggtcaagcggctggtggaccttctgggcctggtccgcctcgaggccccgggttacgaggcggacgacgtcctgggcaccctggccaagaaggccgaaagggaggggatggaggtgcgcatcctcacgggagaccgggacttcttccagctcctctccgagaaggtctcggtcctcctgccggacgggaccctggtcaccccaaaggacgtccaggagaagtacggggtgccgccggagcgctgggtggacttccgcgccctcacgggggaccgctcggacaacatccccggggtggcggggataggggagaagaccgcccttcgactcctcgcggagtgggggagcgtggagaacctcctgaagaacctggaccgggtgaagccggactcggtccggcgcaagatagaggcgcaccttgaggacctccgcctctccttggacctggcccgcatccgcaccgacctccccttggaggtggactttaaggccctgcgccgcaggacccccgacctggagggcctgagggcctttttggaggagctggagttcggaagcctccttcatgagttcggcctcctgggaggggagaagccccgggaggaggccccctggcccccgcccgaaggggccttcgtaggcttcctcctctcccgcaaggagcccatgtgggcggagcttctggccctggcggccgccgcagagggccgggtccaccgggcaacaagcccggttgaggccctggccgacctcaaggaggcccgggggttcctggccaaggacctggccgttttggccctgcgggagggggtggccctggaccccacggacgaccccctcctggtggcctacctcctggacccggccaacaccaaccccgagggggtggcccggcgctacgggggcgagttcacggaggacgcagcggagagggccctcctctccgagaggctcttccagaacctctttccccggctttccgagaagctcctctggctctaccaggaggtggagcggcccctctcccgggtcttggcccacatggaggcccggggggtgaggctggacgtcccccttctggaggccctctcctttgagctggagaaggagatggagcgcctggagggggaggtcttccgcttggccggccaccccttcaacctcaactcccgcgaccagctggaaagggtcctctttgacgagctgggccttaccccggtgggtcggacggagaagacgggcaagcgctccaccgcccagggggccctggaggccctccggggggcccaccccatcgtggagctcatcctccagtaccgggagctttccaagctcaaaagcacctacctggaccccctgccccggctcgtccacccgcggacgggccggcttcacacccgcttcaaccagacggccacggccacgggaaggctttccagctccgaccccaacctgcagaacatccccgtgcgcacccccttggggcagcgcatccgcaaggccttcgtggccgaggaggggtggctccttttggcggcggactactcccagatcgagcttcgggtcctggcccacctctcgggggacgagaacctgaagcgggtcttccgggaggggaaggacatccataccgaaaccgccgcctggatgttcggcttagaccccgctctagtggatccaaagatgcgccgggcggccaagacggtcaacttcggcgtcctctacgggatgtccgcccacaggctctcccaggagctcggcatagactacaaggaggcggaggcctttattgagcgctacttccagagcttccccaaggtgcgggcctggatagaaaggaccctggaggagggccggacgcggggctacgtggagaccctgttcggcaggaggcgctatgtgcccgacctggcctcccgggtccgctcggaacgggaggcggcggagcggatggccttcaacatgcccgtgcagggcaccgccgccgacctgatgaagatcgccatggtcaagctcttccccaggctaaagcccctgggggcccacctcctcctccaggtgcacgacgagctggtcctggaggtgcccgaggaccgggccgaggaggccaaggccctggtcaaggaggtcatggagaacacctaccccttggacgtgcccctcgaggtggaggtgggcgtgggtcgggactggctggaggcgaagggggattgaagcggtcgac

SEQ ID NO: 2965 - DNA, 2605 bp, Artificial Sequence
  Description of Artificial Sequence: Synthetic DNA sequence of Thermus Rt41A DNA Polymerase V771D
atgaaatacctgctgccgaccgctgctgctggtctgctgctcctcgctgcccagccggcgatggccatggatatcggaattaattcggatccgaattccccactttttgacctggaggaaccccccaagcgggtgcttctggtggacggccaccacctggcctaccgcaccttctacgccctgagcctcaccacctcccggggggagccggtgcagatggtctacggcttcgcccggagcctcctcaaggccttgaaggaggacgggcaggcggtggtcgtggtctttgacgccaaggccccctccttccgccacgaggcctacgaggcctacaaggcgggccgggcccccaccccggaggacttcccccgccagctcgccttggtcaagcggctggtggaccttctgggcctggtccgcctcgaggccccgggttacgaggcggacgacgtcctgggcaccctggccaagaaggccgaaagggaggggatggaggtgcgcatcctcacgggagaccgggacttcttccagctcctctccgagaaggtctcggtcctcctgccggacgggaccctggtcaccccaaaggacgtccaggagaagtacggggtgccgccggagcgctgggtggacttccgcgccctcacgggggaccgctcggacaacatccccggggtggcggggataggggagaagaccgcccttcgactcctcgcggagtgggggagcgtggagaacctcctgaagaacctggaccgggtgaagccggactcggtccggcgcaagatagaggcgcaccttgaggacctccgcctctccttggacctggcccgcatccgcaccgacctccccttggaggtggactttaaggccctgcgccgcaggacccccgacctggagggcctgagggcctttttggaggagctggagttcggaagcctccttcatgagttcggcctcctgggaggggagaagccccgggaggaggccccctggcccccgcccgaaggggccttcgtaggcttcctcctctcccgcaaggagcccatgtgggcggagcttctggccctggcggccgccgcagagggccgggtccaccgggcaacaagcccggttgaggccctggccgacctcaaggaggcccgggggttcctggccaaggacctggccgttttggccctgcgggagggggtggccctggaccccacggacgaccccctcctggtggcctacctcctggacccggccaacaccaaccccgagggggtggcccggcgctacgggggcgagttcacggaggacgcagcggagagggccctcctctccgagaggctcttccagaacctctttccccggctttccgagaagctcctctggctctaccaggaggtggagcggcccctctcccgggtcttggcccacatggaggcccggggggtgaggctggacgtcccccttctggaggccctctcctttgagctggagaaggagatggagcgcctggagggggaggtcttccgcttggccggccaccccttcaacctcaactcccgcgaccagctggaaagggtcctctttgacgagctgggccttaccccggtgggtcggacggagaagacgggcaagcgctccaccgcccagggggccctggaggccctccggggggcccaccccatcgtggagctcatcctccagtaccgggagctttccaagctcaaaagcacctacctggaccccctgccccggctcgtccacccgcggacgggccggcttcacacccgcttcaaccagacggccacggccacgggaaggctttccagctccgaccccaacctgcagaacatccccgtgcgcacccccttggggcagcgcatccgcaaggccttcgtggccgaggaggggtggctccttttggcggcggactactcccagatcgagcttcgggtcctggcccacctctcgggggacgagaacctgaagcgggtcttccgggaggggaaggacatccataccgaaaccgccgcctggatgttcggcttagaccccgctctagtggatccaaagatgcgccgggcggccaagacggtcaacttcggcgtcctctacgggatgtccgcccacaggctctcccaggagctcggcatagactacaaggaggcggaggcctttattgagcgctacttccagagcttccccaaggtgcgggcctggatagaaaggaccctggaggagggccggacgcggggctacgtggagaccctgttcggcaggaggcgctatgtgcccgacctggcctcccgggtccgctcggatcgggaggcggcggagcggatggccttcaacatgcccgtgcagggcaccgccgccgacctgatgaagatcgccatggtcaagctcttccccaggctaaagcccctgggggcccacctcctcctccaggtgcacgacgagctggtcctggaggtgcccgaggaccgggccgaggaggccaaggccctggtcaaggaggtcatggagaacacctaccccttggacgtgcccctcgaggtggaggtgggcgtgggtcgggactggctggaggcgaagggggattgaagcggtcgac

SEQ ID NO: 2966 - DNA, 2605 bp, Artificial Sequence
  Description of Artificial Sequence: Synthetic DNA sequence of Thermus Rt41A DNA Polymerase V771F
atgaaatacctgctgccgaccgctgctgctggtctgctgctcctcgctgcccagccggcgatggccatggatatcggaattaattcggatccgaattccccactttttgacctggaggaaccccccaagcgggtgcttctggtggacggccaccacctggcctaccgcaccttctacgccctgagcctcaccacctcccggggggagccggtgcagatggtctacggcttcgcccggagcctcctcaaggccttgaaggaggacgggcaggcggtggtcgtggtctttgacgccaaggccccctccttccgccacgaggcctacgaggcctacaaggcgggccgggcccccaccccggaggacttcccccgccagctcgccttggtcaagcggctggtggaccttctgggcctggtccgcctcgaggccccgggttacgaggcggacgacgtcctgggcaccctggccaagaaggccgaaagggaggggatggaggtgcgcatcctcacgggagaccgggacttcttccagctcctctccgagaaggtctcggtcctcctgccggacgggaccctggtcaccccaaaggacgtccaggagaagtacggggtgccgccggagcgctgggtggacttccgcgccctcacgggggaccgctcggacaacatccccggggtggcggggataggggagaagaccgcccttcgactcctcgcggagtgggggagcgtggagaacctcctgaagaacctggaccgggtgaagccggactcggtccggcgcaagatagaggcgcaccttgaggacctccgcctctccttggacctggcccgcatccgcaccgacctccccttggaggtggactttaaggccctgcgccgcaggacccccgacctggagggcctgagggcctttttggaggagctggagttcggaagcctccttcatgagttcggcctcctgggaggggagaagccccgggaggaggccccctggcccccgcccgaaggggccttcgtaggcttcctcctctcccgcaaggagcccatgtgggcggagcttctggccctggcggccgccgcagagggccgggtccaccgggcaacaagcccggttgaggccctggccgacctcaaggaggcccgggggttcctggccaaggacctggccgttttggccctgcgggagggggtggccctggaccccacggacgaccccctcctggtggcctacctcctggacccggccaacaccaaccccgagggggtggcccggcgctacgggggcgagttcacggaggacgcagcggagagggccctcctctccgagaggctcttccagaacctctttccccggctttccgagaagctcctctggctctaccaggaggtggagcggcccctctcccgggtcttggcccacatggaggcccggggggtgaggctggacgtcccccttctggaggccctctcctttgagctggagaaggagatggagcgcctggagggggaggtcttccgcttggccggccaccccttcaacctcaactcccgcgaccagctggaaagggtcctctttgacgagctgggccttaccccggtgggtcggacggagaagacgggcaagcgctccaccgcccagggggccctggaggccctccggggggcccaccccatcgtggagctcatcctccagtaccgggagctttccaagctcaaaagcacctacctggaccccctgccccggctcgtccacccgcggacgggccggcttcacacccgcttcaaccagacggccacggccacgggaaggctttccagctccgaccccaacctgcagaacatccccgtgcgcacccccttggggcagcgcatccgcaaggccttcgtggccgaggaggggtggctccttttggcggcggactactcccagatcgagcttcgggtcctggcccacctctcgggggacgagaacctgaagcgggtcttccgggaggggaaggacatccataccgaaaccgccgcctggatgttcggcttagaccccgctctagtggatccaaagatgcgccgggcggccaagacggtcaacttcggcgtcctctacgggatgtccgcccacaggctctcccaggagctcggcatagactacaaggaggcggaggcctttattgagcgctacttccagagcttccccaaggtgcgggcctggatagaaaggaccctggaggagggccggacgcggggctacgtggagaccctgttcggcaggaggcgctatgtgcccgacctggcctcccgggtccgctcgtttcgggaggcggcggagcggatggccttcaacatgcccgtgcagggcaccgccgccgacctgatgaagatcgccatggtcaagctcttccccaggctaaagcccctgggggcccacctcctcctccaggtgcacgacgagctggtcctggaggtgcccgaggaccgggccgaggaggccaaggccctggtcaaggaggtcatggagaacacctaccccttggacgtgcccctcgaggtggaggtgggcgtgggtcgggactggctggaggcgaagggggattgaagcggtcgac

SEQ ID NO: 2967 - DNA, 2605 bp, Artificial Sequence
  Description of Artificial Sequence: Synthetic DNA sequence of Thermus Rt41A DNA Polymerase V771S
atgaaatacctgctgccgaccgctgctgctggtctgctgctcctcgctgcccagccggcgatggccatggatatcggaattaattcggatccgaattccccactttttgacctggaggaaccccccaagcgggtgcttctggtggacggccaccacctggcctaccgcaccttctacgccctgagcctcaccacctcccggggggagccggtgcagatggtctacggcttcgcccggagcctcctcaaggccttgaaggaggacgggcaggcggtggtcgtggtctttgacgccaaggccccctccttccgccacgaggcctacgaggcctacaaggcgggccgggcccccaccccggaggacttcccccgccagctcgccttggtcaagcggctggtggaccttctgggcctggtccgcctcgaggccccgggttacgaggcggacgacgtcctgggcaccctggccaagaaggccgaaagggaggggatggaggtgcgcatcctcacgggagaccgggacttcttccagctcctctccgagaaggtctcggtcctcctgccggacgggaccctggtcaccccaaaggacgtccaggagaagtacggggtgccgccggagcgctgggtggacttccgcgccctcacgggggaccgctcggacaacatccccggggtggcggggataggggagaagaccgcccttcgactcctcgcggagtgggggagcgtggagaacctcctgaagaacctggaccgggtgaagccggactcggtccggcgcaagatagaggcgcaccttgaggacctccgcctctccttggacctggcccgcatccgcaccgacctccccttggaggtggactttaaggccctgcgccgcaggacccccgacctggagggcctgagggcctttttggaggagctggagttcggaagcctccttcatgagttcggcctcctgggaggggagaagccccgggaggaggccccctggcccccgcccgaaggggccttcgtaggcttcctcctctcccgcaaggagcccatgtgggcggagcttctggccctggcggccgccgcagagggccgggtccaccgggcaacaagcccggttgaggccctggccgacctcaaggaggcccgggggttcctggccaaggacctggccgttttggccctgcgggagggggtggccctggaccccacggacgaccccctcctggtggcctacctcctggacccggccaacaccaaccccgagggggtggcccggcgctacgggggcgagttcacggaggacgcagcggagagggccctcctctccgagaggctcttccagaacctctttccccggctttccgagaagctcctctggctctaccaggaggtggagcggcccctctcccgggtcttggcccacatggaggcccggggggtgaggctggacgtcccccttctggaggccctctcctttgagctggagaaggagatggagcgcctggagggggaggtcttccgcttggccggccaccccttcaacctcaactcccgcgaccagctggaaagggtcctctttgacgagctgggccttaccccggtgggtcggacggagaagacgggcaagcgctccaccgcccagggggccctggaggccctccggggggcccaccccatcgtggagctcatcctccagtaccgggagctttccaagctcaaaagcacctacctggaccccctgccccggctcgtccacccgcggacgggccggcttcacacccgcttcaaccagacggccacggccacgggaaggctttccagctccgaccccaacctgcagaacatccccgtgcgcacccccttggggcagcgcatccgcaaggccttcgtggccgaggaggggtggctccttttggcggcggactactcccagatcgagcttcgggtcctggcccacctctcgggggacgagaacctgaagcgggtcttccgggaggggaaggacatccataccgaaaccgccgcctggatgttcggcttagaccccgctctagtggatccaaagatgcgccgggcggccaagacggtcaacttcggcgtcctctacgggatgtccgcccacaggctctcccaggagctcggcatagactacaaggaggcggaggcctttattgagcgctacttccagagcttccccaaggtgcgggcctggatagaaaggaccctggaggagggccggacgcggggctacgtggagaccctgttcggcaggaggcgctatgtgcccgacctggcctcccgggtccgctcgtctcgggaggcggcggagcggatggccttcaacatgcccgtgcagggcaccgccgccgacctgatgaagatcgccatggtcaagctcttccccaggctaaagcccctgggggcccacctcctcctccaggtgcacgacgagctggtcctggaggtgcccgaggaccgggccgaggaggccaaggccctggtcaaggaggtcatggagaacacctaccccttggacgtgcccctcgaggtggaggtgggcgtgggtcgggactggctggaggcgaagggggattgaagcggtcgac

SEQ ID NO: 2968 - DNA, 2605 bp, Artificial Sequence
  Description of Artificial Sequence: Synthetic DNA sequence of Thermus Rt41A DNA Polymerase V771Y
atgaaatacctgctgccgaccgctgctgctggtctgctgctcctcgctgcccagccggcgatggccatggatatcggaattaattcggatccgaattccccactttttgacctggaggaaccccccaagcgggtgcttctggtggacggccaccacctggcctaccgcaccttctacgccctgagcctcaccacctcccggggggagccggtgcagatggtctacggcttcgcccggagcctcctcaaggccttgaaggaggacgggcaggcggtggtcgtggtctttgacgccaaggccccctccttccgccacgaggcctacgaggcctacaaggcgggccgggcccccaccccggaggacttcccccgccagctcgccttggtcaagcggctggtggaccttctgggcctggtccgcctcgaggccccgggttacgaggcggacgacgtcctgggcaccctggccaagaaggccgaaagggaggggatggaggtgcgcatcctcacgggagaccgggacttcttccagctcctctccgagaaggtctcggtcctcctgccggacgggaccctggtcaccccaaaggacgtccaggagaagtacggggtgccgccggagcgctgggtggacttccgcgccctcacgggggaccgctcggacaacatccccggggtggcggggataggggagaagaccgcccttcgactcctcgcggagtgggggagcgtggagaacctcctgaagaacctggaccgggtgaagccggactcggtccggcgcaagatagaggcgcaccttgaggacctccgcctctccttggacctggcccgcatccgcaccgacctccccttggaggtggactttaaggccctgcgccgcaggacccccgacctggagggcctgagggcctttttggaggagctggagttcggaagcctccttcatgagttcggcctcctgggaggggagaagccccgggaggaggccccctggcccccgcccgaaggggccttcgtaggcttcctcctctcccgcaaggagcccatgtgggcggagcttctggccctggcggccgccgcagagggccgggtccaccgggcaacaagcccggttgaggccctggccgacctcaaggaggcccgggggttcctggccaaggacctggccgttttggccctgcgggagggggtggccctggaccccacggacgaccccctcctggtggcctacctcctggacccggccaacaccaaccccgagggggtggcccggcgctacgggggcgagttcacggaggacgcagcggagagggccctcctctccgagaggctcttccagaacctctttccccggctttccgagaagctcctctggctctaccaggaggtggagcggcccctctcccgggtcttggcccacatggaggcccggggggtgaggctggacgtcccccttctggaggccctctcctttgagctggagaaggagatggagcgcctggagggggaggtcttccgcttggccggccaccccttcaacctcaactcccgcgaccagctggaaagggtcctctttgacgagctgggccttaccccggtgggtcggacggagaagacgggcaagcgctccaccgcccagggggccctggaggccctccggggggcccaccccatcgtggagctcatcctccagtaccgggagctttccaagctcaaaagcacctacctggaccccctgccccggctcgtccacccgcggacgggccggcttcacacccgcttcaaccagacggccacggccacgggaaggctttccagctccgaccccaacctgcagaacatccccgtgcgcacccccttggggcagcgcatccgcaaggccttcgtggccgaggaggggtggctccttttggcggcggactactcccagatcgagcttcgggtcctggcccacctctcgggggacgagaacctgaagcgggtcttccgggaggggaaggacatccataccgaaaccgccgcctggatgttcggcttagaccccgctctagtggatccaaagatgcgccgggcggccaagacggtcaacttcggcgtcctctacgggatgtccgcccacaggctctcccaggagctcggcatagactacaaggaggcggaggcctttattgagcgctacttccagagcttccccaaggtgcgggcctggatagaaaggaccctggaggagggccggacgcggggctacgtggagaccctgttcggcaggaggcgctatgtgcccgacctggcctcccgggtccgctcgtatcgggaggcggcggagcggatggccttcaacatgcccgtgcagggcaccgccgccgacctgatgaagatcgccatggtcaagctcttccccaggctaaagcccctgggggcccacctcctcctccaggtgcacgacgagctggtcctggaggtgcccgaggaccgggccgaggaggccaaggccctggtcaaggaggtcatggagaacacctaccccttggacgtgcccctcgaggtggaggtgggcgtgggtcgggactggctggaggcgaagggggattgaagcggtcgac

SEQ ID NO: 2969 - DNA, 2605 bp, Artificial Sequence
  Description of Artificial Sequence: Synthetic DNA sequence of Thermus Rt41A DNA Polymerase V771W
atgaaatacctgctgccgaccgctgctgctggtctgctgctcctcgctgcccagccggcgatggccatggatatcggaattaattcggatccgaattccccactttttgacctggaggaaccccccaagcgggtgcttctggtggacggccaccacctggcctaccgcaccttctacgccctgagcctcaccacctcccggggggagccggtgcagatggtctacggcttcgcccggagcctcctcaaggccttgaaggaggacgggcaggcggtggtcgtggtctttgacgccaaggccccctccttccgccacgaggcctacgaggcctacaaggcgggccgggcccccaccccggaggacttcccccgccagctcgccttggtcaagcggctggtggaccttctgggcctggtccgcctcgaggccccgggttacgaggcggacgacgtcctgggcaccctggccaagaaggccgaaagggaggggatggaggtgcgcatcctcacgggagaccgggacttcttccagctcctctccgagaaggtctcggtcctcctgccggacgggaccctggtcaccccaaaggacgtccaggagaagtacggggtgccgccggagcgctgggtggacttccgcgccctcacgggggaccgctcggacaacatccccggggtggcggggataggggagaagaccgcccttcgactcctcgcggagtgggggagcgtggagaacctcctgaagaacctggaccgggtgaagccggactcggtccggcgcaagatagaggcgcaccttgaggacctccgcctctccttggacctggcccgcatccgcaccgacctccccttggaggtggactttaaggccctgcgccgcaggacccccgacctggagggcctgagggcctttttggaggagctggagttcggaagcctccttcatgagttcggcctcctgggaggggagaagccccgggaggaggccccctggcccccgcccgaaggggccttcgtaggcttcctcctctcccgcaaggagcccatgtgggcggagcttctggccctggcggccgccgcagagggccgggtccaccgggcaacaagcccggttgaggccctggccgacctcaaggaggcccgggggttcctggccaaggacctggccgttttggccctgcgggagggggtggccctggaccccacggacgaccccctcctggtggcctacctcctggacccggccaacaccaaccccgagggggtggcccggcgctacgggggcgagttcacggaggacgcagcggagagggccctcctctccgagaggctcttccagaacctctttccccggctttccgagaagctcctctggctctaccaggaggtggagcggcccctctcccgggtcttggcccacatggaggcccggggggtgaggctggacgtcccccttctggaggccctctcctttgagctggagaaggagatggagcgcctggagggggaggtcttccgcttggccggccaccccttcaacctcaactcccgcgaccagctggaaagggtcctctttgacgagctgggccttaccccggtgggtcggacggagaagacgggcaagcgctccaccgcccagggggccctggaggccctccggggggcccaccccatcgtggagctcatcctccagtaccgggagctttccaagctcaaaagcacctacctggaccccctgccccggctcgtccacccgcggacgggccggcttcacacccgcttcaaccagacggccacggccacgggaaggctttccagctccgaccccaacctgcagaacatccccgtgcgcacccccttggggcagcgcatccgcaaggccttcgtggccgaggaggggtggctccttttggcggcggactactcccagatcgagcttcgggtcctggcccacctctcgggggacgagaacctgaagcgggtcttccgggaggggaaggacatccataccgaaaccgccgcctggatgttcggcttagaccccgctctagtggatccaaagatgcgccgggcggccaagacggtcaacttcggcgtcctctacgggatgtccgcccacaggctctcccaggagctcggcatagactacaaggaggcggaggcctttattgagcgctacttccagagcttccccaaggtgcgggcctggatagaaaggaccctggaggagggccggacgcggggctacgtggagaccctgttcggcaggaggcgctatgtgcccgacctggcctcccgggtccgctcgtggcgggaggcggcggagcggatggccttcaacatgcccgtgcagggcaccgccgccgacctgatgaagatcgccatggtcaagctcttccccaggctaaagcccctgggggcccacctcctcctccaggtgcacgacgagctggtcctggaggtgcccgaggaccgggccgaggaggccaaggccctggtcaaggaggtcatggagaacacctaccccttggacgtgcccctcgaggtggaggtgggcgtgggtcgggactggctggaggcgaagggggattgaagcggtcgac

SEQ ID NO: 2970 - DNA, 2605 bp, Artificial Sequence
  Description of Artificial Sequence: Synthetic DNA sequence of Thermus Rt41A DNA Polymerase V771P
atgaaatacctgctgccgaccgctgctgctggtctgctgctcctcgctgcccagccggcgatggccatggatatcggaattaattcggatccgaattccccactttttgacctggaggaaccccccaagcgggtgcttctggtggacggccaccacctggcctaccgcaccttctacgccctgagcctcaccacctcccggggggagccggtgcagatggtctacggcttcgcccggagcctcctcaaggccttgaaggaggacgggcaggcggtggtcgtggtctttgacgccaaggccccctccttccgccacgaggcctacgaggcctacaaggcgggccgggcccccaccccggaggacttcccccgccagctcgccttggtcaagcggctggtggaccttctgggcctggtccgcctcgaggccccgggttacgaggcggacgacgtcctgggcaccctggccaagaaggccgaaagggaggggatggaggtgcgcatcctcacgggagaccgggacttcttccagctcctctccgagaaggtctcggtcctcctgccggacgggaccctggtcaccccaaaggacgtccaggagaagtacggggtgccgccggagcgctgggtggacttccgcgccctcacgggggaccgctcggacaacatccccggggtggcggggataggggagaagaccgcccttcgactcctcgcggagtgggggagcgtggagaacctcctgaagaacctggaccgggtgaagccggactcggtccggcgcaagatagaggcgcaccttgaggacctccgcctctccttggacctggcccgcatccgcaccgacctccccttggaggtggactttaaggccctgcgccgcaggacccccgacctggagggcctgagggcctttttggaggagctggagttcggaagcctccttcatgagttcggcctcctgggaggggagaagccccgggaggaggccccctggcccccgcccgaaggggccttcgtaggcttcctcctctcccgcaaggagcccatgtgggcggagcttctggccctggcggccgccgcagagggccgggtccaccgggcaacaagcccggttgaggccctggccgacctcaaggaggcccgggggttcctggccaaggacctggccgttttggccctgcgggagggggtggccctggaccccacggacgaccccctcctggtggcctacctcctggacccggccaacaccaaccccgagggggtggcccggcgctacgggggcgagttcacggaggacgcagcggagagggccctcctctccgagaggctcttccagaacctctttccccggctttccgagaagctcctctggctctaccaggaggtggagcggcccctctcccgggtcttggcccacatggaggcccggggggtgaggctggacgtcccccttctggaggccctctcctttgagctggagaaggagatggagcgcctggagggggaggtcttccgcttggccggccaccccttcaacctcaactcccgcgaccagctggaaagggtcctctttgacgagctgggccttaccccggtgggtcggacggagaagacgggcaagcgctccaccgcccagggggccctggaggccctccggggggcccaccccatcgtggagctcatcctccagtaccgggagctttccaagctcaaaagcacctacctggaccccctgccccggctcgtccacccgcggacgggccggcttcacacccgcttcaaccagacggccacggccacgggaaggctttccagctccgaccccaacctgcagaacatccccgtgcgcacccccttggggcagcgcatccgcaaggccttcgtggccgaggaggggtggctccttttggcggcggactactcccagatcgagcttcgggtcctggcccacctctcgggggacgagaacctgaagcgggtcttccgggaggggaaggacatccataccgaaaccgccgcctggatgttcggcttagaccccgctctagtggatccaaagatgcgccgggcggccaagacggtcaacttcggcgtcctctacgggatgtccgcccacaggctctcccaggagctcggcatagactacaaggaggcggaggcctttattgagcgctacttccagagcttccccaaggtgcgggcctggatagaaaggaccctggaggagggccggacgcggggctacgtggagaccctgttcggcaggaggcgctatgtgcccgacctggcctcccgggtccgctcgcctcgggaggcggcggagcggatggccttcaacatgcccgtgcagggcaccgccgccgacctgatgaagatcgccatggtcaagctcttccccaggctaaagcccctgggggcccacctcctcctccaggtgcacgacgagctggtcctggaggtgcccgaggaccgggccgaggaggccaaggccctggtcaaggaggtcatggagaacacctaccccttggacgtgcccctcgaggtggaggtgggcgtgggtcgggactggctggaggcgaagggggattgaagcggtcgac

SEQ ID NO: 2971 - DNA, 2605 bp, Artificial Sequence
  Description of Artificial Sequence: Synthetic DNA sequence of Thermus Rt41A DNA Polymerase V771M
atgaaatacctgctgccgaccgctgctgctggtctgctgctcctcgctgcccagccggcgatggccatggatatcggaattaattcggatccgaattccccactttttgacctggaggaaccccccaagcgggtgcttctggtggacggccaccacctggcctaccgcaccttctacgccctgagcctcaccacctcccggggggagccggtgcagatggtctacggcttcgcccggagcctcctcaaggccttgaaggaggacgggcaggcggtggtcgtggtctttgacgccaaggccccctccttccgccacgaggcctacgaggcctacaaggcgggccgggcccccaccccggaggacttcccccgccagctcgccttggtcaagcggctggtggaccttctgggcctggtccgcctcgaggccccgggttacgaggcggacgacgtcctgggcaccctggccaagaaggccgaaagggaggggatggaggtgcgcatcctcacgggagaccgggacttcttccagctcctctccgagaaggtctcggtcctcctgccggacgggaccctggtcaccccaaaggacgtccaggagaagtacggggtgccgccggagcgctgggtggacttccgcgccctcacgggggaccgctcggacaacatccccggggtggcggggataggggagaagaccgcccttcgactcctcgcggagtgggggagcgtggagaacctcctgaagaacctggaccgggtgaagccggactcggtccggcgcaagatagaggcgcaccttgaggacctccgcctctccttggacctggcccgcatccgcaccgacctccccttggaggtggactttaaggccctgcgccgcaggacccccgacctggagggcctgagggcctttttggaggagctggagttcggaagcctccttcatgagttcggcctcctgggaggggagaagccccgggaggaggccccctggcccccgcccgaaggggccttcgtaggcttcctcctctcccgcaaggagcccatgtgggcggagcttctggccctggcggccgccgcagagggccgggtccaccgggcaacaagcccggttgaggccctggccgacctcaaggaggcccgggggttcctggccaaggacctggccgttttggccctgcgggagggggtggccctggaccccacggacgaccccctcctggtggcctacctcctggacccggccaacaccaaccccgagggggtggcccggcgctacgggggcgagttcacggaggacgcagcggagagggccctcctctccgagaggctcttccagaacctctttccccggctttccgagaagctcctctggctctaccaggaggtggagcggcccctctcccgggtcttggcccacatggaggcccggggggtgaggctggacgtcccccttctggaggccctctcctttgagctggagaaggagatggagcgcctggagggggaggtcttccgcttggccggccaccccttcaacctcaactcccgcgaccagctggaaagggtcctctttgacgagctgggccttaccccggtgggtcggacggagaagacgggcaagcgctccaccgcccagggggccctggaggccctccggggggcccaccccatcgtggagctcatcctccagtaccgggagctttccaagctcaaaagcacctacctggaccccctgccccggctcgtccacccgcggacgggccggcttcacacccgcttcaaccagacggccacggccacgggaaggctttccagctccgaccccaacctgcagaacatccccgtgcgcacccccttggggcagcgcatccgcaaggccttcgtggccgaggaggggtggctccttttggcggcggactactcccagatcgagcttcgggtcctggcccacctctcgggggacgagaacctgaagcgggtcttccgggaggggaaggacatccataccgaaaccgccgcctggatgttcggcttagaccccgctctagtggatccaaagatgcgccgggcggccaagacggtcaacttcggcgtcctctacgggatgtccgcccacaggctctcccaggagctcggcatagactacaaggaggcggaggcctttattgagcgctacttccagagcttccccaaggtgcgggcctggatagaaaggaccctggaggagggccggacgcggggctacgtggagaccctgttcggcaggaggcgctatgtgcccgacctggcctcccgggtccgctcgatgcgggaggcggcggagcggatggccttcaacatgcccgtgcagggcaccgccgccgacctgatgaagatcgccatggtcaagctcttccccaggctaaagcccctgggggcccacctcctcctccaggtgcacgacgagctggtcctggaggtgcccgaggaccgggccgaggaggccaaggccctggtcaaggaggtcatggagaacacctaccccttggacgtgcccctcgaggtggaggtgggcgtgggtcgggactggctggaggcgaagggggattgaagcggtcgac

SEQ ID NO: 2972 - DNA, 2605 bp, Artificial Sequence
  Description of Artificial Sequence: Synthetic DNA sequence of Thermus Rt41A DNA Polymerase V771T
atgaaatacctgctgccgaccgctgctgctggtctgctgctcctcgctgcccagccggcgatggccatggatatcggaattaattcggatccgaattccccactttttgacctggaggaaccccccaagcgggtgcttctggtggacggccaccacctggcctaccgcaccttctacgccctgagcctcaccacctcccggggggagccggtgcagatggtctacggcttcgcccggagcctcctcaaggccttgaaggaggacgggcaggcggtggtcgtggtctttgacgccaaggccccctccttccgccacgaggcctacgaggcctacaaggcgggccgggcccccaccccggaggacttcccccgccagctcgccttggtcaagcggctggtggaccttctgggcctggtccgcctcgaggccccgggttacgaggcggacgacgtcctgggcaccctggccaagaaggccgaaagggaggggatggaggtgcgcatcctcacgggagaccgggacttcttccagctcctctccgagaaggtctcggtcctcctgccggacgggaccctggtcaccccaaaggacgtccaggagaagtacggggtgccgccggagcgctgggtggacttccgcgccctcacgggggaccgctcggacaacatccccggggtggcggggataggggagaagaccgcccttcgactcctcgcggagtgggggagcgtggagaacctcctgaagaacctggaccgggtgaagccggactcggtccggcgcaagatagaggcgcaccttgaggacctccgcctctccttggacctggcccgcatccgcaccgacctccccttggaggtggactttaaggccctgcgccgcaggacccccgacctggagggcctgagggcctttttggaggagctggagttcggaagcctccttcatgagttcggcctcctgggaggggagaagccccgggaggaggccccctggcccccgcccgaaggggccttcgtaggcttcctcctctcccgcaaggagcccatgtgggcggagcttctggccctggcggccgccgcagagggccgggtccaccgggcaacaagcccggttgaggccctggccgacctcaaggaggcccgggggttcctggccaaggacctggccgttttggccctgcgggagggggtggccctggaccccacggacgaccccctcctggtggcctacctcctggacccggccaacaccaaccccgagggggtggcccggcgctacgggggcgagttcacggaggacgcagcggagagggccctcctctccgagaggctcttccagaacctctttccccggctttccgagaagctcctctggctctaccaggaggtggagcggcccctctcccgggtcttggcccacatggaggcccggggggtgaggctggacgtcccccttctggaggccctctcctttgagctggagaaggagatggagcgcctggagggggaggtcttccgcttggccggccaccccttcaacctcaactcccgcgaccagctggaaagggtcctctttgacgagctgggccttaccccggtgggtcggacggagaagacgggcaagcgctccaccgcccagggggccctggaggccctccggggggcccaccccatcgtggagctcatcctccagtaccgggagctttccaagctcaaaagcacctacctggaccccctgccccggctcgtccacccgcggacgggccggcttcacacccgcttcaaccagacggccacggccacgggaaggctttccagctccgaccccaacctgcagaacatccccgtgcgcacccccttggggcagcgcatccgcaaggccttcgtggccgaggaggggtggctccttttggcggcggactactcccagatcgagcttcgggtcctggcccacctctcgggggacgagaacctgaagcgggtcttccgggaggggaaggacatccataccgaaaccgccgcctggatgttcggcttagaccccgctctagtggatccaaagatgcgccgggcggccaagacggtcaacttcggcgtcctctacgggatgtccgcccacaggctctcccaggagctcggcatagactacaaggaggcggaggcctttattgagcgctacttccagagcttccccaaggtgcgggcctggatagaaaggaccctggaggagggccggacgcggggctacgtggagaccctgttcggcaggaggcgctatgtgcccgacctggcctcccgggtccgctcgactcgggaggcggcggagcggatggccttcaacatgcccgtgcagggcaccgccgccgacctgatgaagatcgccatggtcaagctcttccccaggctaaagcccctgggggcccacctcctcctccaggtgcacgacgagctggtcctggaggtgcccgaggaccgggccgaggaggccaaggccctggtcaaggaggtcatggagaacacctaccccttggacgtgcccctcgaggtggaggtgggcgtgggtcgggactggctggaggcgaagggggattgaagcggtcgac

SEQ ID NO: 2973 - DNA, 2605 bp, Artificial Sequence
  Description of Artificial Sequence: Synthetic DNA sequence of Thermus Rt41A DNA Polymerase V771N
atgaaatacctgctgccgaccgctgctgctggtctgctgctcctcgctgcccagccggcgatggccatggatatcggaattaattcggatccgaattccccactttttgacctggaggaaccccccaagcgggtgcttctggtggacggccaccacctggcctaccgcaccttctacgccctgagcctcaccacctcccggggggagccggtgcagatggtctacggcttcgcccggagcctcctcaaggccttgaaggaggacgggcaggcggtggtcgtggtctttgacgccaaggccccctccttccgccacgaggcctacgaggcctacaaggcgggccgggcccccaccccggaggacttcccccgccagctcgccttggtcaagcggctggtggaccttctgggcctggtccgcctcgaggccccgggttacgaggcggacgacgtcctgggcaccctggccaagaaggccgaaagggaggggatggaggtgcgcatcctcacgggagaccgggacttcttccagctcctctccgagaaggtctcggtcctcctgccggacgggaccctggtcaccccaaaggacgtccaggagaagtacggggtgccgccggagcgctgggtggacttccgcgccctcacgggggaccgctcggacaacatccccggggtggcggggataggggagaagaccgcccttcgactcctcgcggagtgggggagcgtggagaacctcctgaagaacctggaccgggtgaagccggactcggtccggcgcaagatagaggcgcaccttgaggacctccgcctctccttggacctggcccgcatccgcaccgacctccccttggaggtggactttaaggccctgcgccgcaggacccccgacctggagggcctgagggcctttttggaggagctggagttcggaagcctccttcatgagttcggcctcctgggaggggagaagccccgggaggaggccccctggcccccgcccgaaggggccttcgtaggcttcctcctctcccgcaaggagcccatgtgggcggagcttctggccctggcggccgccgcagagggccgggtccaccgggcaacaagcccggttgaggccctggccgacctcaaggaggcccgggggttcctggccaaggacctggccgttttggccctgcgggagggggtggccctggaccccacggacgaccccctcctggtggcctacctcctggacccggccaacaccaaccccgagggggtggcccggcgctacgggggcgagttcacggaggacgcagcggagagggccctcctctccgagaggctcttccagaacctctttccccggctttccgagaagctcctctggctctaccaggaggtggagcggcccctctcccgggtcttggcccacatggaggcccggggggtgaggctggacgtcccccttctggaggccctctcctttgagctggagaaggagatggagcgcctggagggggaggtcttccgcttggccggccaccccttcaacctcaactcccgcgaccagctggaaagggtcctctttgacgagctgggccttaccccggtgggtcggacggagaagacgggcaagcgctccaccgcccagggggccctggaggccctccggggggcccaccccatcgtggagctcatcctccagtaccgggagctttccaagctcaaaagcacctacctggaccccctgccccggctcgtccacccgcggacgggccggcttcacacccgcttcaaccagacggccacggccacgggaaggctttccagctccgaccccaacctgcagaacatccccgtgcgcacccccttggggcagcgcatccgcaaggccttcgtggccgaggaggggtggctccttttggcggcggactactcccagatcgagcttcgggtcctggcccacctctcgggggacgagaacctgaagcgggtcttccgggaggggaaggacatccataccgaaaccgccgcctggatgttcggcttagaccccgctctagtggatccaaagatgcgccgggcggccaagacggtcaacttcggcgtcctctacgggatgtccgcccacaggctctcccaggagctcggcatagactacaaggaggcggaggcctttattgagcgctacttccagagcttccccaaggtgcgggcctggatagaaaggaccctggaggagggccggacgcggggctacgtggagaccctgttcggcaggaggcgctatgtgcccgacctggcctcccgggtccgctcgaatcgggaggcggcggagcggatggccttcaacatgcccgtgcagggcaccgccgccgacctgatgaagatcgccatggtcaagctcttccccaggctaaagcccctgggggcccacctcctcctccaggtgcacgacgagctggtcctggaggtgcccgaggaccgggccgaggaggccaaggccctggtcaaggaggtcatggagaacacctaccccttggacgtgcccctcgaggtggaggtgggcgtgggtcgggactggctggaggcgaagggggattgaagcggtcgac

SEQ ID NO: 2974 - DNA, 2605 bp, Artificial Sequence
  Description of Artificial Sequence: Synthetic DNA sequence of Thermus Rt41A DNA Polymerase R772A
atgaaatacctgctgccgaccgctgctgctggtctgctgctcctcgctgcccagccggcgatggccatggatatcggaattaattcggatccgaattccccactttttgacctggaggaaccccccaagcgggtgcttctggtggacggccaccacctggcctaccgcaccttctacgccctgagcctcaccacctcccggggggagccggtgcagatggtctacggcttcgcccggagcctcctcaaggccttgaaggaggacgggcaggcggtggtcgtggtctttgacgccaaggccccctccttccgccacgaggcctacgaggcctacaaggcgggccgggcccccaccccggaggacttcccccgccagctcgccttggtcaagcggctggtggaccttctgggcctggtccgcctcgaggccccgggttacgaggcggacgacgtcctgggcaccctggccaagaaggccgaaagggaggggatggaggtgcgcatcctcacgggagaccgggacttcttccagctcctctccgagaaggtctcggtcctcctgccggacgggaccctggtcaccccaaaggacgtccaggagaagtacggggtgccgccggagcgctgggtggacttccgcgccctcacgggggaccgctcggacaacatccccggggtggcggggataggggagaagaccgcccttcgactcctcgcggagtgggggagcgtggagaacctcctgaagaacctggaccgggtgaagccggactcggtccggcgcaagatagaggcgcaccttgaggacctccgcctctccttggacctggcccgcatccgcaccgacctccccttggaggtggactttaaggccctgcgccgcaggacccccgacctggagggcctgagggcctttttggaggagctggagttcggaagcctccttcatgagttcggcctcctgggaggggagaagccccgggaggaggccccctggcccccgcccgaaggggccttcgtaggcttcctcctctcccgcaaggagcccatgtgggcggagcttctggccctggcggccgccgcagagggccgggtccaccgggcaacaagcccggttgaggccctggccgacctcaaggaggcccgggggttcctggccaaggacctggccgttttggccctgcgggagggggtggccctggaccccacggacgaccccctcctggtggcctacctcctggacccggccaacaccaaccccgagggggtggcccggcgctacgggggcgagttcacggaggacgcagcggagagggccctcctctccgagaggctcttccagaacctctttccccggctttccgagaagctcctctggctctaccaggaggtggagcggcccctctcccgggtcttggcccacatggaggcccggggggtgaggctggacgtcccccttctggaggccctctcctttgagctggagaaggagatggagcgcctggagggggaggtcttccgcttggccggccaccccttcaacctcaactcccgcgaccagctggaaagggtcctctttgacgagctgggccttaccccggtgggtcggacggagaagacgggcaagcgctccaccgcccagggggccctggaggccctccggggggcccaccccatcgtggagctcatcctccagtaccgggagctttccaagctcaaaagcacctacctggaccccctgccccggctcgtccacccgcggacgggccggcttcacacccgcttcaaccagacggccacggccacgggaaggctttccagctccgaccccaacctgcagaacatccccgtgcgcacccccttggggcagcgcatccgcaaggccttcgtggccgaggaggggtggctccttttggcggcggactactcccagatcgagcttcgggtcctggcccacctctcgggggacgagaacctgaagcgggtcttccgggaggggaaggacatccataccgaaaccgccgcctggatgttcggcttagaccccgctctagtggatccaaagatgcgccgggcggccaagacggtcaacttcggcgtcctctacgggatgtccgcccacaggctctcccaggagctcggcatagactacaaggaggcggaggcctttattgagcgctacttccagagcttccccaaggtgcgggcctggatagaaaggaccctggaggagggccggacgcggggctacgtggagaccctgttcggcaggaggcgctatgtgcccgacctggcctcccgggtccgctcggtggctgaggcggcggagcggatggccttcaacatgcccgtgcagggcaccgccgccgacctgatgaagatcgccatggtcaagctcttccccaggctaaagcccctgggggcccacctcctcctccaggtgcacgacgagctggtcctggaggtgcccgaggaccgggccgaggaggccaaggccctggtcaaggaggtcatggagaacacctaccccttggacgtgcccctcgaggtggaggtgggcgtgggtcgggactggctggaggcgaagggggattgaagcggtcgac

SEQ ID NO: 2975 - DNA, 2605 bp, Artificial Sequence
  Description of Artificial Sequence: Synthetic DNA sequence of Thermus Rt41A DNA Polymerase R772C
atgaaatacctgctgccgaccgctgctgctggtctgctgctcctcgctgcccagccggcgatggccatggatatcggaattaattcggatccgaattccccactttttgacctggaggaaccccccaagcgggtgcttctggtggacggccaccacctggcctaccgcaccttctacgccctgagcctcaccacctcccggggggagccggtgcagatggtctacggcttcgcccggagcctcctcaaggccttgaaggaggacgggcaggcggtggtcgtggtctttgacgccaaggccccctccttccgccacgaggcctacgaggcctacaaggcgggccgggcccccaccccggaggacttcccccgccagctcgccttggtcaagcggctggtggaccttctgggcctggtccgcctcgaggccccgggttacgaggcggacgacgtcctgggcaccctggccaagaaggccgaaagggaggggatggaggtgcgcatcctcacgggagaccgggacttcttccagctcctctccgagaaggtctcggtcctcctgccggacgggaccctggtcaccccaaaggacgtccaggagaagtacggggtgccgccggagcgctgggtggacttccgcgccctcacgggggaccgctcggacaacatccccggggtggcggggataggggagaagaccgcccttcgactcctcgcggagtgggggagcgtggagaacctcctgaagaacctggaccgggtgaagccggactcggtccggcgcaagatagaggcgcaccttgaggacctccgcctctccttggacctggcccgcatccgcaccgacctccccttggaggtggactttaaggccctgcgccgcaggacccccgacctggagggcctgagggcctttttggaggagctggagttcggaagcctccttcatgagttcggcctcctgggaggggagaagccccgggaggaggccccctggcccccgcccgaaggggccttcgtaggcttcctcctctcccgcaaggagcccatgtgggcggagcttctggccctggcggccgccgcagagggccgggtccaccgggcaacaagcccggttgaggccctggccgacctcaaggaggcccgggggttcctggccaaggacctggccgttttggccctgcgggagggggtggccctggaccccacggacgaccccctcctggtggcctacctcctggacccggccaacaccaaccccgagggggtggcccggcgctacgggggcgagttcacggaggacgcagcggagagggccctcctctccgagaggctcttccagaacctctttccccggctttccgagaagctcctctggctctaccaggaggtggagcggcccctctcccgggtcttggcccacatggaggcccggggggtgaggctggacgtcccccttctggaggccctctcctttgagctggagaaggagatggagcgcctggagggggaggtcttccgcttggccggccaccccttcaacctcaactcccgcgaccagctggaaagggtcctctttgacgagctgggccttaccccggtgggtcggacggagaagacgggcaagcgctccaccgcccagggggccctggaggccctccggggggcccaccccatcgtggagctcatcctccagtaccgggagctttccaagctcaaaagcacctacctggaccccctgccccggctcgtccacccgcggacgggccggcttcacacccgcttcaaccagacggccacggccacgggaaggctttccagctccgaccccaacctgcagaacatccccgtgcgcacccccttggggcagcgcatccgcaaggccttcgtggccgaggaggggtggctccttttggcggcggactactcccagatcgagcttcgggtcctggcccacctctcgggggacgagaacctgaagcgggtcttccgggaggggaaggacatccataccgaaaccgccgcctggatgttcggcttagaccccgctctagtggatccaaagatgcgccgggcggccaagacggtcaacttcggcgtcctctacgggatgtccgcccacaggctctcccaggagctcggcatagactacaaggaggcggaggcctttattgagcgctacttccagagcttccccaaggtgcgggcctggatagaaaggaccctggaggagggccggacgcggggctacgtggagaccctgttcggcaggaggcgctatgtgcccgacctggcctcccgggtccgctcggtgtgtgaggcggcggagcggatggccttcaacatgcccgtgcagggcaccgccgccgacctgatgaagatcgccatggtcaagctcttccccaggctaaagcccctgggggcccacctcctcctccaggtgcacgacgagctggtcctggaggtgcccgaggaccgggccgaggaggccaaggccctggtcaaggaggtcatggagaacacctaccccttggacgtgcccctcgaggtggaggtgggcgtgggtcgggactggctggaggcgaagggggattgaagcggtcgac

SEQ ID NO: 2976 - DNA, 2605 bp, Artificial Sequence
  Description of Artificial Sequence: Synthetic DNA sequence of Thermus Rt41A DNA Polymerase R772G
atgaaatacctgctgccgaccgctgctgctggtctgctgctcctcgctgcccagccggcgatggccatggatatcggaattaattcggatccgaattccccactttttgacctggaggaaccccccaagcgggtgcttctggtggacggccaccacctggcctaccgcaccttctacgccctgagcctcaccacctcccggggggagccggtgcagatggtctacggcttcgcccggagcctcctcaaggccttgaaggaggacgggcaggcggtggtcgtggtctttgacgccaaggccccctccttccgccacgaggcctacgaggcctacaaggcgggccgggcccccaccccggaggacttcccccgccagctcgccttggtcaagcggctggtggaccttctgggcctggtccgcctcgaggccccgggttacgaggcggacgacgtcctgggcaccctggccaagaaggccgaaagggaggggatggaggtgcgcatcctcacgggagaccgggacttcttccagctcctctccgagaaggtctcggtcctcctgccggacgggaccctggtcaccccaaaggacgtccaggagaagtacggggtgccgccggagcgctgggtggacttccgcgccctcacgggggaccgctcggacaacatccccggggtggcggggataggggagaagaccgcccttcgactcctcgcggagtgggggagcgtggagaacctcctgaagaacctggaccgggtgaagccggactcggtccggcgcaagatagaggcgcaccttgaggacctccgcctctccttggacctggcccgcatccgcaccgacctccccttggaggtggactttaaggccctgcgccgcaggacccccgacctggagggcctgagggcctttttggaggagctggagttcggaagcctccttcatgagttcggcctcctgggaggggagaagccccgggaggaggccccctggcccccgcccgaaggggccttcgtaggcttcctcctctcccgcaaggagcccatgtgggcggagcttctggccctggcggccgccgcagagggccgggtccaccgggcaacaagcccggttgaggccctggccgacctcaaggaggcccgggggttcctggccaaggacctggccgttttggccctgcgggagggggtggccctggaccccacggacgaccccctcctggtggcctacctcctggacccggccaacaccaaccccgagggggtggcccggcgctacgggggcgagttcacggaggacgcagcggagagggccctcctctccgagaggctcttccagaacctctttccccggctttccgagaagctcctctggctctaccaggaggtggagcggcccctctcccgggtcttggcccacatggaggcccggggggtgaggctggacgtcccccttctggaggccctctcctttgagctggagaaggagatggagcgcctggagggggaggtcttccgcttggccggccaccccttcaacctcaactcccgcgaccagctggaaagggtcctctttgacgagctgggccttaccccggtgggtcggacggagaagacgggcaagcgctccaccgcccagggggccctggaggccctccggggggcccaccccatcgtggagctcatcctccagtaccgggagctttccaagctcaaaagcacctacctggaccccctgccccggctcgtccacccgcggacgggccggcttcacacccgcttcaaccagacggccacggccacgggaaggctttccagctccgaccccaacctgcagaacatccccgtgcgcacccccttggggcagcgcatccgcaaggccttcgtggccgaggaggggtggctccttttggcggcggactactcccagatcgagcttcgggtcctggcccacctctcgggggacgagaacctgaagcgggtcttccgggaggggaaggacatccataccgaaaccgccgcctggatgttcggcttagaccccgctctagtggatccaaagatgcgccgggcggccaagacggtcaacttcggcgtcctctacgggatgtccgcccacaggctctcccaggagctcggcatagactacaaggaggcggaggcctttattgagcgctacttccagagcttccccaaggtgcgggcctggatagaaaggaccctggaggagggccggacgcggggctacgtggagaccctgttcggcaggaggcgctatgtgcccgacctggcctcccgggtccgctcggtgggtgaggcggcggagcggatggccttcaacatgcccgtgcagggcaccgccgccgacctgatgaagatcgccatggtcaagctcttccccaggctaaagcccctgggggcccacctcctcctccaggtgcacgacgagctggtcctggaggtgcccgaggaccgggccgaggaggccaaggccctggtcaaggaggtcatggagaacacctaccccttggacgtgcccctcgaggtggaggtgggcgtgggtcgggactggctggaggcgaagggggattgaagcggtcgac

SEQ ID NO: 2977 - DNA, 2605 bp, Artificial Sequence
  Description of Artificial Sequence: Synthetic DNA sequence of Thermus Rt41A DNA Polymerase R772Q
atgaaatacctgctgccgaccgctgctgctggtctgctgctcctcgctgcccagccggcgatggccatggatatcggaattaattcggatccgaattccccactttttgacctggaggaaccccccaagcgggtgcttctggtggacggccaccacctggcctaccgcaccttctacgccctgagcctcaccacctcccggggggagccggtgcagatggtctacggcttcgcccggagcctcctcaaggccttgaaggaggacgggcaggcggtggtcgtggtctttgacgccaaggccccctccttccgccacgaggcctacgaggcctacaaggcgggccgggcccccaccccggaggacttcccccgccagctcgccttggtcaagcggctggtggaccttctgggcctggtccgcctcgaggccccgggttacgaggcggacgacgtcctgggcaccctggccaagaaggccgaaagggaggggatggaggtgcgcatcctcacgggagaccgggacttcttccagctcctctccgagaaggtctcggtcctcctgccggacgggaccctggtcaccccaaaggacgtccaggagaagtacggggtgccgccggagcgctgggtggacttccgcgccctcacgggggaccgctcggacaacatccccggggtggcggggataggggagaagaccgcccttcgactcctcgcggagtgggggagcgtggagaacctcctgaagaacctggaccgggtgaagccggactcggtccggcgcaagatagaggcgcaccttgaggacctccgcctctccttggacctggcccgcatccgcaccgacctccccttggaggtggactttaaggccctgcgccgcaggacccccgacctggagggcctgagggcctttttggaggagctggagttcggaagcctccttcatgagttcggcctcctgggaggggagaagccccgggaggaggccccctggcccccgcccgaaggggccttcgtaggcttcctcctctcccgcaaggagcccatgtgggcggagcttctggccctggcggccgccgcagagggccgggtccaccgggcaacaagcccggttgaggccctggccgacctcaaggaggcccgggggttcctggccaaggacctggccgttttggccctgcgggagggggtggccctggaccccacggacgaccccctcctggtggcctacctcctggacccggccaacaccaaccccgagggggtggcccggcgctacgggggcgagttcacggaggacgcagcggagagggccctcctctccgagaggctcttccagaacctctttccccggctttccgagaagctcctctggctctaccaggaggtggagcggcccctctcccgggtcttggcccacatggaggcccggggggtgaggctggacgtcccccttctggaggccctctcctttgagctggagaaggagatggagcgcctggagggggaggtcttccgcttggccggccaccccttcaacctcaactcccgcgaccagctggaaagggtcctctttgacgagctgggccttaccccggtgggtcggacggagaagacgggcaagcgctccaccgcccagggggccctggaggccctccggggggcccaccccatcgtggagctcatcctccagtaccgggagctttccaagctcaaaagcacctacctggaccccctgccccggctcgtccacccgcggacgggccggcttcacacccgcttcaaccagacggccacggccacgggaaggctttccagctccgaccccaacctgcagaacatccccgtgcgcacccccttggggcagcgcatccgcaaggccttcgtggccgaggaggggtggctccttttggcggcggactactcccagatcgagcttcgggtcctggcccacctctcgggggacgagaacctgaagcgggtcttccgggaggggaaggacatccataccgaaaccgccgcctggatgttcggcttagaccccgctctagtggatccaaagatgcgccgggcggccaagacggtcaacttcggcgtcctctacgggatgtccgcccacaggctctcccaggagctcggcatagactacaaggaggcggaggcctttattgagcgctacttccagagcttccccaaggtgcgggcctggatagaaaggaccctggaggagggccggacgcggggctacgtggagaccctgttcggcaggaggcgctatgtgcccgacctggcctcccgggtccgctcggtgcaagaggcggcggagcggatggccttcaacatgcccgtgcagggcaccgccgccgacctgatgaagatcgccatggtcaagctcttccccaggctaaagcccctgggggcccacctcctcctccaggtgcacgacgagctggtcctggaggtgcccgaggaccgggccgaggaggccaaggccctggtcaaggaggtcatggagaacacctaccccttggacgtgcccctcgaggtggaggtgggcgtgggtcgggactggctggaggcgaagggggattgaagcggtcgac

SEQ ID NO: 2978 - DNA, 2605 bp, Artificial Sequence
  Description of Artificial Sequence: Synthetic DNA sequence of Thermus Rt41A DNA Polymerase R772H
atgaaatacctgctgccgaccgctgctgctggtctgctgctcctcgctgcccagccggcgatggccatggatatcggaattaattcggatccgaattccccactttttgacctggaggaaccccccaagcgggtgcttctggtggacggccaccacctggcctaccgcaccttctacgccctgagcctcaccacctcccggggggagccggtgcagatggtctacggcttcgcccggagcctcctcaaggccttgaaggaggacgggcaggcggtggtcgtggtctttgacgccaaggccccctccttccgccacgaggcctacgaggcctacaaggcgggccgggcccccaccccggaggacttcccccgccagctcgccttggtcaagcggctggtggaccttctgggcctggtccgcctcgaggccccgggttacgaggcggacgacgtcctgggcaccctggccaagaaggccgaaagggaggggatggaggtgcgcatcctcacgggagaccgggacttcttccagctcctctccgagaaggtctcggtcctcctgccggacgggaccctggtcaccccaaaggacgtccaggagaagtacggggtgccgccggagcgctgggtggacttccgcgccctcacgggggaccgctcggacaacatccccggggtggcggggataggggagaagaccgcccttcgactcctcgcggagtgggggagcgtggagaacctcctgaagaacctggaccgggtgaagccggactcggtccggcgcaagatagaggcgcaccttgaggacctccgcctctccttggacctggcccgcatccgcaccgacctccccttggaggtggactttaaggccctgcgccgcaggacccccgacctggagggcctgagggcctttttggaggagctggagttcggaagcctccttcatgagttcggcctcctgggaggggagaagccccgggaggaggccccctggcccccgcccgaaggggccttcgtaggcttcctcctctcccgcaaggagcccatgtgggcggagcttctggccctggcggccgccgcagagggccgggtccaccgggcaacaagcccggttgaggccctggccgacctcaaggaggcccgggggttcctggccaaggacctggccgttttggccctgcgggagggggtggccctggaccccacggacgaccccctcctggtggcctacctcctggacccggccaacaccaaccccgagggggtggcccggcgctacgggggcgagttcacggaggacgcagcggagagggccctcctctccgagaggctcttccagaacctctttccccggctttccgagaagctcctctggctctaccaggaggtggagcggcccctctcccgggtcttggcccacatggaggcccggggggtgaggctggacgtcccccttctggaggccctctcctttgagctggagaaggagatggagcgcctggagggggaggtcttccgcttggccggccaccccttcaacctcaactcccgcgaccagctggaaagggtcctctttgacgagctgggccttaccccggtgggtcggacggagaagacgggcaagcgctccaccgcccagggggccctggaggccctccggggggcccaccccatcgtggagctcatcctccagtaccgggagctttccaagctcaaaagcacctacctggaccccctgccccggctcgtccacccgcggacgggccggcttcacacccgcttcaaccagacggccacggccacgggaaggctttccagctccgaccccaacctgcagaacatccccgtgcgcacccccttggggcagcgcatccgcaaggccttcgtggccgaggaggggtggctccttttggcggcggactactcccagatcgagcttcgggtcctggcccacctctcgggggacgagaacctgaagcgggtcttccgggaggggaaggacatccataccgaaaccgccgcctggatgttcggcttagaccccgctctagtggatccaaagatgcgccgggcggccaagacggtcaacttcggcgtcctctacgggatgtccgcccacaggctctcccaggagctcggcatagactacaaggaggcggaggcctttattgagcgctacttccagagcttccccaaggtgcgggcctggatagaaaggaccctggaggagggccggacgcggggctacgtggagaccctgttcggcaggaggcgctatgtgcccgacctggcctcccgggtccgctcggtgcatgaggcggcggagcggatggccttcaacatgcccgtgcagggcaccgccgccgacctgatgaagatcgccatggtcaagctcttccccaggctaaagcccctgggggcccacctcctcctccaggtgcacgacgagctggtcctggaggtgcccgaggaccgggccgaggaggccaaggccctggtcaaggaggtcatggagaacacctaccccttggacgtgcccctcgaggtggaggtgggcgtgggtcgggactggctggaggcgaagggggattgaagcggtcgac

SEQ ID NO: 2979 - DNA, 2605 bp, Artificial Sequence
  Description of Artificial Sequence: Synthetic DNA sequence of Thermus Rt41A DNA Polymerase R772I
atgaaatacctgctgccgaccgctgctgctggtctgctgctcctcgctgcccagccggcgatggccatggatatcggaattaattcggatccgaattccccactttttgacctggaggaaccccccaagcgggtgcttctggtggacggccaccacctggcctaccgcaccttctacgccctgagcctcaccacctcccggggggagccggtgcagatggtctacggcttcgcccggagcctcctcaaggccttgaaggaggacgggcaggcggtggtcgtggtctttgacgccaaggccccctccttccgccacgaggcctacgaggcctacaaggcgggccgggcccccaccccggaggacttcccccgccagctcgccttggtcaagcggctggtggaccttctgggcctggtccgcctcgaggccccgggttacgaggcggacgacgtcctgggcaccctggccaagaaggccgaaagggaggggatggaggtgcgcatcctcacgggagaccgggacttcttccagctcctctccgagaaggtctcggtcctcctgccggacgggaccctggtcaccccaaaggacgtccaggagaagtacggggtgccgccggagcgctgggtggacttccgcgccctcacgggggaccgctcggacaacatccccggggtggcggggataggggagaagaccgcccttcgactcctcgcggagtgggggagcgtggagaacctcctgaagaacctggaccgggtgaagccggactcggtccggcgcaagatagaggcgcaccttgaggacctccgcctctccttggacctggcccgcatccgcaccgacctccccttggaggtggactttaaggccctgcgccgcaggacccccgacctggagggcctgagggcctttttggaggagctggagttcggaagcctccttcatgagttcggcctcctgggaggggagaagccccgggaggaggccccctggcccccgcccgaaggggccttcgtaggcttcctcctctcccgcaaggagcccatgtgggcggagcttctggccctggcggccgccgcagagggccgggtccaccgggcaacaagcccggttgaggccctggccgacctcaaggaggcccgggggttcctggccaaggacctggccgttttggccctgcgggagggggtggccctggaccccacggacgaccccctcctggtggcctacctcctggacccggccaacaccaaccccgagggggtggcccggcgctacgggggcgagttcacggaggacgcagcggagagggccctcctctccgagaggctcttccagaacctctttccccggctttccgagaagctcctctggctctaccaggaggtggagcggcccctctcccgggtcttggcccacatggaggcccggggggtgaggctggacgtcccccttctggaggccctctcctttgagctggagaaggagatggagcgcctggagggggaggtcttccgcttggccggccaccccttcaacctcaactcccgcgaccagctggaaagggtcctctttgacgagctgggccttaccccggtgggtcggacggagaagacgggcaagcgctccaccgcccagggggccctggaggccctccggggggcccaccccatcgtggagctcatcctccagtaccgggagctttccaagctcaaaagcacctacctggaccccctgccccggctcgtccacccgcggacgggccggcttcacacccgcttcaaccagacggccacggccacgggaaggctttccagctccgaccccaacctgcagaacatccccgtgcgcacccccttggggcagcgcatccgcaaggccttcgtggccgaggaggggtggctccttttggcggcggactactcccagatcgagcttcgggtcctggcccacctctcgggggacgagaacctgaagcgggtcttccgggaggggaaggacatccataccgaaaccgccgcctggatgttcggcttagaccccgctctagtggatccaaagatgcgccgggcggccaagacggtcaacttcggcgtcctctacgggatgtccgcccacaggctctcccaggagctcggcatagactacaaggaggcggaggcctttattgagcgctacttccagagcttccccaaggtgcgggcctggatagaaaggaccctggaggagggccggacgcggggctacgtggagaccctgttcggcaggaggcgctatgtgcccgacctggcctcccgggtccgctcggtgattgaggcggcggagcggatggccttcaacatgcccgtgcagggcaccgccgccgacctgatgaagatcgccatggtcaagctcttccccaggctaaagcccctgggggcccacctcctcctccaggtgcacgacgagctggtcctggaggtgcccgaggaccgggccgaggaggccaaggccctggtcaaggaggtcatggagaacacctaccccttggacgtgcccctcgaggtggaggtgggcgtgggtcgggactggctggaggcgaagggggattgaagcggtcgac

SEQ ID NO: 2980 - DNA, 2605 bp, Artificial Sequence
  Description of Artificial Sequence: Synthetic DNA sequence of Thermus Rt41A DNA Polymerase R772L
atgaaatacctgctgccgaccgctgctgctggtctgctgctcctcgctgcccagccggcgatggccatggatatcggaattaattcggatccgaattccccactttttgacctggaggaaccccccaagcgggtgcttctggtggacggccaccacctggcctaccgcaccttctacgccctgagcctcaccacctcccggggggagccggtgcagatggtctacggcttcgcccggagcctcctcaaggccttgaaggaggacgggcaggcggtggtcgtggtctttgacgccaaggccccctccttccgccacgaggcctacgaggcctacaaggcgggccgggcccccaccccggaggacttcccccgccagctcgccttggtcaagcggctggtggaccttctgggcctggtccgcctcgaggccccgggttacgaggcggacgacgtcctgggcaccctggccaagaaggccgaaagggaggggatggaggtgcgcatcctcacgggagaccgggacttcttccagctcctctccgagaaggtctcggtcctcctgccggacgggaccctggtcaccccaaaggacgtccaggagaagtacggggtgccgccggagcgctgggtggacttccgcgccctcacgggggaccgctcggacaacatccccggggtggcggggataggggagaagaccgcccttcgactcctcgcggagtgggggagcgtggagaacctcctgaagaacctggaccgggtgaagccggactcggtccggcgcaagatagaggcgcaccttgaggacctccgcctctccttggacctggcccgcatccgcaccgacctccccttggaggtggactttaaggccctgcgccgcaggacccccgacctggagggcctgagggcctttttggaggagctggagttcggaagcctccttcatgagttcggcctcctgggaggggagaagccccgggaggaggccccctggcccccgcccgaaggggccttcgtaggcttcctcctctcccgcaaggagcccatgtgggcggagcttctggccctggcggccgccgcagagggccgggtccaccgggcaacaagcccggttgaggccctggccgacctcaaggaggcccgggggttcctggccaaggacctggccgttttggccctgcgggagggggtggccctggaccccacggacgaccccctcctggtggcctacctcctggacccggccaacaccaaccccgagggggtggcccggcgctacgggggcgagttcacggaggacgcagcggagagggccctcctctccgagaggctcttccagaacctctttccccggctttccgagaagctcctctggctctaccaggaggtggagcggcccctctcccgggtcttggcccacatggaggcccggggggtgaggctggacgtcccccttctggaggccctctcctttgagctggagaaggagatggagcgcctggagggggaggtcttccgcttggccggccaccccttcaacctcaactcccgcgaccagctggaaagggtcctctttgacgagctgggccttaccccggtgggtcggacggagaagacgggcaagcgctccaccgcccagggggccctggaggccctccggggggcccaccccatcgtggagctcatcctccagtaccgggagctttccaagctcaaaagcacctacctggaccccctgccccggctcgtccacccgcggacgggccggcttcacacccgcttcaaccagacggccacggccacgggaaggctttccagctccgaccccaacctgcagaacatccccgtgcgcacccccttggggcagcgcatccgcaaggccttcgtggccgaggaggggtggctccttttggcggcggactactcccagatcgagcttcgggtcctggcccacctctcgggggacgagaacctgaagcgggtcttccgggaggggaaggacatccataccgaaaccgccgcctggatgttcggcttagaccccgctctagtggatccaaagatgcgccgggcggccaagacggtcaacttcggcgtcctctacgggatgtccgcccacaggctctcccaggagctcggcatagactacaaggaggcggaggcctttattgagcgctacttccagagcttccccaaggtgcgggcctggatagaaaggaccctggaggagggccggacgcggggctacgtggagaccctgttcggcaggaggcgctatgtgcccgacctggcctcccgggtccgctcggtgttagaggcggcggagcggatggccttcaacatgcccgtgcagggcaccgccgccgacctgatgaagatcgccatggtcaagctcttccccaggctaaagcccctgggggcccacctcctcctccaggtgcacgacgagctggtcctggaggtgcccgaggaccgggccgaggaggccaaggccctggtcaaggaggtcatggagaacacctaccccttggacgtgcccctcgaggtggaggtgggcgtgggtcgggactggctggaggcgaagggggattgaagcggtcgac

SEQ ID NO: 2981 - DNA, 2605 bp, Artificial Sequence
  Description of Artificial Sequence: Synthetic DNA sequence of Thermus Rt41A DNA Polymerase R772K
atgaaatacctgctgccgaccgctgctgctggtctgctgctcctcgctgcccagccggcgatggccatggatatcggaattaattcggatccgaattccccactttttgacctggaggaaccccccaagcgggtgcttctggtggacggccaccacctggcctaccgcaccttctacgccctgagcctcaccacctcccggggggagccggtgcagatggtctacggcttcgcccggagcctcctcaaggccttgaaggaggacgggcaggcggtggtcgtggtctttgacgccaaggccccctccttccgccacgaggcctacgaggcctacaaggcgggccgggcccccaccccggaggacttcccccgccagctcgccttggtcaagcggctggtggaccttctgggcctggtccgcctcgaggccccgggttacgaggcggacgacgtcctgggcaccctggccaagaaggccgaaagggaggggatggaggtgcgcatcctcacgggagaccgggacttcttccagctcctctccgagaaggtctcggtcctcctgccggacgggaccctggtcaccccaaaggacgtccaggagaagtacggggtgccgccggagcgctgggtggacttccgcgccctcacgggggaccgctcggacaacatccccggggtggcggggataggggagaagaccgcccttcgactcctcgcggagtgggggagcgtggagaacctcctgaagaacctggaccgggtgaagccggactcggtccggcgcaagatagaggcgcaccttgaggacctccgcctctccttggacctggcccgcatccgcaccgacctccccttggaggtggactttaaggccctgcgccgcaggacccccgacctggagggcctgagggcctttttggaggagctggagttcggaagcctccttcatgagttcggcctcctgggaggggagaagccccgggaggaggccccctggcccccgcccgaaggggccttcgtaggcttcctcctctcccgcaaggagcccatgtgggcggagcttctggccctggcggccgccgcagagggccgggtccaccgggcaacaagcccggttgaggccctggccgacctcaaggaggcccgggggttcctggccaaggacctggccgttttggccctgcgggagggggtggccctggaccccacggacgaccccctcctggtggcctacctcctggacccggccaacaccaaccccgagggggtggcccggcgctacgggggcgagttcacggaggacgcagcggagagggccctcctctccgagaggctcttccagaacctctttccccggctttccgagaagctcctctggctctaccaggaggtggagcggcccctctcccgggtcttggcccacatggaggcccggggggtgaggctggacgtcccccttctggaggccctctcctttgagctggagaaggagatggagcgcctggagggggaggtcttccgcttggccggccaccccttcaacctcaactcccgcgaccagctggaaagggtcctctttgacgagctgggccttaccccggtgggtcggacggagaagacgggcaagcgctccaccgcccagggggccctggaggccctccggggggcccaccccatcgtggagctcatcctccagtaccgggagctttccaagctcaaaagcacctacctggaccccctgccccggctcgtccacccgcggacgggccggcttcacacccgcttcaaccagacggccacggccacgggaaggctttccagctccgaccccaacctgcagaacatccccgtgcgcacccccttggggcagcgcatccgcaaggccttcgtggccgaggaggggtggctccttttggcggcggactactcccagatcgagcttcgggtcctggcccacctctcgggggacgagaacctgaagcgggtcttccgggaggggaaggacatccataccgaaaccgccgcctggatgttcggcttagaccccgctctagtggatccaaagatgcgccgggcggccaagacggtcaacttcggcgtcctctacgggatgtccgcccacaggctctcccaggagctcggcatagactacaaggaggcggaggcctttattgagcgctacttccagagcttccccaaggtgcgggcctggatagaaaggaccctggaggagggccggacgcggggctacgtggagaccctgttcggcaggaggcgctatgtgcccgacctggcctcccgggtccgctcggtgaaagaggcggcggagcggatggccttcaacatgcccgtgcagggcaccgccgccgacctgatgaagatcgccatggtcaagctcttccccaggctaaagcccctgggggcccacctcctcctccaggtgcacgacgagctggtcctggaggtgcccgaggaccgggccgaggaggccaaggccctggtcaaggaggtcatggagaacacctaccccttggacgtgcccctcgaggtggaggtgggcgtgggtcgggactggctggaggcgaagggggattgaagcggtcgac

SEQ ID NO: 2982 - DNA, 2605 bp, Artificial Sequence
  Description of Artificial Sequence: Synthetic DNA sequence of Thermus Rt41A DNA Polymerase R772E
atgaaatacctgctgccgaccgctgctgctggtctgctgctcctcgctgcccagccggcgatggccatggatatcggaattaattcggatccgaattccccactttttgacctggaggaaccccccaagcgggtgcttctggtggacggccaccacctggcctaccgcaccttctacgccctgagcctcaccacctcccggggggagccggtgcagatggtctacggcttcgcccggagcctcctcaaggccttgaaggaggacgggcaggcggtggtcgtggtctttgacgccaaggccccctccttccgccacgaggcctacgaggcctacaaggcgggccgggcccccaccccggaggacttcccccgccagctcgccttggtcaagcggctggtggaccttctgggcctggtccgcctcgaggccccgggttacgaggcggacgacgtcctgggcaccctggccaagaaggccgaaagggaggggatggaggtgcgcatcctcacgggagaccgggacttcttccagctcctctccgagaaggtctcggtcctcctgccggacgggaccctggtcaccccaaaggacgtccaggagaagtacggggtgccgccggagcgctgggtggacttccgcgccctcacgggggaccgctcggacaacatccccggggtggcggggataggggagaagaccgcccttcgactcctcgcggagtgggggagcgtggagaacctcctgaagaacctggaccgggtgaagccggactcggtccggcgcaagatagaggcgcaccttgaggacctccgcctctccttggacctggcccgcatccgcaccgacctccccttggaggtggactttaaggccctgcgccgcaggacccccgacctggagggcctgagggcctttttggaggagctggagttcggaagcctccttcatgagttcggcctcctgggaggggagaagccccgggaggaggccccctggcccccgcccgaaggggccttcgtaggcttcctcctctcccgcaaggagcccatgtgggcggagcttctggccctggcggccgccgcagagggccgggtccaccgggcaacaagcccggttgaggccctggccgacctcaaggaggcccgggggttcctggccaaggacctggccgttttggccctgcgggagggggtggccctggaccccacggacgaccccctcctggtggcctacctcctggacccggccaacaccaaccccgagggggtggcccggcgctacgggggcgagttcacggaggacgcagcggagagggccctcctctccgagaggctcttccagaacctctttccccggctttccgagaagctcctctggctctaccaggaggtggagcggcccctctcccgggtcttggcccacatggaggcccggggggtgaggctggacgtcccccttctggaggccctctcctttgagctggagaaggagatggagcgcctggagggggaggtcttccgcttggccggccaccccttcaacctcaactcccgcgaccagctggaaagggtcctctttgacgagctgggccttaccccggtgggtcggacggagaagacgggcaagcgctccaccgcccagggggccctggaggccctccggggggcccaccccatcgtggagctcatcctccagtaccgggagctttccaagctcaaaagcacctacctggaccccctgccccggctcgtccacccgcggacgggccggcttcacacccgcttcaaccagacggccacggccacgggaaggctttccagctccgaccccaacctgcagaacatccccgtgcgcacccccttggggcagcgcatccgcaaggccttcgtggccgaggaggggtggctccttttggcggcggactactcccagatcgagcttcgggtcctggcccacctctcgggggacgagaacctgaagcgggtcttccgggaggggaaggacatccataccgaaaccgccgcctggatgttcggcttagaccccgctctagtggatccaaagatgcgccgggcggccaagacggtcaacttcggcgtcctctacgggatgtccgcccacaggctctcccaggagctcggcatagactacaaggaggcggaggcctttattgagcgctacttccagagcttccccaaggtgcgggcctggatagaaaggaccctggaggagggccggacgcggggctacgtggagaccctgttcggcaggaggcgctatgtgcccgacctggcctcccgggtccgctcggtggaagaggcggcggagcggatggccttcaacatgcccgtgcagggcaccgccgccgacctgatgaagatcgccatggtcaagctcttccccaggctaaagcccctgggggcccacctcctcctccaggtgcacgacgagctggtcctggaggtgcccgaggaccgggccgaggaggccaaggccctggtcaaggaggtcatggagaacacctaccccttggacgtgcccctcgaggtggaggtgggcgtgggtcgggactggctggaggcgaagggggattgaagcggtcgac

SEQ ID NO: 2983 - DNA, 2605 bp, Artificial Sequence
  Description of Artificial Sequence: Synthetic DNA sequence of Thermus Rt41A DNA Polymerase R772D
atgaaatacctgctgccgaccgctgctgctggtctgctgctcctcgctgcccagccggcgatggccatggatatcggaattaattcggatccgaattccccactttttgacctggaggaaccccccaagcgggtgcttctggtggacggccaccacctggcctaccgcaccttctacgccctgagcctcaccacctcccggggggagccggtgcagatggtctacggcttcgcccggagcctcctcaaggccttgaaggaggacgggcaggcggtggtcgtggtctttgacgccaaggccccctccttccgccacgaggcctacgaggcctacaaggcgggccgggcccccaccccggaggacttcccccgccagctcgccttggtcaagcggctggtggaccttctgggcctggtccgcctcgaggccccgggttacgaggcggacgacgtcctgggcaccctggccaagaaggccgaaagggaggggatggaggtgcgcatcctcacgggagaccgggacttcttccagctcctctccgagaaggtctcggtcctcctgccggacgggaccctggtcaccccaaaggacgtccaggagaagtacggggtgccgccggagcgctgggtggacttccgcgccctcacgggggaccgctcggacaacatccccggggtggcggggataggggagaagaccgcccttcgactcctcgcggagtgggggagcgtggagaacctcctgaagaacctggaccgggtgaagccggactcggtccggcgcaagatagaggcgcaccttgaggacctccgcctctccttggacctggcccgcatccgcaccgacctccccttggaggtggactttaaggccctgcgccgcaggacccccgacctggagggcctgagggcctttttggaggagctggagttcggaagcctccttcatgagttcggcctcctgggaggggagaagccccgggaggaggccccctggcccccgcccgaaggggccttcgtaggcttcctcctctcccgcaaggagcccatgtgggcggagcttctggccctggcggccgccgcagagggccgggtccaccgggcaacaagcccggttgaggccctggccgacctcaaggaggcccgggggttcctggccaaggacctggccgttttggccctgcgggagggggtggccctggaccccacggacgaccccctcctggtggcctacctcctggacccggccaacaccaaccccgagggggtggcccggcgctacgggggcgagttcacggaggacgcagcggagagggccctcctctccgagaggctcttccagaacctctttccccggctttccgagaagctcctctggctctaccaggaggtggagcggcccctctcccgggtcttggcccacatggaggcccggggggtgaggctggacgtcccccttctggaggccctctcctttgagctggagaaggagatggagcgcctggagggggaggtcttccgcttggccggccaccccttcaacctcaactcccgcgaccagctggaaagggtcctctttgacgagctgggccttaccccggtgggtcggacggagaagacgggcaagcgctccaccgcccagggggccctggaggccctccggggggcccaccccatcgtggagctcatcctccagtaccgggagctttccaagctcaaaagcacctacctggaccccctgccccggctcgtccacccgcggacgggccggcttcacacccgcttcaaccagacggccacggccacgggaaggctttccagctccgaccccaacctgcagaacatccccgtgcgcacccccttggggcagcgcatccgcaaggccttcgtggccgaggaggggtggctccttttggcggcggactactcccagatcgagcttcgggtcctggcccacctctcgggggacgagaacctgaagcgggtcttccgggaggggaaggacatccataccgaaaccgccgcctggatgttcggcttagaccccgctctagtggatccaaagatgcgccgggcggccaagacggtcaacttcggcgtcctctacgggatgtccgcccacaggctctcccaggagctcggcatagactacaaggaggcggaggcctttattgagcgctacttccagagcttccccaaggtgcgggcctggatagaaaggaccctggaggagggccggacgcggggctacgtggagaccctgttcggcaggaggcgctatgtgcccgacctggcctcccgggtccgctcggtggatgaggcggcggagcggatggccttcaacatgcccgtgcagggcaccgccgccgacctgatgaagatcgccatggtcaagctcttccccaggctaaagcccctgggggcccacctcctcctccaggtgcacgacgagctggtcctggaggtgcccgaggaccgggccgaggaggccaaggccctggtcaaggaggtcatggagaacacctaccccttggacgtgcccctcgaggtggaggtgggcgtgggtcgggactggctggaggcgaagggggattgaagcggtcgac

SEQ ID NO: 2984 - DNA, 2605 bp, Artificial Sequence
  Description of Artificial Sequence: Synthetic DNA sequence of Thermus Rt41A DNA Polymerase R772F
atgaaatacctgctgccgaccgctgctgctggtctgctgctcctcgctgcccagccggcgatggccatggatatcggaattaattcggatccgaattccccactttttgacctggaggaaccccccaagcgggtgcttctggtggacggccaccacctggcctaccgcaccttctacgccctgagcctcaccacctcccggggggagccggtgcagatggtctacggcttcgcccggagcctcctcaaggccttgaaggaggacgggcaggcggtggtcgtggtctttgacgccaaggccccctccttccgccacgaggcctacgaggcctacaaggcgggccgggcccccaccccggaggacttcccccgccagctcgccttggtcaagcggctggtggaccttctgggcctggtccgcctcgaggccccgggttacgaggcggacgacgtcctgggcaccctggccaagaaggccgaaagggaggggatggaggtgcgcatcctcacgggagaccgggacttcttccagctcctctccgagaaggtctcggtcctcctgccggacgggaccctggtcaccccaaaggacgtccaggagaagtacggggtgccgccggagcgctgggtggacttccgcgccctcacgggggaccgctcggacaacatccccggggtggcggggataggggagaagaccgcccttcgactcctcgcggagtgggggagcgtggagaacctcctgaagaacctggaccgggtgaagccggactcggtccggcgcaagatagaggcgcaccttgaggacctccgcctctccttggacctggcccgcatccgcaccgacctccccttggaggtggactttaaggccctgcgccgcaggacccccgacctggagggcctgagggcctttttggaggagctggagttcggaagcctccttcatgagttcggcctcctgggaggggagaagccccgggaggaggccccctggcccccgcccgaaggggccttcgtaggcttcctcctctcccgcaaggagcccatgtgggcggagcttctggccctggcggccgccgcagagggccgggtccaccgggcaacaagcccggttgaggccctggccgacctcaaggaggcccgggggttcctggccaaggacctggccgttttggccctgcgggagggggtggccctggaccccacggacgaccccctcctggtggcctacctcctggacccggccaacaccaaccccgagggggtggcccggcgctacgggggcgagttcacggaggacgcagcggagagggccctcctctccgagaggctcttccagaacctctttccccggctttccgagaagctcctctggctctaccaggaggtggagcggcccctctcccgggtcttggcccacatggaggcccggggggtgaggctggacgtcccccttctggaggccctctcctttgagctggagaaggagatggagcgcctggagggggaggtcttccgcttggccggccaccccttcaacctcaactcccgcgaccagctggaaagggtcctctttgacgagctgggccttaccccggtgggtcggacggagaagacgggcaagcgctccaccgcccagggggccctggaggccctccggggggcccaccccatcgtggagctcatcctccagtaccgggagctttccaagctcaaaagcacctacctggaccccctgccccggctcgtccacccgcggacgggccggcttcacacccgcttcaaccagacggccacggccacgggaaggctttccagctccgaccccaacctgcagaacatccccgtgcgcacccccttggggcagcgcatccgcaaggccttcgtggccgaggaggggtggctccttttggcggcggactactcccagatcgagcttcgggtcctggcccacctctcgggggacgagaacctgaagcgggtcttccgggaggggaaggacatccataccgaaaccgccgcctggatgttcggcttagaccccgctctagtggatccaaagatgcgccgggcggccaagacggtcaacttcggcgtcctctacgggatgtccgcccacaggctctcccaggagctcggcatagactacaaggaggcggaggcctttattgagcgctacttccagagcttccccaaggtgcgggcctggatagaaaggaccctggaggagggccggacgcggggctacgtggagaccctgttcggcaggaggcgctatgtgcccgacctggcctcccgggtccgctcggtgtttgaggcggcggagcggatggccttcaacatgcccgtgcagggcaccgccgccgacctgatgaagatcgccatggtcaagctcttccccaggctaaagcccctgggggcccacctcctcctccaggtgcacgacgagctggtcctggaggtgcccgaggaccgggccgaggaggccaaggccctggtcaaggaggtcatggagaacacctaccccttggacgtgcccctcgaggtggaggtgggcgtgggtcgggactggctggaggcgaagggggattgaagcggtcgac

SEQ ID NO: 2985 - DNA, 2605 bp, Artificial Sequence
  Description of Artificial Sequence: Synthetic DNA sequence of Thermus Rt41A DNA Polymerase R772S
atgaaatacctgctgccgaccgctgctgctggtctgctgctcctcgctgcccagccggcgatggccatggatatcggaattaattcggatccgaattccccactttttgacctggaggaaccccccaagcgggtgcttctggtggacggccaccacctggcctaccgcaccttctacgccctgagcctcaccacctcccggggggagccggtgcagatggtctacggcttcgcccggagcctcctcaaggccttgaaggaggacgggcaggcggtggtcgtggtctttgacgccaaggccccctccttccgccacgaggcctacgaggcctacaaggcgggccgggcccccaccccggaggacttcccccgccagctcgccttggtcaagcggctggtggaccttctgggcctggtccgcctcgaggccccgggttacgaggcggacgacgtcctgggcaccctggccaagaaggccgaaagggaggggatggaggtgcgcatcctcacgggagaccgggacttcttccagctcctctccgagaaggtctcggtcctcctgccggacgggaccctggtcaccccaaaggacgtccaggagaagtacggggtgccgccggagcgctgggtggacttccgcgccctcacgggggaccgctcggacaacatccccggggtggcggggataggggagaagaccgcccttcgactcctcgcggagtgggggagcgtggagaacctcctgaagaacctggaccgggtgaagccggactcggtccggcgcaagatagaggcgcaccttgaggacctccgcctctccttggacctggcccgcatccgcaccgacctccccttggaggtggactttaaggccctgcgccgcaggacccccgacctggagggcctgagggcctttttggaggagctggagttcggaagcctccttcatgagttcggcctcctgggaggggagaagccccgggaggaggccccctggcccccgcccgaaggggccttcgtaggcttcctcctctcccgcaaggagcccatgtgggcggagcttctggccctggcggccgccgcagagggccgggtccaccgggcaacaagcccggttgaggccctggccgacctcaaggaggcccgggggttcctggccaaggacctggccgttttggccctgcgggagggggtggccctggaccccacggacgaccccctcctggtggcctacctcctggacccggccaacaccaaccccgagggggtggcccggcgctacgggggcgagttcacggaggacgcagcggagagggccctcctctccgagaggctcttccagaacctctttccccggctttccgagaagctcctctggctctaccaggaggtggagcggcccctctcccgggtcttggcccacatggaggcccggggggtgaggctggacgtcccccttctggaggccctctcctttgagctggagaaggagatggagcgcctggagggggaggtcttccgcttggccggccaccccttcaacctcaactcccgcgaccagctggaaagggtcctctttgacgagctgggccttaccccggtgggtcggacggagaagacgggcaagcgctccaccgcccagggggccctggaggccctccggggggcccaccccatcgtggagctcatcctccagtaccgggagctttccaagctcaaaagcacctacctggaccccctgccccggctcgtccacccgcggacgggccggcttcacacccgcttcaaccagacggccacggccacgggaaggctttccagctccgaccccaacctgcagaacatccccgtgcgcacccccttggggcagcgcatccgcaaggccttcgtggccgaggaggggtggctccttttggcggcggactactcccagatcgagcttcgggtcctggcccacctctcgggggacgagaacctgaagcgggtcttccgggaggggaaggacatccataccgaaaccgccgcctggatgttcggcttagaccccgctctagtggatccaaagatgcgccgggcggccaagacggtcaacttcggcgtcctctacgggatgtccgcccacaggctctcccaggagctcggcatagactacaaggaggcggaggcctttattgagcgctacttccagagcttccccaaggtgcgggcctggatagaaaggaccctggaggagggccggacgcggggctacgtggagaccctgttcggcaggaggcgctatgtgcccgacctggcctcccgggtccgctcggtgtctgaggcggcggagcggatggccttcaacatgcccgtgcagggcaccgccgccgacctgatgaagatcgccatggtcaagctcttccccaggctaaagcccctgggggcccacctcctcctccaggtgcacgacgagctggtcctggaggtgcccgaggaccgggccgaggaggccaaggccctggtcaaggaggtcatggagaacacctaccccttggacgtgcccctcgaggtggaggtgggcgtgggtcgggactggctggaggcgaagggggattgaagcggtcgac

SEQ ID NO: 2986 - DNA, 2605 bp, Artificial Sequence
  Description of Artificial Sequence: Synthetic DNA sequence of Thermus Rt41A DNA Polymerase R772Y
atgaaatacctgctgccgaccgctgctgctggtctgctgctcctcgctgcccagccggcgatggccatggatatcggaattaattcggatccgaattccccactttttgacctggaggaaccccccaagcgggtgcttctggtggacggccaccacctggcctaccgcaccttctacgccctgagcctcaccacctcccggggggagccggtgcagatggtctacggcttcgcccggagcctcctcaaggccttgaaggaggacgggcaggcggtggtcgtggtctttgacgccaaggccccctccttccgccacgaggcctacgaggcctacaaggcgggccgggcccccaccccggaggacttcccccgccagctcgccttggtcaagcggctggtggaccttctgggcctggtccgcctcgaggccccgggttacgaggcggacgacgtcctgggcaccctggccaagaaggccgaaagggaggggatggaggtgcgcatcctcacgggagaccgggacttcttccagctcctctccgagaaggtctcggtcctcctgccggacgggaccctggtcaccccaaaggacgtccaggagaagtacggggtgccgccggagcgctgggtggacttccgcgccctcacgggggaccgctcggacaacatccccggggtggcggggataggggagaagaccgcccttcgactcctcgcggagtgggggagcgtggagaacctcctgaagaacctggaccgggtgaagccggactcggtccggcgcaagatagaggcgcaccttgaggacctccgcctctccttggacctggcccgcatccgcaccgacctccccttggaggtggactttaaggccctgcgccgcaggacccccgacctggagggcctgagggcctttttggaggagctggagttcggaagcctccttcatgagttcggcctcctgggaggggagaagccccgggaggaggccccctggcccccgcccgaaggggccttcgtaggcttcctcctctcccgcaaggagcccatgtgggcggagcttctggccctggcggccgccgcagagggccgggtccaccgggcaacaagcccggttgaggccctggccgacctcaaggaggcccgggggttcctggccaaggacctggccgttttggccctgcgggagggggtggccctggaccccacggacgaccccctcctggtggcctacctcctggacccggccaacaccaaccccgagggggtggcccggcgctacgggggcgagttcacggaggacgcagcggagagggccctcctctccgagaggctcttccagaacctctttccccggctttccgagaagctcctctggctctaccaggaggtggagcggcccctctcccgggtcttggcccacatggaggcccggggggtgaggctggacgtcccccttctggaggccctctcctttgagctggagaaggagatggagcgcctggagggggaggtcttccgcttggccggccaccccttcaacctcaactcccgcgaccagctggaaagggtcctctttgacgagctgggccttaccccggtgggtcggacggagaagacgggcaagcgctccaccgcccagggggccctggaggccctccggggggcccaccccatcgtggagctcatcctccagtaccgggagctttccaagctcaaaagcacctacctggaccccctgccccggctcgtccacccgcggacgggccggcttcacacccgcttcaaccagacggccacggccacgggaaggctttccagctccgaccccaacctgcagaacatccccgtgcgcacccccttggggcagcgcatccgcaaggccttcgtggccgaggaggggtggctccttttggcggcggactactcccagatcgagcttcgggtcctggcccacctctcgggggacgagaacctgaagcgggtcttccgggaggggaaggacatccataccgaaaccgccgcctggatgttcggcttagaccccgctctagtggatccaaagatgcgccgggcggccaagacggtcaacttcggcgtcctctacgggatgtccgcccacaggctctcccaggagctcggcatagactacaaggaggcggaggcctttattgagcgctacttccagagcttccccaaggtgcgggcctggatagaaaggaccctggaggagggccggacgcggggctacgtggagaccctgttcggcaggaggcgctatgtgcccgacctggcctcccgggtccgctcggtgtatgaggcggcggagcggatggccttcaacatgcccgtgcagggcaccgccgccgacctgatgaagatcgccatggtcaagctcttccccaggctaaagcccctgggggcccacctcctcctccaggtgcacgacgagctggtcctggaggtgcccgaggaccgggccgaggaggccaaggccctggtcaaggaggtcatggagaacacctaccccttggacgtgcccctcgaggtggaggtgggcgtgggtcgggactggctggaggcgaagggggattgaagcggtcgac

SEQ ID NO: 2987 - DNA, 2605 bp, Artificial Sequence
  Description of Artificial Sequence: Synthetic DNA sequence of Thermus Rt41A DNA Polymerase R772W
atgaaatacctgctgccgaccgctgctgctggtctgctgctcctcgctgcccagccggcgatggccatggatatcggaattaattcggatccgaattccccactttttgacctggaggaaccccccaagcgggtgcttctggtggacggccaccacctggcctaccgcaccttctacgccctgagcctcaccacctcccggggggagccggtgcagatggtctacggcttcgcccggagcctcctcaaggccttgaaggaggacgggcaggcggtggtcgtggtctttgacgccaaggccccctccttccgccacgaggcctacgaggcctacaaggcgggccgggcccccaccccggaggacttcccccgccagctcgccttggtcaagcggctggtggaccttctgggcctggtccgcctcgaggccccgggttacgaggcggacgacgtcctgggcaccctggccaagaaggccgaaagggaggggatggaggtgcgcatcctcacgggagaccgggacttcttccagctcctctccgagaaggtctcggtcctcctgccggacgggaccctggtcaccccaaaggacgtccaggagaagtacggggtgccgccggagcgctgggtggacttccgcgccctcacgggggaccgctcggacaacatccccggggtggcggggataggggagaagaccgcccttcgactcctcgcggagtgggggagcgtggagaacctcctgaagaacctggaccgggtgaagccggactcggtccggcgcaagatagaggcgcaccttgaggacctccgcctctccttggacctggcccgcatccgcaccgacctccccttggaggtggactttaaggccctgcgccgcaggacccccgacctggagggcctgagggcctttttggaggagctggagttcggaagcctccttcatgagttcggcctcctgggaggggagaagccccgggaggaggccccctggcccccgcccgaaggggccttcgtaggcttcctcctctcccgcaaggagcccatgtgggcggagcttctggccctggcggccgccgcagagggccgggtccaccgggcaacaagcccggttgaggccctggccgacctcaaggaggcccgggggttcctggccaaggacctggccgttttggccctgcgggagggggtggccctggaccccacggacgaccccctcctggtggcctacctcctggacccggccaacaccaaccccgagggggtggcccggcgctacgggggcgagttcacggaggacgcagcggagagggccctcctctccgagaggctcttccagaacctctttccccggctttccgagaagctcctctggctctaccaggaggtggagcggcccctctcccgggtcttggcccacatggaggcccggggggtgaggctggacgtcccccttctggaggccctctcctttgagctggagaaggagatggagcgcctggagggggaggtcttccgcttggccggccaccccttcaacctcaactcccgcgaccagctggaaagggtcctctttgacgagctgggccttaccccggtgggtcggacggagaagacgggcaagcgctccaccgcccagggggccctggaggccctccggggggcccaccccatcgtggagctcatcctccagtaccgggagctttccaagctcaaaagcacctacctggaccccctgccccggctcgtccacccgcggacgggccggcttcacacccgcttcaaccagacggccacggccacgggaaggctttccagctccgaccccaacctgcagaacatccccgtgcgcacccccttggggcagcgcatccgcaaggccttcgtggccgaggaggggtggctccttttggcggcggactactcccagatcgagcttcgggtcctggcccacctctcgggggacgagaacctgaagcgggtcttccgggaggggaaggacatccataccgaaaccgccgcctggatgttcggcttagaccccgctctagtggatccaaagatgcgccgggcggccaagacggtcaacttcggcgtcctctacgggatgtccgcccacaggctctcccaggagctcggcatagactacaaggaggcggaggcctttattgagcgctacttccagagcttccccaaggtgcgggcctggatagaaaggaccctggaggagggccggacgcggggctacgtggagaccctgttcggcaggaggcgctatgtgcccgacctggcctcccgggtccgctcggtgtgggaggcggcggagcggatggccttcaacatgcccgtgcagggcaccgccgccgacctgatgaagatcgccatggtcaagctcttccccaggctaaagcccctgggggcccacctcctcctccaggtgcacgacgagctggtcctggaggtgcccgaggaccgggccgaggaggccaaggccctggtcaaggaggtcatggagaacacctaccccttggacgtgcccctcgaggtggaggtgggcgtgggtcgggactggctggaggcgaagggggattgaagcggtcgac

SEQ ID NO: 2988 - DNA, 2605 bp, Artificial Sequence
  Description of Artificial Sequence: Synthetic DNA sequence of Thermus Rt41A DNA Polymerase R772P
atgaaatacctgctgccgaccgctgctgctggtctgctgctcctcgctgcccagccggcgatggccatggatatcggaattaattcggatccgaattccccactttttgacctggaggaaccccccaagcgggtgcttctggtggacggccaccacctggcctaccgcaccttctacgccctgagcctcaccacctcccggggggagccggtgcagatggtctacggcttcgcccggagcctcctcaaggccttgaaggaggacgggcaggcggtggtcgtggtctttgacgccaaggccccctccttccgccacgaggcctacgaggcctacaaggcgggccgggcccccaccccggaggacttcccccgccagctcgccttggtcaagcggctggtggaccttctgggcctggtccgcctcgaggccccgggttacgaggcggacgacgtcctgggcaccctggccaagaaggccgaaagggaggggatggaggtgcgcatcctcacgggagaccgggacttcttccagctcctctccgagaaggtctcggtcctcctgccggacgggaccctggtcaccccaaaggacgtccaggagaagtacggggtgccgccggagcgctgggtggacttccgcgccctcacgggggaccgctcggacaacatccccggggtggcggggataggggagaagaccgcccttcgactcctcgcggagtgggggagcgtggagaacctcctgaagaacctggaccgggtgaagccggactcggtccggcgcaagatagaggcgcaccttgaggacctccgcctctccttggacctggcccgcatccgcaccgacctccccttggaggtggactttaaggccctgcgccgcaggacccccgacctggagggcctgagggcctttttggaggagctggagttcggaagcctccttcatgagttcggcctcctgggaggggagaagccccgggaggaggccccctggcccccgcccgaaggggccttcgtaggcttcctcctctcccgcaaggagcccatgtgggcggagcttctggccctggcggccgccgcagagggccgggtccaccgggcaacaagcccggttgaggccctggccgacctcaaggaggcccgggggttcctggccaaggacctggccgttttggccctgcgggagggggtggccctggaccccacggacgaccccctcctggtggcctacctcctggacccggccaacaccaaccccgagggggtggcccggcgctacgggggcgagttcacggaggacgcagcggagagggccctcctctccgagaggctcttccagaacctctttccccggctttccgagaagctcctctggctctaccaggaggtggagcggcccctctcccgggtcttggcccacatggaggcccggggggtgaggctggacgtcccccttctggaggccctctcctttgagctggagaaggagatggagcgcctggagggggaggtcttccgcttggccggccaccccttcaacctcaactcccgcgaccagctggaaagggtcctctttgacgagctgggccttaccccggtgggtcggacggagaagacgggcaagcgctccaccgcccagggggccctggaggccctccggggggcccaccccatcgtggagctcatcctccagtaccgggagctttccaagctcaaaagcacctacctggaccccctgccccggctcgtccacccgcggacgggccggcttcacacccgcttcaaccagacggccacggccacgggaaggctttccagctccgaccccaacctgcagaacatccccgtgcgcacccccttggggcagcgcatccgcaaggccttcgtggccgaggaggggtggctccttttggcggcggactactcccagatcgagcttcgggtcctggcccacctctcgggggacgagaacctgaagcgggtcttccgggaggggaaggacatccataccgaaaccgccgcctggatgttcggcttagaccccgctctagtggatccaaagatgcgccgggcggccaagacggtcaacttcggcgtcctctacgggatgtccgcccacaggctctcccaggagctcggcatagactacaaggaggcggaggcctttattgagcgctacttccagagcttccccaaggtgcgggcctggatagaaaggaccctggaggagggccggacgcggggctacgtggagaccctgttcggcaggaggcgctatgtgcccgacctggcctcccgggtccgctcggtgcctgaggcggcggagcggatggccttcaacatgcccgtgcagggcaccgccgccgacctgatgaagatcgccatggtcaagctcttccccaggctaaagcccctgggggcccacctcctcctccaggtgcacgacgagctggtcctggaggtgcccgaggaccgggccgaggaggccaaggccctggtcaaggaggtcatggagaacacctaccccttggacgtgcccctcgaggtggaggtgggcgtgggtcgggactggctggaggcgaagggggattgaagcggtcgac

SEQ ID NO: 2989 - DNA, 2605 bp, Artificial Sequence
  Description of Artificial Sequence: Synthetic DNA sequence of Thermus Rt41A DNA Polymerase R772M
atgaaatacctgctgccgaccgctgctgctggtctgctgctcctcgctgcccagccggcgatggccatggatatcggaattaattcggatccgaattccccactttttgacctggaggaaccccccaagcgggtgcttctggtggacggccaccacctggcctaccgcaccttctacgccctgagcctcaccacctcccggggggagccggtgcagatggtctacggcttcgcccggagcctcctcaaggccttgaaggaggacgggcaggcggtggtcgtggtctttgacgccaaggccccctccttccgccacgaggcctacgaggcctacaaggcgggccgggcccccaccccggaggacttcccccgccagctcgccttggtcaagcggctggtggaccttctgggcctggtccgcctcgaggccccgggttacgaggcggacgacgtcctgggcaccctggccaagaaggccgaaagggaggggatggaggtgcgcatcctcacgggagaccgggacttcttccagctcctctccgagaaggtctcggtcctcctgccggacgggaccctggtcaccccaaaggacgtccaggagaagtacggggtgccgccggagcgctgggtggacttccgcgccctcacgggggaccgctcggacaacatccccggggtggcggggataggggagaagaccgcccttcgactcctcgcggagtgggggagcgtggagaacctcctgaagaacctggaccgggtgaagccggactcggtccggcgcaagatagaggcgcaccttgaggacctccgcctctccttggacctggcccgcatccgcaccgacctccccttggaggtggactttaaggccctgcgccgcaggacccccgacctggagggcctgagggcctttttggaggagctggagttcggaagcctccttcatgagttcggcctcctgggaggggagaagccccgggaggaggccccctggcccccgcccgaaggggccttcgtaggcttcctcctctcccgcaaggagcccatgtgggcggagcttctggccctggcggccgccgcagagggccgggtccaccgggcaacaagcccggttgaggccctggccgacctcaaggaggcccgggggttcctggccaaggacctggccgttttggccctgcgggagggggtggccctggaccccacggacgaccccctcctggtggcctacctcctggacccggccaacaccaaccccgagggggtggcccggcgctacgggggcgagttcacggaggacgcagcggagagggccctcctctccgagaggctcttccagaacctctttccccggctttccgagaagctcctctggctctaccaggaggtggagcggcccctctcccgggtcttggcccacatggaggcccggggggtgaggctggacgtcccccttctggaggccctctcctttgagctggagaaggagatggagcgcctggagggggaggtcttccgcttggccggccaccccttcaacctcaactcccgcgaccagctggaaagggtcctctttgacgagctgggccttaccccggtgggtcggacggagaagacgggcaagcgctccaccgcccagggggccctggaggccctccggggggcccaccccatcgtggagctcatcctccagtaccgggagctttccaagctcaaaagcacctacctggaccccctgccccggctcgtccacccgcggacgggccggcttcacacccgcttcaaccagacggccacggccacgggaaggctttccagctccgaccccaacctgcagaacatccccgtgcgcacccccttggggcagcgcatccgcaaggccttcgtggccgaggaggggtggctccttttggcggcggactactcccagatcgagcttcgggtcctggcccacctctcgggggacgagaacctgaagcgggtcttccgggaggggaaggacatccataccgaaaccgccgcctggatgttcggcttagaccccgctctagtggatccaaagatgcgccgggcggccaagacggtcaacttcggcgtcctctacgggatgtccgcccacaggctctcccaggagctcggcatagactacaaggaggcggaggcctttattgagcgctacttccagagcttccccaaggtgcgggcctggatagaaaggaccctggaggagggccggacgcggggctacgtggagaccctgttcggcaggaggcgctatgtgcccgacctggcctcccgggtccgctcggtgatggaggcggcggagcggatggccttcaacatgcccgtgcagggcaccgccgccgacctgatgaagatcgccatggtcaagctcttccccaggctaaagcccctgggggcccacctcctcctccaggtgcacgacgagctggtcctggaggtgcccgaggaccgggccgaggaggccaaggccctggtcaaggaggtcatggagaacacctaccccttggacgtgcccctcgaggtggaggtgggcgtgggtcgggactggctggaggcgaagggggattgaagcggtcgac

SEQ ID NO: 2990 - DNA, 2605 bp, Artificial Sequence
  Description of Artificial Sequence: Synthetic DNA sequence of Thermus Rt41A DNA Polymerase R772T
atgaaatacctgctgccgaccgctgctgctggtctgctgctcctcgctgcccagccggcgatggccatggatatcggaattaattcggatccgaattccccactttttgacctggaggaaccccccaagcgggtgcttctggtggacggccaccacctggcctaccgcaccttctacgccctgagcctcaccacctcccggggggagccggtgcagatggtctacggcttcgcccggagcctcctcaaggccttgaaggaggacgggcaggcggtggtcgtggtctttgacgccaaggccccctccttccgccacgaggcctacgaggcctacaaggcgggccgggcccccaccccggaggacttcccccgccagctcgccttggtcaagcggctggtggaccttctgggcctggtccgcctcgaggccccgggttacgaggcggacgacgtcctgggcaccctggccaagaaggccgaaagggaggggatggaggtgcgcatcctcacgggagaccgggacttcttccagctcctctccgagaaggtctcggtcctcctgccggacgggaccctggtcaccccaaaggacgtccaggagaagtacggggtgccgccggagcgctgggtggacttccgcgccctcacgggggaccgctcggacaacatccccggggtggcggggataggggagaagaccgcccttcgactcctcgcggagtgggggagcgtggagaacctcctgaagaacctggaccgggtgaagccggactcggtccggcgcaagatagaggcgcaccttgaggacctccgcctctccttggacctggcccgcatccgcaccgacctccccttggaggtggactttaaggccctgcgccgcaggacccccgacctggagggcctgagggcctttttggaggagctggagttcggaagcctccttcatgagttcggcctcctgggaggggagaagccccgggaggaggccccctggcccccgcccgaaggggccttcgtaggcttcctcctctcccgcaaggagcccatgtgggcggagcttctggccctggcggccgccgcagagggccgggtccaccgggcaacaagcccggttgaggccctggccgacctcaaggaggcccgggggttcctggccaaggacctggccgttttggccctgcgggagggggtggccctggaccccacggacgaccccctcctggtggcctacctcctggacccggccaacaccaaccccgagggggtggcccggcgctacgggggcgagttcacggaggacgcagcggagagggccctcctctccgagaggctcttccagaacctctttccccggctttccgagaagctcctctggctctaccaggaggtggagcggcccctctcccgggtcttggcccacatggaggcccggggggtgaggctggacgtcccccttctggaggccctctcctttgagctggagaaggagatggagcgcctggagggggaggtcttccgcttggccggccaccccttcaacctcaactcccgcgaccagctggaaagggtcctctttgacgagctgggccttaccccggtgggtcggacggagaagacgggcaagcgctccaccgcccagggggccctggaggccctccggggggcccaccccatcgtggagctcatcctccagtaccgggagctttccaagctcaaaagcacctacctggaccccctgccccggctcgtccacccgcggacgggccggcttcacacccgcttcaaccagacggccacggccacgggaaggctttccagctccgaccccaacctgcagaacatccccgtgcgcacccccttggggcagcgcatccgcaaggccttcgtggccgaggaggggtggctccttttggcggcggactactcccagatcgagcttcgggtcctggcccacctctcgggggacgagaacctgaagcgggtcttccgggaggggaaggacatccataccgaaaccgccgcctggatgttcggcttagaccccgctctagtggatccaaagatgcgccgggcggccaagacggtcaacttcggcgtcctctacgggatgtccgcccacaggctctcccaggagctcggcatagactacaaggaggcggaggcctttattgagcgctacttccagagcttccccaaggtgcgggcctggatagaaaggaccctggaggagggccggacgcggggctacgtggagaccctgttcggcaggaggcgctatgtgcccgacctggcctcccgggtccgctcggtgactgaggcggcggagcggatggccttcaacatgcccgtgcagggcaccgccgccgacctgatgaagatcgccatggtcaagctcttccccaggctaaagcccctgggggcccacctcctcctccaggtgcacgacgagctggtcctggaggtgcccgaggaccgggccgaggaggccaaggccctggtcaaggaggtcatggagaacacctaccccttggacgtgcccctcgaggtggaggtgggcgtgggtcgggactggctggaggcgaagggggattgaagcggtcgac

SEQ ID NO: 2991 - DNA, 2605 bp, Artificial Sequence
  Description of Artificial Sequence: Synthetic DNA sequence of Thermus Rt41A DNA Polymerase R772N
atgaaatacctgctgccgaccgctgctgctggtctgctgctcctcgctgcccagccggcgatggccatggatatcggaattaattcggatccgaattccccactttttgacctggaggaaccccccaagcgggtgcttctggtggacggccaccacctggcctaccgcaccttctacgccctgagcctcaccacctcccggggggagccggtgcagatggtctacggcttcgcccggagcctcctcaaggccttgaaggaggacgggcaggcggtggtcgtggtctttgacgccaaggccccctccttccgccacgaggcctacgaggcctacaaggcgggccgggcccccaccccggaggacttcccccgccagctcgccttggtcaagcggctggtggaccttctgggcctggtccgcctcgaggccccgggttacgaggcggacgacgtcctgggcaccctggccaagaaggccgaaagggaggggatggaggtgcgcatcctcacgggagaccgggacttcttccagctcctctccgagaaggtctcggtcctcctgccggacgggaccctggtcaccccaaaggacgtccaggagaagtacggggtgccgccggagcgctgggtggacttccgcgccctcacgggggaccgctcggacaacatccccggggtggcggggataggggagaagaccgcccttcgactcctcgcggagtgggggagcgtggagaacctcctgaagaacctggaccgggtgaagccggactcggtccggcgcaagatagaggcgcaccttgaggacctccgcctctccttggacctggcccgcatccgcaccgacctccccttggaggtggactttaaggccctgcgccgcaggacccccgacctggagggcctgagggcctttttggaggagctggagttcggaagcctccttcatgagttcggcctcctgggaggggagaagccccgggaggaggccccctggcccccgcccgaaggggccttcgtaggcttcctcctctcccgcaaggagcccatgtgggcggagcttctggccctggcggccgccgcagagggccgggtccaccgggcaacaagcccggttgaggccctggccgacctcaaggaggcccgggggttcctggccaaggacctggccgttttggccctgcgggagggggtggccctggaccccacggacgaccccctcctggtggcctacctcctggacccggccaacaccaaccccgagggggtggcccggcgctacgggggcgagttcacggaggacgcagcggagagggccctcctctccgagaggctcttccagaacctctttccccggctttccgagaagctcctctggctctaccaggaggtggagcggcccctctcccgggtcttggcccacatggaggcccggggggtgaggctggacgtcccccttctggaggccctctcctttgagctggagaaggagatggagcgcctggagggggaggtcttccgcttggccggccaccccttcaacctcaactcccgcgaccagctggaaagggtcctctttgacgagctgggccttaccccggtgggtcggacggagaagacgggcaagcgctccaccgcccagggggccctggaggccctccggggggcccaccccatcgtggagctcatcctccagtaccgggagctttccaagctcaaaagcacctacctggaccccctgccccggctcgtccacccgcggacgggccggcttcacacccgcttcaaccagacggccacggccacgggaaggctttccagctccgaccccaacctgcagaacatccccgtgcgcacccccttggggcagcgcatccgcaaggccttcgtggccgaggaggggtggctccttttggcggcggactactcccagatcgagcttcgggtcctggcccacctctcgggggacgagaacctgaagcgggtcttccgggaggggaaggacatccataccgaaaccgccgcctggatgttcggcttagaccccgctctagtggatccaaagatgcgccgggcggccaagacggtcaacttcggcgtcctctacgggatgtccgcccacaggctctcccaggagctcggcatagactacaaggaggcggaggcctttattgagcgctacttccagagcttccccaaggtgcgggcctggatagaaaggaccctggaggagggccggacgcggggctacgtggagaccctgttcggcaggaggcgctatgtgcccgacctggcctcccgggtccgctcggtgaatgaggcggcggagcggatggccttcaacatgcccgtgcagggcaccgccgccgacctgatgaagatcgccatggtcaagctcttccccaggctaaagcccctgggggcccacctcctcctccaggtgcacgacgagctggtcctggaggtgcccgaggaccgggccgaggaggccaaggccctggtcaaggaggtcatggagaacacctaccccttggacgtgcccctcgaggtggaggtgggcgtgggtcgggactggctggaggcgaagggggattgaagcggtcgac

SEQ ID NO: 2992 - DNA, 2605 bp, Artificial Sequence
  Description of Artificial Sequence: Synthetic DNA sequence of Thermus Rt41A DNA Polymerase R772V
atgaaatacctgctgccgaccgctgctgctggtctgctgctcctcgctgcccagccggcgatggccatggatatcggaattaattcggatccgaattccccactttttgacctggaggaaccccccaagcgggtgcttctggtggacggccaccacctggcctaccgcaccttctacgccctgagcctcaccacctcccggggggagccggtgcagatggtctacggcttcgcccggagcctcctcaaggccttgaaggaggacgggcaggcggtggtcgtggtctttgacgccaaggccccctccttccgccacgaggcctacgaggcctacaaggcgggccgggcccccaccccggaggacttcccccgccagctcgccttggtcaagcggctggtggaccttctgggcctggtccgcctcgaggccccgggttacgaggcggacgacgtcctgggcaccctggccaagaaggccgaaagggaggggatggaggtgcgcatcctcacgggagaccgggacttcttccagctcctctccgagaaggtctcggtcctcctgccggacgggaccctggtcaccccaaaggacgtccaggagaagtacggggtgccgccggagcgctgggtggacttccgcgccctcacgggggaccgctcggacaacatccccggggtggcggggataggggagaagaccgcccttcgactcctcgcggagtgggggagcgtggagaacctcctgaagaacctggaccgggtgaagccggactcggtccggcgcaagatagaggcgcaccttgaggacctccgcctctccttggacctggcccgcatccgcaccgacctccccttggaggtggactttaaggccctgcgccgcaggacccccgacctggagggcctgagggcctttttggaggagctggagttcggaagcctccttcatgagttcggcctcctgggaggggagaagccccgggaggaggccccctggcccccgcccgaaggggccttcgtaggcttcctcctctcccgcaaggagcccatgtgggcggagcttctggccctggcggccgccgcagagggccgggtccaccgggcaacaagcccggttgaggccctggccgacctcaaggaggcccgggggttcctggccaaggacctggccgttttggccctgcgggagggggtggccctggaccccacggacgaccccctcctggtggcctacctcctggacccggccaacaccaaccccgagggggtggcccggcgctacgggggcgagttcacggaggacgcagcggagagggccctcctctccgagaggctcttccagaacctctttccccggctttccgagaagctcctctggctctaccaggaggtggagcggcccctctcccgggtcttggcccacatggaggcccggggggtgaggctggacgtcccccttctggaggccctctcctttgagctggagaaggagatggagcgcctggagggggaggtcttccgcttggccggccaccccttcaacctcaactcccgcgaccagctggaaagggtcctctttgacgagctgggccttaccccggtgggtcggacggagaagacgggcaagcgctccaccgcccagggggccctggaggccctccggggggcccaccccatcgtggagctcatcctccagtaccgggagctttccaagctcaaaagcacctacctggaccccctgccccggctcgtccacccgcggacgggccggcttcacacccgcttcaaccagacggccacggccacgggaaggctttccagctccgaccccaacctgcagaacatccccgtgcgcacccccttggggcagcgcatccgcaaggccttcgtggccgaggaggggtggctccttttggcggcggactactcccagatcgagcttcgggtcctggcccacctctcgggggacgagaacctgaagcgggtcttccgggaggggaaggacatccataccgaaaccgccgcctggatgttcggcttagaccccgctctagtggatccaaagatgcgccgggcggccaagacggtcaacttcggcgtcctctacgggatgtccgcccacaggctctcccaggagctcggcatagactacaaggaggcggaggcctttattgagcgctacttccagagcttccccaaggtgcgggcctggatagaaaggaccctggaggagggccggacgcggggctacgtggagaccctgttcggcaggaggcgctatgtgcccgacctggcctcccgggtccgctcggtggtcgaggcggcggagcggatggccttcaacatgcccgtgcagggcaccgccgccgacctgatgaagatcgccatggtcaagctcttccccaggctaaagcccctgggggcccacctcctcctccaggtgcacgacgagctggtcctggaggtgcccgaggaccgggccgaggaggccaaggccctggtcaaggaggtcatggagaacacctaccccttggacgtgcccctcgaggtggaggtgggcgtgggtcgggactggctggaggcgaagggggattgaagcggtcgac

SEQ ID NO: 2993 - DNA, 2605 bp, Artificial Sequence
  Description of Artificial Sequence: Synthetic DNA sequence of Thermus Rt41A DNA Polymerase E773A
atgaaatacctgctgccgaccgctgctgctggtctgctgctcctcgctgcccagccggcgatggccatggatatcggaattaattcggatccgaattccccactttttgacctggaggaaccccccaagcgggtgcttctggtggacggccaccacctggcctaccgcaccttctacgccctgagcctcaccacctcccggggggagccggtgcagatggtctacggcttcgcccggagcctcctcaaggccttgaaggaggacgggcaggcggtggtcgtggtctttgacgccaaggccccctccttccgccacgaggcctacgaggcctacaaggcgggccgggcccccaccccggaggacttcccccgccagctcgccttggtcaagcggctggtggaccttctgggcctggtccgcctcgaggccccgggttacgaggcggacgacgtcctgggcaccctggccaagaaggccgaaagggaggggatggaggtgcgcatcctcacgggagaccgggacttcttccagctcctctccgagaaggtctcggtcctcctgccggacgggaccctggtcaccccaaaggacgtccaggagaagtacggggtgccgccggagcgctgggtggacttccgcgccctcacgggggaccgctcggacaacatccccggggtggcggggataggggagaagaccgcccttcgactcctcgcggagtgggggagcgtggagaacctcctgaagaacctggaccgggtgaagccggactcggtccggcgcaagatagaggcgcaccttgaggacctccgcctctccttggacctggcccgcatccgcaccgacctccccttggaggtggactttaaggccctgcgccgcaggacccccgacctggagggcctgagggcctttttggaggagctggagttcggaagcctccttcatgagttcggcctcctgggaggggagaagccccgggaggaggccccctggcccccgcccgaaggggccttcgtaggcttcctcctctcccgcaaggagcccatgtgggcggagcttctggccctggcggccgccgcagagggccgggtccaccgggcaacaagcccggttgaggccctggccgacctcaaggaggcccgggggttcctggccaaggacctggccgttttggccctgcgggagggggtggccctggaccccacggacgaccccctcctggtggcctacctcctggacccggccaacaccaaccccgagggggtggcccggcgctacgggggcgagttcacggaggacgcagcggagagggccctcctctccgagaggctcttccagaacctctttccccggctttccgagaagctcctctggctctaccaggaggtggagcggcccctctcccgggtcttggcccacatggaggcccggggggtgaggctggacgtcccccttctggaggccctctcctttgagctggagaaggagatggagcgcctggagggggaggtcttccgcttggccggccaccccttcaacctcaactcccgcgaccagctggaaagggtcctctttgacgagctgggccttaccccggtgggtcggacggagaagacgggcaagcgctccaccgcccagggggccctggaggccctccggggggcccaccccatcgtggagctcatcctccagtaccgggagctttccaagctcaaaagcacctacctggaccccctgccccggctcgtccacccgcggacgggccggcttcacacccgcttcaaccagacggccacggccacgggaaggctttccagctccgaccccaacctgcagaacatccccgtgcgcacccccttggggcagcgcatccgcaaggccttcgtggccgaggaggggtggctccttttggcggcggactactcccagatcgagcttcgggtcctggcccacctctcgggggacgagaacctgaagcgggtcttccgggaggggaaggacatccataccgaaaccgccgcctggatgttcggcttagaccccgctctagtggatccaaagatgcgccgggcggccaagacggtcaacttcggcgtcctctacgggatgtccgcccacaggctctcccaggagctcggcatagactacaaggaggcggaggcctttattgagcgctacttccagagcttccccaaggtgcgggcctggatagaaaggaccctggaggagggccggacgcggggctacgtggagaccctgttcggcaggaggcgctatgtgcccgacctggcctcccgggtccgctcggtgcgggctgcggcggagcggatggccttcaacatgcccgtgcagggcaccgccgccgacctgatgaagatcgccatggtcaagctcttccccaggctaaagcccctgggggcccacctcctcctccaggtgcacgacgagctggtcctggaggtgcccgaggaccgggccgaggaggccaaggccctggtcaaggaggtcatggagaacacctaccccttggacgtgcccctcgaggtggaggtgggcgtgggtcgggactggctggaggcgaagggggattgaagcggtcgac

SEQ ID NO: 2994 - DNA, 2605 bp, Artificial Sequence
  Description of Artificial Sequence: Synthetic DNA sequence of Thermus Rt41A DNA Polymerase E773R
atgaaatacctgctgccgaccgctgctgctggtctgctgctcctcgctgcccagccggcgatggccatggatatcggaattaattcggatccgaattccccactttttgacctggaggaaccccccaagcgggtgcttctggtggacggccaccacctggcctaccgcaccttctacgccctgagcctcaccacctcccggggggagccggtgcagatggtctacggcttcgcccggagcctcctcaaggccttgaaggaggacgggcaggcggtggtcgtggtctttgacgccaaggccccctccttccgccacgaggcctacgaggcctacaaggcgggccgggcccccaccccggaggacttcccccgccagctcgccttggtcaagcggctggtggaccttctgggcctggtccgcctcgaggccccgggttacgaggcggacgacgtcctgggcaccctggccaagaaggccgaaagggaggggatggaggtgcgcatcctcacgggagaccgggacttcttccagctcctctccgagaaggtctcggtcctcctgccggacgggaccctggtcaccccaaaggacgtccaggagaagtacggggtgccgccggagcgctgggtggacttccgcgccctcacgggggaccgctcggacaacatccccggggtggcggggataggggagaagaccgcccttcgactcctcgcggagtgggggagcgtggagaacctcctgaagaacctggaccgggtgaagccggactcggtccggcgcaagatagaggcgcaccttgaggacctccgcctctccttggacctggcccgcatccgcaccgacctccccttggaggtggactttaaggccctgcgccgcaggacccccgacctggagggcctgagggcctttttggaggagctggagttcggaagcctccttcatgagttcggcctcctgggaggggagaagccccgggaggaggccccctggcccccgcccgaaggggccttcgtaggcttcctcctctcccgcaaggagcccatgtgggcggagcttctggccctggcggccgccgcagagggccgggtccaccgggcaacaagcccggttgaggccctggccgacctcaaggaggcccgggggttcctggccaaggacctggccgttttggccctgcgggagggggtggccctggaccccacggacgaccccctcctggtggcctacctcctggacccggccaacaccaaccccgagggggtggcccggcgctacgggggcgagttcacggaggacgcagcggagagggccctcctctccgagaggctcttccagaacctctttccccggctttccgagaagctcctctggctctaccaggaggtggagcggcccctctcccgggtcttggcccacatggaggcccggggggtgaggctggacgtcccccttctggaggccctctcctttgagctggagaaggagatggagcgcctggagggggaggtcttccgcttggccggccaccccttcaacctcaactcccgcgaccagctggaaagggtcctctttgacgagctgggccttaccccggtgggtcggacggagaagacgggcaagcgctccaccgcccagggggccctggaggccctccggggggcccaccccatcgtggagctcatcctccagtaccgggagctttccaagctcaaaagcacctacctggaccccctgccccggctcgtccacccgcggacgggccggcttcacacccgcttcaaccagacggccacggccacgggaaggctttccagctccgaccccaacctgcagaacatccccgtgcgcacccccttggggcagcgcatccgcaaggccttcgtggccgaggaggggtggctccttttggcggcggactactcccagatcgagcttcgggtcctggcccacctctcgggggacgagaacctgaagcgggtcttccgggaggggaaggacatccataccgaaaccgccgcctggatgttcggcttagaccccgctctagtggatccaaagatgcgccgggcggccaagacggtcaacttcggcgtcctctacgggatgtccgcccacaggctctcccaggagctcggcatagactacaaggaggcggaggcctttattgagcgctacttccagagcttccccaaggtgcgggcctggatagaaaggaccctggaggagggccggacgcggggctacgtggagaccctgttcggcaggaggcgctatgtgcccgacctggcctcccgggtccgctcggtgcggcgagcggcggagcggatggccttcaacatgcccgtgcagggcaccgccgccgacctgatgaagatcgccatggtcaagctcttccccaggctaaagcccctgggggcccacctcctcctccaggtgcacgacgagctggtcctggaggtgcccgaggaccgggccgaggaggccaaggccctggtcaaggaggtcatggagaacacctaccccttggacgtgcccctcgaggtggaggtgggcgtgggtcgggactggctggaggcgaagggggattgaagcggtcgac

SEQ ID NO: 2995 - DNA, 2605 bp, Artificial Sequence
  Description of Artificial Sequence: Synthetic DNA sequence of Thermus Rt41A DNA Polymerase E773C
atgaaatacctgctgccgaccgctgctgctggtctgctgctcctcgctgcccagccggcgatggccatggatatcggaattaattcggatccgaattccccactttttgacctggaggaaccccccaagcgggtgcttctggtggacggccaccacctggcctaccgcaccttctacgccctgagcctcaccacctcccggggggagccggtgcagatggtctacggcttcgcccggagcctcctcaaggccttgaaggaggacgggcaggcggtggtcgtggtctttgacgccaaggccccctccttccgccacgaggcctacgaggcctacaaggcgggccgggcccccaccccggaggacttcccccgccagctcgccttggtcaagcggctggtggaccttctgggcctggtccgcctcgaggccccgggttacgaggcggacgacgtcctgggcaccctggccaagaaggccgaaagggaggggatggaggtgcgcatcctcacgggagaccgggacttcttccagctcctctccgagaaggtctcggtcctcctgccggacgggaccctggtcaccccaaaggacgtccaggagaagtacggggtgccgccggagcgctgggtggacttccgcgccctcacgggggaccgctcggacaacatccccggggtggcggggataggggagaagaccgcccttcgactcctcgcggagtgggggagcgtggagaacctcctgaagaacctggaccgggtgaagccggactcggtccggcgcaagatagaggcgcaccttgaggacctccgcctctccttggacctggcccgcatccgcaccgacctccccttggaggtggactttaaggccctgcgccgcaggacccccgacctggagggcctgagggcctttttggaggagctggagttcggaagcctccttcatgagttcggcctcctgggaggggagaagccccgggaggaggccccctggcccccgcccgaaggggccttcgtaggcttcctcctctcccgcaaggagcccatgtgggcggagcttctggccctggcggccgccgcagagggccgggtccaccgggcaacaagcccggttgaggccctggccgacctcaaggaggcccgggggttcctggccaaggacctggccgttttggccctgcgggagggggtggccctggaccccacggacgaccccctcctggtggcctacctcctggacccggccaacaccaaccccgagggggtggcccggcgctacgggggcgagttcacggaggacgcagcggagagggccctcctctccgagaggctcttccagaacctctttccccggctttccgagaagctcctctggctctaccaggaggtggagcggcccctctcccgggtcttggcccacatggaggcccggggggtgaggctggacgtcccccttctggaggccctctcctttgagctggagaaggagatggagcgcctggagggggaggtcttccgcttggccggccaccccttcaacctcaactcccgcgaccagctggaaagggtcctctttgacgagctgggccttaccccggtgggtcggacggagaagacgggcaagcgctccaccgcccagggggccctggaggccctccggggggcccaccccatcgtggagctcatcctccagtaccgggagctttccaagctcaaaagcacctacctggaccccctgccccggctcgtccacccgcggacgggccggcttcacacccgcttcaaccagacggccacggccacgggaaggctttccagctccgaccccaacctgcagaacatccccgtgcgcacccccttggggcagcgcatccgcaaggccttcgtggccgaggaggggtggctccttttggcggcggactactcccagatcgagcttcgggtcctggcccacctctcgggggacgagaacctgaagcgggtcttccgggaggggaaggacatccataccgaaaccgccgcctggatgttcggcttagaccccgctctagtggatccaaagatgcgccgggcggccaagacggtcaacttcggcgtcctctacgggatgtccgcccacaggctctcccaggagctcggcatagactacaaggaggcggaggcctttattgagcgctacttccagagcttccccaaggtgcgggcctggatagaaaggaccctggaggagggccggacgcggggctacgtggagaccctgttcggcaggaggcgctatgtgcccgacctggcctcccgggtccgctcggtgcggtgtgcggcggagcggatggccttcaacatgcccgtgcagggcaccgccgccgacctgatgaagatcgccatggtcaagctcttccccaggctaaagcccctgggggcccacctcctcctccaggtgcacgacgagctggtcctggaggtgcccgaggaccgggccgaggaggccaaggccctggtcaaggaggtcatggagaacacctaccccttggacgtgcccctcgaggtggaggtgggcgtgggtcgggactggctggaggcgaagggggattgaagcggtcgac

SEQ ID NO: 2996 - DNA, 2605 bp, Artificial Sequence
  Description of Artificial Sequence: Synthetic DNA sequence of Thermus Rt41A DNA Polymerase E773G
atgaaatacctgctgccgaccgctgctgctggtctgctgctcctcgctgcccagccggcgatggccatggatatcggaattaattcggatccgaattccccactttttgacctggaggaaccccccaagcgggtgcttctggtggacggccaccacctggcctaccgcaccttctacgccctgagcctcaccacctcccggggggagccggtgcagatggtctacggcttcgcccggagcctcctcaaggccttgaaggaggacgggcaggcggtggtcgtggtctttgacgccaaggccccctccttccgccacgaggcctacgaggcctacaaggcgggccgggcccccaccccggaggacttcccccgccagctcgccttggtcaagcggctggtggaccttctgggcctggtccgcctcgaggccccgggttacgaggcggacgacgtcctgggcaccctggccaagaaggccgaaagggaggggatggaggtgcgcatcctcacgggagaccgggacttcttccagctcctctccgagaaggtctcggtcctcctgccggacgggaccctggtcaccccaaaggacgtccaggagaagtacggggtgccgccggagcgctgggtggacttccgcgccctcacgggggaccgctcggacaacatccccggggtggcggggataggggagaagaccgcccttcgactcctcgcggagtgggggagcgtggagaacctcctgaagaacctggaccgggtgaagccggactcggtccggcgcaagatagaggcgcaccttgaggacctccgcctctccttggacctggcccgcatccgcaccgacctccccttggaggtggactttaaggccctgcgccgcaggacccccgacctggagggcctgagggcctttttggaggagctggagttcggaagcctccttcatgagttcggcctcctgggaggggagaagccccgggaggaggccccctggcccccgcccgaaggggccttcgtaggcttcctcctctcccgcaaggagcccatgtgggcggagcttctggccctggcggccgccgcagagggccgggtccaccgggcaacaagcccggttgaggccctggccgacctcaaggaggcccgggggttcctggccaaggacctggccgttttggccctgcgggagggggtggccctggaccccacggacgaccccctcctggtggcctacctcctggacccggccaacaccaaccccgagggggtggcccggcgctacgggggcgagttcacggaggacgcagcggagagggccctcctctccgagaggctcttccagaacctctttccccggctttccgagaagctcctctggctctaccaggaggtggagcggcccctctcccgggtcttggcccacatggaggcccggggggtgaggctggacgtcccccttctggaggccctctcctttgagctggagaaggagatggagcgcctggagggggaggtcttccgcttggccggccaccccttcaacctcaactcccgcgaccagctggaaagggtcctctttgacgagctgggccttaccccggtgggtcggacggagaagacgggcaagcgctccaccgcccagggggccctggaggccctccggggggcccaccccatcgtggagctcatcctccagtaccgggagctttccaagctcaaaagcacctacctggaccccctgccccggctcgtccacccgcggacgggccggcttcacacccgcttcaaccagacggccacggccacgggaaggctttccagctccgaccccaacctgcagaacatccccgtgcgcacccccttggggcagcgcatccgcaaggccttcgtggccgaggaggggtggctccttttggcggcggactactcccagatcgagcttcgggtcctggcccacctctcgggggacgagaacctgaagcgggtcttccgggaggggaaggacatccataccgaaaccgccgcctggatgttcggcttagaccccgctctagtggatccaaagatgcgccgggcggccaagacggtcaacttcggcgtcctctacgggatgtccgcccacaggctctcccaggagctcggcatagactacaaggaggcggaggcctttattgagcgctacttccagagcttccccaaggtgcgggcctggatagaaaggaccctggaggagggccggacgcggggctacgtggagaccctgttcggcaggaggcgctatgtgcccgacctggcctcccgggtccgctcggtgcggggtgcggcggagcggatggccttcaacatgcccgtgcagggcaccgccgccgacctgatgaagatcgccatggtcaagctcttccccaggctaaagcccctgggggcccacctcctcctccaggtgcacgacgagctggtcctggaggtgcccgaggaccgggccgaggaggccaaggccctggtcaaggaggtcatggagaacacctaccccttggacgtgcccctcgaggtggaggtgggcgtgggtcgggactggctggaggcgaagggggattgaagcggtcgac

SEQ ID NO: 2997 - DNA, 2605 bp, Artificial Sequence
  Description of Artificial Sequence: Synthetic DNA sequence of Thermus Rt41A DNA Polymerase E773Q
atgaaatacctgctgccgaccgctgctgctggtctgctgctcctcgctgcccagccggcgatggccatggatatcggaattaattcggatccgaattccccactttttgacctggaggaaccccccaagcgggtgcttctggtggacggccaccacctggcctaccgcaccttctacgccctgagcctcaccacctcccggggggagccggtgcagatggtctacggcttcgcccggagcctcctcaaggccttgaaggaggacgggcaggcggtggtcgtggtctttgacgccaaggccccctccttccgccacgaggcctacgaggcctacaaggcgggccgggcccccaccccggaggacttcccccgccagctcgccttggtcaagcggctggtggaccttctgggcctggtccgcctcgaggccccgggttacgaggcggacgacgtcctgggcaccctggccaagaaggccgaaagggaggggatggaggtgcgcatcctcacgggagaccgggacttcttccagctcctctccgagaaggtctcggtcctcctgccggacgggaccctggtcaccccaaaggacgtccaggagaagtacggggtgccgccggagcgctgggtggacttccgcgccctcacgggggaccgctcggacaacatccccggggtggcggggataggggagaagaccgcccttcgactcctcgcggagtgggggagcgtggagaacctcctgaagaacctggaccgggtgaagccggactcggtccggcgcaagatagaggcgcaccttgaggacctccgcctctccttggacctggcccgcatccgcaccgacctccccttggaggtggactttaaggccctgcgccgcaggacccccgacctggagggcctgagggcctttttggaggagctggagttcggaagcctccttcatgagttcggcctcctgggaggggagaagccccgggaggaggccccctggcccccgcccgaaggggccttcgtaggcttcctcctctcccgcaaggagcccatgtgggcggagcttctggccctggcggccgccgcagagggccgggtccaccgggcaacaagcccggttgaggccctggccgacctcaaggaggcccgggggttcctggccaaggacctggccgttttggccctgcgggagggggtggccctggaccccacggacgaccccctcctggtggcctacctcctggacccggccaacaccaaccccgagggggtggcccggcgctacgggggcgagttcacggaggacgcagcggagagggccctcctctccgagaggctcttccagaacctctttccccggctttccgagaagctcctctggctctaccaggaggtggagcggcccctctcccgggtcttggcccacatggaggcccggggggtgaggctggacgtcccccttctggaggccctctcctttgagctggagaaggagatggagcgcctggagggggaggtcttccgcttggccggccaccccttcaacctcaactcccgcgaccagctggaaagggtcctctttgacgagctgggccttaccccggtgggtcggacggagaagacgggcaagcgctccaccgcccagggggccctggaggccctccggggggcccaccccatcgtggagctcatcctccagtaccgggagctttccaagctcaaaagcacctacctggaccccctgccccggctcgtccacccgcggacgggccggcttcacacccgcttcaaccagacggccacggccacgggaaggctttccagctccgaccccaacctgcagaacatccccgtgcgcacccccttggggcagcgcatccgcaaggccttcgtggccgaggaggggtggctccttttggcggcggactactcccagatcgagcttcgggtcctggcccacctctcgggggacgagaacctgaagcgggtcttccgggaggggaaggacatccataccgaaaccgccgcctggatgttcggcttagaccccgctctagtggatccaaagatgcgccgggcggccaagacggtcaacttcggcgtcctctacgggatgtccgcccacaggctctcccaggagctcggcatagactacaaggaggcggaggcctttattgagcgctacttccagagcttccccaaggtgcgggcctggatagaaaggaccctggaggagggccggacgcggggctacgtggagaccctgttcggcaggaggcgctatgtgcccgacctggcctcccgggtccgctcggtgcggcaagcggcggagcggatggccttcaacatgcccgtgcagggcaccgccgccgacctgatgaagatcgccatggtcaagctcttccccaggctaaagcccctgggggcccacctcctcctccaggtgcacgacgagctggtcctggaggtgcccgaggaccgggccgaggaggccaaggccctggtcaaggaggtcatggagaacacctaccccttggacgtgcccctcgaggtggaggtgggcgtgggtcgggactggctggaggcgaagggggattgaagcggtcgac

SEQ ID NO: 2998 - DNA, 2605 bp, Artificial Sequence
  Description of Artificial Sequence: Synthetic DNA sequence of Thermus Rt41A DNA Polymerase E773H
atgaaatacctgctgccgaccgctgctgctggtctgctgctcctcgctgcccagccggcgatggccatggatatcggaattaattcggatccgaattccccactttttgacctggaggaaccccccaagcgggtgcttctggtggacggccaccacctggcctaccgcaccttctacgccctgagcctcaccacctcccggggggagccggtgcagatggtctacggcttcgcccggagcctcctcaaggccttgaaggaggacgggcaggcggtggtcgtggtctttgacgccaaggccccctccttccgccacgaggcctacgaggcctacaaggcgggccgggcccccaccccggaggacttcccccgccagctcgccttggtcaagcggctggtggaccttctgggcctggtccgcctcgaggccccgggttacgaggcggacgacgtcctgggcaccctggccaagaaggccgaaagggaggggatggaggtgcgcatcctcacgggagaccgggacttcttccagctcctctccgagaaggtctcggtcctcctgccggacgggaccctggtcaccccaaaggacgtccaggagaagtacggggtgccgccggagcgctgggtggacttccgcgccctcacgggggaccgctcggacaacatccccggggtggcggggataggggagaagaccgcccttcgactcctcgcggagtgggggagcgtggagaacctcctgaagaacctggaccgggtgaagccggactcggtccggcgcaagatagaggcgcaccttgaggacctccgcctctccttggacctggcccgcatccgcaccgacctccccttggaggtggactttaaggccctgcgccgcaggacccccgacctggagggcctgagggcctttttggaggagctggagttcggaagcctccttcatgagttcggcctcctgggaggggagaagccccgggaggaggccccctggcccccgcccgaaggggccttcgtaggcttcctcctctcccgcaaggagcccatgtgggcggagcttctggccctggcggccgccgcagagggccgggtccaccgggcaacaagcccggttgaggccctggccgacctcaaggaggcccgggggttcctggccaaggacctggccgttttggccctgcgggagggggtggccctggaccccacggacgaccccctcctggtggcctacctcctggacccggccaacaccaaccccgagggggtggcccggcgctacgggggcgagttcacggaggacgcagcggagagggccctcctctccgagaggctcttccagaacctctttccccggctttccgagaagctcctctggctctaccaggaggtggagcggcccctctcccgggtcttggcccacatggaggcccggggggtgaggctggacgtcccccttctggaggccctctcctttgagctggagaaggagatggagcgcctggagggggaggtcttccgcttggccggccaccccttcaacctcaactcccgcgaccagctggaaagggtcctctttgacgagctgggccttaccccggtgggtcggacggagaagacgggcaagcgctccaccgcccagggggccctggaggccctccggggggcccaccccatcgtggagctcatcctccagtaccgggagctttccaagctcaaaagcacctacctggaccccctgccccggctcgtccacccgcggacgggccggcttcacacccgcttcaaccagacggccacggccacgggaaggctttccagctccgaccccaacctgcagaacatccccgtgcgcacccccttggggcagcgcatccgcaaggccttcgtggccgaggaggggtggctccttttggcggcggactactcccagatcgagcttcgggtcctggcccacctctcgggggacgagaacctgaagcgggtcttccgggaggggaaggacatccataccgaaaccgccgcctggatgttcggcttagaccccgctctagtggatccaaagatgcgccgggcggccaagacggtcaacttcggcgtcctctacgggatgtccgcccacaggctctcccaggagctcggcatagactacaaggaggcggaggcctttattgagcgctacttccagagcttccccaaggtgcgggcctggatagaaaggaccctggaggagggccggacgcggggctacgtggagaccctgttcggcaggaggcgctatgtgcccgacctggcctcccgggtccgctcggtgcggcatgcggcggagcggatggccttcaacatgcccgtgcagggcaccgccgccgacctgatgaagatcgccatggtcaagctcttccccaggctaaagcccctgggggcccacctcctcctccaggtgcacgacgagctggtcctggaggtgcccgaggaccgggccgaggaggccaaggccctggtcaaggaggtcatggagaacacctaccccttggacgtgcccctcgaggtggaggtgggcgtgggtcgggactggctggaggcgaagggggattgaagcggtcgac

SEQ ID NO: 2999 - DNA, 2605 bp, Artificial Sequence
  Description of Artificial Sequence: Synthetic DNA sequence of Thermus Rt41A DNA Polymerase E773I
atgaaatacctgctgccgaccgctgctgctggtctgctgctcctcgctgcccagccggcgatggccatggatatcggaattaattcggatccgaattccccactttttgacctggaggaaccccccaagcgggtgcttctggtggacggccaccacctggcctaccgcaccttctacgccctgagcctcaccacctcccggggggagccggtgcagatggtctacggcttcgcccggagcctcctcaaggccttgaaggaggacgggcaggcggtggtcgtggtctttgacgccaaggccccctccttccgccacgaggcctacgaggcctacaaggcgggccgggcccccaccccggaggacttcccccgccagctcgccttggtcaagcggctggtggaccttctgggcctggtccgcctcgaggccccgggttacgaggcggacgacgtcctgggcaccctggccaagaaggccgaaagggaggggatggaggtgcgcatcctcacgggagaccgggacttcttccagctcctctccgagaaggtctcggtcctcctgccggacgggaccctggtcaccccaaaggacgtccaggagaagtacggggtgccgccggagcgctgggtggacttccgcgccctcacgggggaccgctcggacaacatccccggggtggcggggataggggagaagaccgcccttcgactcctcgcggagtgggggagcgtggagaacctcctgaagaacctggaccgggtgaagccggactcggtccggcgcaagatagaggcgcaccttgaggacctccgcctctccttggacctggcccgcatccgcaccgacctccccttggaggtggactttaaggccctgcgccgcaggacccccgacctggagggcctgagggcctttttggaggagctggagttcggaagcctccttcatgagttcggcctcctgggaggggagaagccccgggaggaggccccctggcccccgcccgaaggggccttcgtaggcttcctcctctcccgcaaggagcccatgtgggcggagcttctggccctggcggccgccgcagagggccgggtccaccgggcaacaagcccggttgaggccctggccgacctcaaggaggcccgggggttcctggccaaggacctggccgttttggccctgcgggagggggtggccctggaccccacggacgaccccctcctggtggcctacctcctggacccggccaacaccaaccccgagggggtggcccggcgctacgggggcgagttcacggaggacgcagcggagagggccctcctctccgagaggctcttccagaacctctttccccggctttccgagaagctcctctggctctaccaggaggtggagcggcccctctcccgggtcttggcccacatggaggcccggggggtgaggctggacgtcccccttctggaggccctctcctttgagctggagaaggagatggagcgcctggagggggaggtcttccgcttggccggccaccccttcaacctcaactcccgcgaccagctggaaagggtcctctttgacgagctgggccttaccccggtgggtcggacggagaagacgggcaagcgctccaccgcccagggggccctggaggccctccggggggcccaccccatcgtggagctcatcctccagtaccgggagctttccaagctcaaaagcacctacctggaccccctgccccggctcgtccacccgcggacgggccggcttcacacccgcttcaaccagacggccacggccacgggaaggctttccagctccgaccccaacctgcagaacatccccgtgcgcacccccttggggcagcgcatccgcaaggccttcgtggccgaggaggggtggctccttttggcggcggactactcccagatcgagcttcgggtcctggcccacctctcgggggacgagaacctgaagcgggtcttccgggaggggaaggacatccataccgaaaccgccgcctggatgttcggcttagaccccgctctagtggatccaaagatgcgccgggcggccaagacggtcaacttcggcgtcctctacgggatgtccgcccacaggctctcccaggagctcggcatagactacaaggaggcggaggcctttattgagcgctacttccagagcttccccaaggtgcgggcctggatagaaaggaccctggaggagggccggacgcggggctacgtggagaccctgttcggcaggaggcgctatgtgcccgacctggcctcccgggtccgctcggtgcggattgcggcggagcggatggccttcaacatgcccgtgcagggcaccgccgccgacctgatgaagatcgccatggtcaagctcttccccaggctaaagcccctgggggcccacctcctcctccaggtgcacgacgagctggtcctggaggtgcccgaggaccgggccgaggaggccaaggccctggtcaaggaggtcatggagaacacctaccccttggacgtgcccctcgaggtggaggtgggcgtgggtcgggactggctggaggcgaagggggattgaagcggtcgac

SEQ ID NO: 3000 - DNA, 2605 bp, Artificial Sequence
  Description of Artificial Sequence: Synthetic DNA sequence of Thermus Rt41A DNA Polymerase E773L
atgaaatacctgctgccgaccgctgctgctggtctgctgctcctcgctgcccagccggcgatggccatggatatcggaattaattcggatccgaattccccactttttgacctggaggaaccccccaagcgggtgcttctggtggacggccaccacctggcctaccgcaccttctacgccctgagcctcaccacctcccggggggagccggtgcagatggtctacggcttcgcccggagcctcctcaaggccttgaaggaggacgggcaggcggtggtcgtggtctttgacgccaaggccccctccttccgccacgaggcctacgaggcctacaaggcgggccgggcccccaccccggaggacttcccccgccagctcgccttggtcaagcggctggtggaccttctgggcctggtccgcctcgaggccccgggttacgaggcggacgacgtcctgggcaccctggccaagaaggccgaaagggaggggatggaggtgcgcatcctcacgggagaccgggacttcttccagctcctctccgagaaggtctcggtcctcctgccggacgggaccctggtcaccccaaaggacgtccaggagaagtacggggtgccgccggagcgctgggtggacttccgcgccctcacgggggaccgctcggacaacatccccggggtggcggggataggggagaagaccgcccttcgactcctcgcggagtgggggagcgtggagaacctcctgaagaacctggaccgggtgaagccggactcggtccggcgcaagatagaggcgcaccttgaggacctccgcctctccttggacctggcccgcatccgcaccgacctccccttggaggtggactttaaggccctgcgccgcaggacccccgacctggagggcctgagggcctttttggaggagctggagttcggaagcctccttcatgagttcggcctcctgggaggggagaagccccgggaggaggccccctggcccccgcccgaaggggccttcgtaggcttcctcctctcccgcaaggagcccatgtgggcggagcttctggccctggcggccgccgcagagggccgggtccaccgggcaacaagcccggttgaggccctggccgacctcaaggaggcccgggggttcctggccaaggacctggccgttttggccctgcgggagggggtggccctggaccccacggacgaccccctcctggtggcctacctcctggacccggccaacaccaaccccgagggggtggcccggcgctacgggggcgagttcacggaggacgcagcggagagggccctcctctccgagaggctcttccagaacctctttccccggctttccgagaagctcctctggctctaccaggaggtggagcggcccctctcccgggtcttggcccacatggaggcccggggggtgaggctggacgtcccccttctggaggccctctcctttgagctggagaaggagatggagcgcctggagggggaggtcttccgcttggccggccaccccttcaacctcaactcccgcgaccagctggaaagggtcctctttgacgagctgggccttaccccggtgggtcggacggagaagacgggcaagcgctccaccgcccagggggccctggaggccctccggggggcccaccccatcgtggagctcatcctccagtaccgggagctttccaagctcaaaagcacctacctggaccccctgccccggctcgtccacccgcggacgggccggcttcacacccgcttcaaccagacggccacggccacgggaaggctttccagctccgaccccaacctgcagaacatccccgtgcgcacccccttggggcagcgcatccgcaaggccttcgtggccgaggaggggtggctccttttggcggcggactactcccagatcgagcttcgggtcctggcccacctctcgggggacgagaacctgaagcgggtcttccgggaggggaaggacatccataccgaaaccgccgcctggatgttcggcttagaccccgctctagtggatccaaagatgcgccgggcggccaagacggtcaacttcggcgtcctctacgggatgtccgcccacaggctctcccaggagctcggcatagactacaaggaggcggaggcctttattgagcgctacttccagagcttccccaaggtgcgggcctggatagaaaggaccctggaggagggccggacgcggggctacgtggagaccctgttcggcaggaggcgctatgtgcccgacctggcctcccgggtccgctcggtgcggttagcggcggagcggatggccttcaacatgcccgtgcagggcaccgccgccgacctgatgaagatcgccatggtcaagctcttccccaggctaaagcccctgggggcccacctcctcctccaggtgcacgacgagctggtcctggaggtgcccgaggaccgggccgaggaggccaaggccctggtcaaggaggtcatggagaacacctaccccttggacgtgcccctcgaggtggaggtgggcgtgggtcgggactggctggaggcgaagggggattgaagcggtcgac

SEQ ID NO: 3001 - DNA, 2605 bp, Artificial Sequence
  Description of Artificial Sequence: Synthetic DNA sequence of Thermus Rt41A DNA Polymerase E773K
atgaaatacctgctgccgaccgctgctgctggtctgctgctcctcgctgcccagccggcgatggccatggatatcggaattaattcggatccgaattccccactttttgacctggaggaaccccccaagcgggtgcttctggtggacggccaccacctggcctaccgcaccttctacgccctgagcctcaccacctcccggggggagccggtgcagatggtctacggcttcgcccggagcctcctcaaggccttgaaggaggacgggcaggcggtggtcgtggtctttgacgccaaggccccctccttccgccacgaggcctacgaggcctacaaggcgggccgggcccccaccccggaggacttcccccgccagctcgccttggtcaagcggctggtggaccttctgggcctggtccgcctcgaggccccgggttacgaggcggacgacgtcctgggcaccctggccaagaaggccgaaagggaggggatggaggtgcgcatcctcacgggagaccgggacttcttccagctcctctccgagaaggtctcggtcctcctgccggacgggaccctggtcaccccaaaggacgtccaggagaagtacggggtgccgccggagcgctgggtggacttccgcgccctcacgggggaccgctcggacaacatccccggggtggcggggataggggagaagaccgcccttcgactcctcgcggagtgggggagcgtggagaacctcctgaagaacctggaccgggtgaagccggactcggtccggcgcaagatagaggcgcaccttgaggacctccgcctctccttggacctggcccgcatccgcaccgacctccccttggaggtggactttaaggccctgcgccgcaggacccccgacctggagggcctgagggcctttttggaggagctggagttcggaagcctccttcatgagttcggcctcctgggaggggagaagccccgggaggaggccccctggcccccgcccgaaggggccttcgtaggcttcctcctctcccgcaaggagcccatgtgggcggagcttctggccctggcggccgccgcagagggccgggtccaccgggcaacaagcccggttgaggccctggccgacctcaaggaggcccgggggttcctggccaaggacctggccgttttggccctgcgggagggggtggccctggaccccacggacgaccccctcctggtggcctacctcctggacccggccaacaccaaccccgagggggtggcccggcgctacgggggcgagttcacggaggacgcagcggagagggccctcctctccgagaggctcttccagaacctctttccccggctttccgagaagctcctctggctctaccaggaggtggagcggcccctctcccgggtcttggcccacatggaggcccggggggtgaggctggacgtcccccttctggaggccctctcctttgagctggagaaggagatggagcgcctggagggggaggtcttccgcttggccggccaccccttcaacctcaactcccgcgaccagctggaaagggtcctctttgacgagctgggccttaccccggtgggtcggacggagaagacgggcaagcgctccaccgcccagggggccctggaggccctccggggggcccaccccatcgtggagctcatcctccagtaccgggagctttccaagctcaaaagcacctacctggaccccctgccccggctcgtccacccgcggacgggccggcttcacacccgcttcaaccagacggccacggccacgggaaggctttccagctccgaccccaacctgcagaacatccccgtgcgcacccccttggggcagcgcatccgcaaggccttcgtggccgaggaggggtggctccttttggcggcggactactcccagatcgagcttcgggtcctggcccacctctcgggggacgagaacctgaagcgggtcttccgggaggggaaggacatccataccgaaaccgccgcctggatgttcggcttagaccccgctctagtggatccaaagatgcgccgggcggccaagacggtcaacttcggcgtcctctacgggatgtccgcccacaggctctcccaggagctcggcatagactacaaggaggcggaggcctttattgagcgctacttccagagcttccccaaggtgcgggcctggatagaaaggaccctggaggagggccggacgcggggctacgtggagaccctgttcggcaggaggcgctatgtgcccgacctggcctcccgggtccgctcggtgcggaaagcggcggagcggatggccttcaacatgcccgtgcagggcaccgccgccgacctgatgaagatcgccatggtcaagctcttccccaggctaaagcccctgggggcccacctcctcctccaggtgcacgacgagctggtcctggaggtgcccgaggaccgggccgaggaggccaaggccctggtcaaggaggtcatggagaacacctaccccttggacgtgcccctcgaggtggaggtgggcgtgggtcgggactggctggaggcgaagggggattgaagcggtcgac

SEQ ID NO: 3002 - DNA, 2605 bp, Artificial Sequence
  Description of Artificial Sequence: Synthetic DNA sequence of Thermus Rt41A DNA Polymerase E773D
atgaaatacctgctgccgaccgctgctgctggtctgctgctcctcgctgcccagccggcgatggccatggatatcggaattaattcggatccgaattccccactttttgacctggaggaaccccccaagcgggtgcttctggtggacggccaccacctggcctaccgcaccttctacgccctgagcctcaccacctcccggggggagccggtgcagatggtctacggcttcgcccggagcctcctcaaggccttgaaggaggacgggcaggcggtggtcgtggtctttgacgccaaggccccctccttccgccacgaggcctacgaggcctacaaggcgggccgggcccccaccccggaggacttcccccgccagctcgccttggtcaagcggctggtggaccttctgggcctggtccgcctcgaggccccgggttacgaggcggacgacgtcctgggcaccctggccaagaaggccgaaagggaggggatggaggtgcgcatcctcacgggagaccgggacttcttccagctcctctccgagaaggtctcggtcctcctgccggacgggaccctggtcaccccaaaggacgtccaggagaagtacggggtgccgccggagcgctgggtggacttccgcgccctcacgggggaccgctcggacaacatccccggggtggcggggataggggagaagaccgcccttcgactcctcgcggagtgggggagcgtggagaacctcctgaagaacctggaccgggtgaagccggactcggtccggcgcaagatagaggcgcaccttgaggacctccgcctctccttggacctggcccgcatccgcaccgacctccccttggaggtggactttaaggccctgcgccgcaggacccccgacctggagggcctgagggcctttttggaggagctggagttcggaagcctccttcatgagttcggcctcctgggaggggagaagccccgggaggaggccccctggcccccgcccgaaggggccttcgtaggcttcctcctctcccgcaaggagcccatgtgggcggagcttctggccctggcggccgccgcagagggccgggtccaccgggcaacaagcccggttgaggccctggccgacctcaaggaggcccgggggttcctggccaaggacctggccgttttggccctgcgggagggggtggccctggaccccacggacgaccccctcctggtggcctacctcctggacccggccaacaccaaccccgagggggtggcccggcgctacgggggcgagttcacggaggacgcagcggagagggccctcctctccgagaggctcttccagaacctctttccccggctttccgagaagctcctctggctctaccaggaggtggagcggcccctctcccgggtcttggcccacatggaggcccggggggtgaggctggacgtcccccttctggaggccctctcctttgagctggagaaggagatggagcgcctggagggggaggtcttccgcttggccggccaccccttcaacctcaactcccgcgaccagctggaaagggtcctctttgacgagctgggccttaccccggtgggtcggacggagaagacgggcaagcgctccaccgcccagggggccctggaggccctccggggggcccaccccatcgtggagctcatcctccagtaccgggagctttccaagctcaaaagcacctacctggaccccctgccccggctcgtccacccgcggacgggccggcttcacacccgcttcaaccagacggccacggccacgggaaggctttccagctccgaccccaacctgcagaacatccccgtgcgcacccccttggggcagcgcatccgcaaggccttcgtggccgaggaggggtggctccttttggcggcggactactcccagatcgagcttcgggtcctggcccacctctcgggggacgagaacctgaagcgggtcttccgggaggggaaggacatccataccgaaaccgccgcctggatgttcggcttagaccccgctctagtggatccaaagatgcgccgggcggccaagacggtcaacttcggcgtcctctacgggatgtccgcccacaggctctcccaggagctcggcatagactacaaggaggcggaggcctttattgagcgctacttccagagcttccccaaggtgcgggcctggatagaaaggaccctggaggagggccggacgcggggctacgtggagaccctgttcggcaggaggcgctatgtgcccgacctggcctcccgggtccgctcggtgcgggatgcggcggagcggatggccttcaacatgcccgtgcagggcaccgccgccgacctgatgaagatcgccatggtcaagctcttccccaggctaaagcccctgggggcccacctcctcctccaggtgcacgacgagctggtcctggaggtgcccgaggaccgggccgaggaggccaaggccctggtcaaggaggtcatggagaacacctaccccttggacgtgcccctcgaggtggaggtgggcgtgggtcgggactggctggaggcgaagggggattgaagcggtcgac

SEQ ID NO: 3003 - DNA, 2605 bp, Artificial Sequence
  Description of Artificial Sequence: Synthetic DNA sequence of Thermus Rt41A DNA Polymerase E773F
atgaaatacctgctgccgaccgctgctgctggtctgctgctcctcgctgcccagccggcgatggccatggatatcggaattaattcggatccgaattccccactttttgacctggaggaaccccccaagcgggtgcttctggtggacggccaccacctggcctaccgcaccttctacgccctgagcctcaccacctcccggggggagccggtgcagatggtctacggcttcgcccggagcctcctcaaggccttgaaggaggacgggcaggcggtggtcgtggtctttgacgccaaggccccctccttccgccacgaggcctacgaggcctacaaggcgggccgggcccccaccccggaggacttcccccgccagctcgccttggtcaagcggctggtggaccttctgggcctggtccgcctcgaggccccgggttacgaggcggacgacgtcctgggcaccctggccaagaaggccgaaagggaggggatggaggtgcgcatcctcacgggagaccgggacttcttccagctcctctccgagaaggtctcggtcctcctgccggacgggaccctggtcaccccaaaggacgtccaggagaagtacggggtgccgccggagcgctgggtggacttccgcgccctcacgggggaccgctcggacaacatccccggggtggcggggataggggagaagaccgcccttcgactcctcgcggagtgggggagcgtggagaacctcctgaagaacctggaccgggtgaagccggactcggtccggcgcaagatagaggcgcaccttgaggacctccgcctctccttggacctggcccgcatccgcaccgacctccccttggaggtggactttaaggccctgcgccgcaggacccccgacctggagggcctgagggcctttttggaggagctggagttcggaagcctccttcatgagttcggcctcctgggaggggagaagccccgggaggaggccccctggcccccgcccgaaggggccttcgtaggcttcctcctctcccgcaaggagcccatgtgggcggagcttctggccctggcggccgccgcagagggccgggtccaccgggcaacaagcccggttgaggccctggccgacctcaaggaggcccgggggttcctggccaaggacctggccgttttggccctgcgggagggggtggccctggaccccacggacgaccccctcctggtggcctacctcctggacccggccaacaccaaccccgagggggtggcccggcgctacgggggcgagttcacggaggacgcagcggagagggccctcctctccgagaggctcttccagaacctctttccccggctttccgagaagctcctctggctctaccaggaggtggagcggcccctctcccgggtcttggcccacatggaggcccggggggtgaggctggacgtcccccttctggaggccctctcctttgagctggagaaggagatggagcgcctggagggggaggtcttccgcttggccggccaccccttcaacctcaactcccgcgaccagctggaaagggtcctctttgacgagctgggccttaccccggtgggtcggacggagaagacgggcaagcgctccaccgcccagggggccctggaggccctccggggggcccaccccatcgtggagctcatcctccagtaccgggagctttccaagctcaaaagcacctacctggaccccctgccccggctcgtccacccgcggacgggccggcttcacacccgcttcaaccagacggccacggccacgggaaggctttccagctccgaccccaacctgcagaacatccccgtgcgcacccccttggggcagcgcatccgcaaggccttcgtggccgaggaggggtggctccttttggcggcggactactcccagatcgagcttcgggtcctggcccacctctcgggggacgagaacctgaagcgggtcttccgggaggggaaggacatccataccgaaaccgccgcctggatgttcggcttagaccccgctctagtggatccaaagatgcgccgggcggccaagacggtcaacttcggcgtcctctacgggatgtccgcccacaggctctcccaggagctcggcatagactacaaggaggcggaggcctttattgagcgctacttccagagcttccccaaggtgcgggcctggatagaaaggaccctggaggagggccggacgcggggctacgtggagaccctgttcggcaggaggcgctatgtgcccgacctggcctcccgggtccgctcggtgcggtttgcggcggagcggatggccttcaacatgcccgtgcagggcaccgccgccgacctgatgaagatcgccatggtcaagctcttccccaggctaaagcccctgggggcccacctcctcctccaggtgcacgacgagctggtcctggaggtgcccgaggaccgggccgaggaggccaaggccctggtcaaggaggtcatggagaacacctaccccttggacgtgcccctcgaggtggaggtgggcgtgggtcgggactggctggaggcgaagggggattgaagcggtcgac

SEQ ID NO: 3004 - DNA, 2605 bp, Artificial Sequence
  Description of Artificial Sequence: Synthetic DNA sequence of Thermus Rt41A DNA Polymerase E773S
atgaaatacctgctgccgaccgctgctgctggtctgctgctcctcgctgcccagccggcgatggccatggatatcggaattaattcggatccgaattccccactttttgacctggaggaaccccccaagcgggtgcttctggtggacggccaccacctggcctaccgcaccttctacgccctgagcctcaccacctcccggggggagccggtgcagatggtctacggcttcgcccggagcctcctcaaggccttgaaggaggacgggcaggcggtggtcgtggtctttgacgccaaggccccctccttccgccacgaggcctacgaggcctacaaggcgggccgggcccccaccccggaggacttcccccgccagctcgccttggtcaagcggctggtggaccttctgggcctggtccgcctcgaggccccgggttacgaggcggacgacgtcctgggcaccctggccaagaaggccgaaagggaggggatggaggtgcgcatcctcacgggagaccgggacttcttccagctcctctccgagaaggtctcggtcctcctgccggacgggaccctggtcaccccaaaggacgtccaggagaagtacggggtgccgccggagcgctgggtggacttccgcgccctcacgggggaccgctcggacaacatccccggggtggcggggataggggagaagaccgcccttcgactcctcgcggagtgggggagcgtggagaacctcctgaagaacctggaccgggtgaagccggactcggtccggcgcaagatagaggcgcaccttgaggacctccgcctctccttggacctggcccgcatccgcaccgacctccccttggaggtggactttaaggccctgcgccgcaggacccccgacctggagggcctgagggcctttttggaggagctggagttcggaagcctccttcatgagttcggcctcctgggaggggagaagccccgggaggaggccccctggcccccgcccgaaggggccttcgtaggcttcctcctctcccgcaaggagcccatgtgggcggagcttctggccctggcggccgccgcagagggccgggtccaccgggcaacaagcccggttgaggccctggccgacctcaaggaggcccgggggttcctggccaaggacctggccgttttggccctgcgggagggggtggccctggaccccacggacgaccccctcctggtggcctacctcctggacccggccaacaccaaccccgagggggtggcccggcgctacgggggcgagttcacggaggacgcagcggagagggccctcctctccgagaggctcttccagaacctctttccccggctttccgagaagctcctctggctctaccaggaggtggagcggcccctctcccgggtcttggcccacatggaggcccggggggtgaggctggacgtcccccttctggaggccctctcctttgagctggagaaggagatggagcgcctggagggggaggtcttccgcttggccggccaccccttcaacctcaactcccgcgaccagctggaaagggtcctctttgacgagctgggccttaccccggtgggtcggacggagaagacgggcaagcgctccaccgcccagggggccctggaggccctccggggggcccaccccatcgtggagctcatcctccagtaccgggagctttccaagctcaaaagcacctacctggaccccctgccccggctcgtccacccgcggacgggccggcttcacacccgcttcaaccagacggccacggccacgggaaggctttccagctccgaccccaacctgcagaacatccccgtgcgcacccccttggggcagcgcatccgcaaggccttcgtggccgaggaggggtggctccttttggcggcggactactcccagatcgagcttcgggtcctggcccacctctcgggggacgagaacctgaagcgggtcttccgggaggggaaggacatccataccgaaaccgccgcctggatgttcggcttagaccccgctctagtggatccaaagatgcgccgggcggccaagacggtcaacttcggcgtcctctacgggatgtccgcccacaggctctcccaggagctcggcatagactacaaggaggcggaggcctttattgagcgctacttccagagcttccccaaggtgcgggcctggatagaaaggaccctggaggagggccggacgcggggctacgtggagaccctgttcggcaggaggcgctatgtgcccgacctggcctcccgggtccgctcggtgcggtctgcggcggagcggatggccttcaacatgcccgtgcagggcaccgccgccgacctgatgaagatcgccatggtcaagctcttccccaggctaaagcccctgggggcccacctcctcctccaggtgcacgacgagctggtcctggaggtgcccgaggaccgggccgaggaggccaaggccctggtcaaggaggtcatggagaacacctaccccttggacgtgcccctcgaggtggaggtgggcgtgggtcgggactggctggaggcgaagggggattgaagcggtcgac

SEQ ID NO: 3005 - DNA, 2605 bp, Artificial Sequence
  Description of Artificial Sequence: Synthetic DNA sequence of Thermus Rt41A DNA Polymerase E773Y
atgaaatacctgctgccgaccgctgctgctggtctgctgctcctcgctgcccagccggcgatggccatggatatcggaattaattcggatccgaattccccactttttgacctggaggaaccccccaagcgggtgcttctggtggacggccaccacctggcctaccgcaccttctacgccctgagcctcaccacctcccggggggagccggtgcagatggtctacggcttcgcccggagcctcctcaaggccttgaaggaggacgggcaggcggtggtcgtggtctttgacgccaaggccccctccttccgccacgaggcctacgaggcctacaaggcgggccgggcccccaccccggaggacttcccccgccagctcgccttggtcaagcggctggtggaccttctgggcctggtccgcctcgaggccccgggttacgaggcggacgacgtcctgggcaccctggccaagaaggccgaaagggaggggatggaggtgcgcatcctcacgggagaccgggacttcttccagctcctctccgagaaggtctcggtcctcctgccggacgggaccctggtcaccccaaaggacgtccaggagaagtacggggtgccgccggagcgctgggtggacttccgcgccctcacgggggaccgctcggacaacatccccggggtggcggggataggggagaagaccgcccttcgactcctcgcggagtgggggagcgtggagaacctcctgaagaacctggaccgggtgaagccggactcggtccggcgcaagatagaggcgcaccttgaggacctccgcctctccttggacctggcccgcatccgcaccgacctccccttggaggtggactttaaggccctgcgccgcaggacccccgacctggagggcctgagggcctttttggaggagctggagttcggaagcctccttcatgagttcggcctcctgggaggggagaagccccgggaggaggccccctggcccccgcccgaaggggccttcgtaggcttcctcctctcccgcaaggagcccatgtgggcggagcttctggccctggcggccgccgcagagggccgggtccaccgggcaacaagcccggttgaggccctggccgacctcaaggaggcccgggggttcctggccaaggacctggccgttttggccctgcgggagggggtggccctggaccccacggacgaccccctcctggtggcctacctcctggacccggccaacaccaaccccgagggggtggcccggcgctacgggggcgagttcacggaggacgcagcggagagggccctcctctccgagaggctcttccagaacctctttccccggctttccgagaagctcctctggctctaccaggaggtggagcggcccctctcccgggtcttggcccacatggaggcccggggggtgaggctggacgtcccccttctggaggccctctcctttgagctggagaaggagatggagcgcctggagggggaggtcttccgcttggccggccaccccttcaacctcaactcccgcgaccagctggaaagggtcctctttgacgagctgggccttaccccggtgggtcggacggagaagacgggcaagcgctccaccgcccagggggccctggaggccctccggggggcccaccccatcgtggagctcatcctccagtaccgggagctttccaagctcaaaagcacctacctggaccccctgccccggctcgtccacccgcggacgggccggcttcacacccgcttcaaccagacggccacggccacgggaaggctttccagctccgaccccaacctgcagaacatccccgtgcgcacccccttggggcagcgcatccgcaaggccttcgtggccgaggaggggtggctccttttggcggcggactactcccagatcgagcttcgggtcctggcccacctctcgggggacgagaacctgaagcgggtcttccgggaggggaaggacatccataccgaaaccgccgcctggatgttcggcttagaccccgctctagtggatccaaagatgcgccgggcggccaagacggtcaacttcggcgtcctctacgggatgtccgcccacaggctctcccaggagctcggcatagactacaaggaggcggaggcctttattgagcgctacttccagagcttccccaaggtgcgggcctggatagaaaggaccctggaggagggccggacgcggggctacgtggagaccctgttcggcaggaggcgctatgtgcccgacctggcctcccgggtccgctcggtgcggtatgcggcggagcggatggccttcaacatgcccgtgcagggcaccgccgccgacctgatgaagatcgccatggtcaagctcttccccaggctaaagcccctgggggcccacctcctcctccaggtgcacgacgagctggtcctggaggtgcccgaggaccgggccgaggaggccaaggccctggtcaaggaggtcatggagaacacctaccccttggacgtgcccctcgaggtggaggtgggcgtgggtcgggactggctggaggcgaagggggattgaagcggtcgac

SEQ ID NO: 3006 - DNA, 2605 bp, Artificial Sequence
  Description of Artificial Sequence: Synthetic DNA sequence of Thermus Rt41A DNA Polymerase E773W
atgaaatacctgctgccgaccgctgctgctggtctgctgctcctcgctgcccagccggcgatggccatggatatcggaattaattcggatccgaattccccactttttgacctggaggaaccccccaagcgggtgcttctggtggacggccaccacctggcctaccgcaccttctacgccctgagcctcaccacctcccggggggagccggtgcagatggtctacggcttcgcccggagcctcctcaaggccttgaaggaggacgggcaggcggtggtcgtggtctttgacgccaaggccccctccttccgccacgaggcctacgaggcctacaaggcgggccgggcccccaccccggaggacttcccccgccagctcgccttggtcaagcggctggtggaccttctgggcctggtccgcctcgaggccccgggttacgaggcggacgacgtcctgggcaccctggccaagaaggccgaaagggaggggatggaggtgcgcatcctcacgggagaccgggacttcttccagctcctctccgagaaggtctcggtcctcctgccggacgggaccctggtcaccccaaaggacgtccaggagaagtacggggtgccgccggagcgctgggtggacttccgcgccctcacgggggaccgctcggacaacatccccggggtggcggggataggggagaagaccgcccttcgactcctcgcggagtgggggagcgtggagaacctcctgaagaacctggaccgggtgaagccggactcggtccggcgcaagatagaggcgcaccttgaggacctccgcctctccttggacctggcccgcatccgcaccgacctccccttggaggtggactttaaggccctgcgccgcaggacccccgacctggagggcctgagggcctttttggaggagctggagttcggaagcctccttcatgagttcggcctcctgggaggggagaagccccgggaggaggccccctggcccccgcccgaaggggccttcgtaggcttcctcctctcccgcaaggagcccatgtgggcggagcttctggccctggcggccgccgcagagggccgggtccaccgggcaacaagcccggttgaggccctggccgacctcaaggaggcccgggggttcctggccaaggacctggccgttttggccctgcgggagggggtggccctggaccccacggacgaccccctcctggtggcctacctcctggacccggccaacaccaaccccgagggggtggcccggcgctacgggggcgagttcacggaggacgcagcggagagggccctcctctccgagaggctcttccagaacctctttccccggctttccgagaagctcctctggctctaccaggaggtggagcggcccctctcccgggtcttggcccacatggaggcccggggggtgaggctggacgtcccccttctggaggccctctcctttgagctggagaaggagatggagcgcctggagggggaggtcttccgcttggccggccaccccttcaacctcaactcccgcgaccagctggaaagggtcctctttgacgagctgggccttaccccggtgggtcggacggagaagacgggcaagcgctccaccgcccagggggccctggaggccctccggggggcccaccccatcgtggagctcatcctccagtaccgggagctttccaagctcaaaagcacctacctggaccccctgccccggctcgtccacccgcggacgggccggcttcacacccgcttcaaccagacggccacggccacgggaaggctttccagctccgaccccaacctgcagaacatccccgtgcgcacccccttggggcagcgcatccgcaaggccttcgtggccgaggaggggtggctccttttggcggcggactactcccagatcgagcttcgggtcctggcccacctctcgggggacgagaacctgaagcgggtcttccgggaggggaaggacatccataccgaaaccgccgcctggatgttcggcttagaccccgctctagtggatccaaagatgcgccgggcggccaagacggtcaacttcggcgtcctctacgggatgtccgcccacaggctctcccaggagctcggcatagactacaaggaggcggaggcctttattgagcgctacttccagagcttccccaaggtgcgggcctggatagaaaggaccctggaggagggccggacgcggggctacgtggagaccctgttcggcaggaggcgctatgtgcccgacctggcctcccgggtccgctcggtgcggtgggcggcggagcggatggccttcaacatgcccgtgcagggcaccgccgccgacctgatgaagatcgccatggtcaagctcttccccaggctaaagcccctgggggcccacctcctcctccaggtgcacgacgagctggtcctggaggtgcccgaggaccgggccgaggaggccaaggccctggtcaaggaggtcatggagaacacctaccccttggacgtgcccctcgaggtggaggtgggcgtgggtcgggactggctggaggcgaagggggattgaagcggtcgac

SEQ ID NO: 3007 - DNA, 2605 bp, Artificial Sequence
  Description of Artificial Sequence: Synthetic DNA sequence of Thermus Rt41A DNA Polymerase E773P
atgaaatacctgctgccgaccgctgctgctggtctgctgctcctcgctgcccagccggcgatggccatggatatcggaattaattcggatccgaattccccactttttgacctggaggaaccccccaagcgggtgcttctggtggacggccaccacctggcctaccgcaccttctacgccctgagcctcaccacctcccggggggagccggtgcagatggtctacggcttcgcccggagcctcctcaaggccttgaaggaggacgggcaggcggtggtcgtggtctttgacgccaaggccccctccttccgccacgaggcctacgaggcctacaaggcgggccgggcccccaccccggaggacttcccccgccagctcgccttggtcaagcggctggtggaccttctgggcctggtccgcctcgaggccccgggttacgaggcggacgacgtcctgggcaccctggccaagaaggccgaaagggaggggatggaggtgcgcatcctcacgggagaccgggacttcttccagctcctctccgagaaggtctcggtcctcctgccggacgggaccctggtcaccccaaaggacgtccaggagaagtacggggtgccgccggagcgctgggtggacttccgcgccctcacgggggaccgctcggacaacatccccggggtggcggggataggggagaagaccgcccttcgactcctcgcggagtgggggagcgtggagaacctcctgaagaacctggaccgggtgaagccggactcggtccggcgcaagatagaggcgcaccttgaggacctccgcctctccttggacctggcccgcatccgcaccgacctccccttggaggtggactttaaggccctgcgccgcaggacccccgacctggagggcctgagggcctttttggaggagctggagttcggaagcctccttcatgagttcggcctcctgggaggggagaagccccgggaggaggccccctggcccccgcccgaaggggccttcgtaggcttcctcctctcccgcaaggagcccatgtgggcggagcttctggccctggcggccgccgcagagggccgggtccaccgggcaacaagcccggttgaggccctggccgacctcaaggaggcccgggggttcctggccaaggacctggccgttttggccctgcgggagggggtggccctggaccccacggacgaccccctcctggtggcctacctcctggacccggccaacaccaaccccgagggggtggcccggcgctacgggggcgagttcacggaggacgcagcggagagggccctcctctccgagaggctcttccagaacctctttccccggctttccgagaagctcctctggctctaccaggaggtggagcggcccctctcccgggtcttggcccacatggaggcccggggggtgaggctggacgtcccccttctggaggccctctcctttgagctggagaaggagatggagcgcctggagggggaggtcttccgcttggccggccaccccttcaacctcaactcccgcgaccagctggaaagggtcctctttgacgagctgggccttaccccggtgggtcggacggagaagacgggcaagcgctccaccgcccagggggccctggaggccctccggggggcccaccccatcgtggagctcatcctccagtaccgggagctttccaagctcaaaagcacctacctggaccccctgccccggctcgtccacccgcggacgggccggcttcacacccgcttcaaccagacggccacggccacgggaaggctttccagctccgaccccaacctgcagaacatccccgtgcgcacccccttggggcagcgcatccgcaaggccttcgtggccgaggaggggtggctccttttggcggcggactactcccagatcgagcttcgggtcctggcccacctctcgggggacgagaacctgaagcgggtcttccgggaggggaaggacatccataccgaaaccgccgcctggatgttcggcttagaccccgctctagtggatccaaagatgcgccgggcggccaagacggtcaacttcggcgtcctctacgggatgtccgcccacaggctctcccaggagctcggcatagactacaaggaggcggaggcctttattgagcgctacttccagagcttccccaaggtgcgggcctggatagaaaggaccctggaggagggccggacgcggggctacgtggagaccctgttcggcaggaggcgctatgtgcccgacctggcctcccgggtccgctcggtgcggcctgcggcggagcggatggccttcaacatgcccgtgcagggcaccgccgccgacctgatgaagatcgccatggtcaagctcttccccaggctaaagcccctgggggcccacctcctcctccaggtgcacgacgagctggtcctggaggtgcccgaggaccgggccgaggaggccaaggccctggtcaaggaggtcatggagaacacctaccccttggacgtgcccctcgaggtggaggtgggcgtgggtcgggactggctggaggcgaagggggattgaagcggtcgac

SEQ ID NO: 3008 - DNA, 2605 bp, Artificial Sequence
  Description of Artificial Sequence: Synthetic DNA sequence of Thermus Rt41A DNA Polymerase E773M
atgaaatacctgctgccgaccgctgctgctggtctgctgctcctcgctgcccagccggcgatggccatggatatcggaattaattcggatccgaattccccactttttgacctggaggaaccccccaagcgggtgcttctggtggacggccaccacctggcctaccgcaccttctacgccctgagcctcaccacctcccggggggagccggtgcagatggtctacggcttcgcccggagcctcctcaaggccttgaaggaggacgggcaggcggtggtcgtggtctttgacgccaaggccccctccttccgccacgaggcctacgaggcctacaaggcgggccgggcccccaccccggaggacttcccccgccagctcgccttggtcaagcggctggtggaccttctgggcctggtccgcctcgaggccccgggttacgaggcggacgacgtcctgggcaccctggccaagaaggccgaaagggaggggatggaggtgcgcatcctcacgggagaccgggacttcttccagctcctctccgagaaggtctcggtcctcctgccggacgggaccctggtcaccccaaaggacgtccaggagaagtacggggtgccgccggagcgctgggtggacttccgcgccctcacgggggaccgctcggacaacatccccggggtggcggggataggggagaagaccgcccttcgactcctcgcggagtgggggagcgtggagaacctcctgaagaacctggaccgggtgaagccggactcggtccggcgcaagatagaggcgcaccttgaggacctccgcctctccttggacctggcccgcatccgcaccgacctccccttggaggtggactttaaggccctgcgccgcaggacccccgacctggagggcctgagggcctttttggaggagctggagttcggaagcctccttcatgagttcggcctcctgggaggggagaagccccgggaggaggccccctggcccccgcccgaaggggccttcgtaggcttcctcctctcccgcaaggagcccatgtgggcggagcttctggccctggcggccgccgcagagggccgggtccaccgggcaacaagcccggttgaggccctggccgacctcaaggaggcccgggggttcctggccaaggacctggccgttttggccctgcgggagggggtggccctggaccccacggacgaccccctcctggtggcctacctcctggacccggccaacaccaaccccgagggggtggcccggcgctacgggggcgagttcacggaggacgcagcggagagggccctcctctccgagaggctcttccagaacctctttccccggctttccgagaagctcctctggctctaccaggaggtggagcggcccctctcccgggtcttggcccacatggaggcccggggggtgaggctggacgtcccccttctggaggccctctcctttgagctggagaaggagatggagcgcctggagggggaggtcttccgcttggccggccaccccttcaacctcaactcccgcgaccagctggaaagggtcctctttgacgagctgggccttaccccggtgggtcggacggagaagacgggcaagcgctccaccgcccagggggccctggaggccctccggggggcccaccccatcgtggagctcatcctccagtaccgggagctttccaagctcaaaagcacctacctggaccccctgccccggctcgtccacccgcggacgggccggcttcacacccgcttcaaccagacggccacggccacgggaaggctttccagctccgaccccaacctgcagaacatccccgtgcgcacccccttggggcagcgcatccgcaaggccttcgtggccgaggaggggtggctccttttggcggcggactactcccagatcgagcttcgggtcctggcccacctctcgggggacgagaacctgaagcgggtcttccgggaggggaaggacatccataccgaaaccgccgcctggatgttcggcttagaccccgctctagtggatccaaagatgcgccgggcggccaagacggtcaacttcggcgtcctctacgggatgtccgcccacaggctctcccaggagctcggcatagactacaaggaggcggaggcctttattgagcgctacttccagagcttccccaaggtgcgggcctggatagaaaggaccctggaggagggccggacgcggggctacgtggagaccctgttcggcaggaggcgctatgtgcccgacctggcctcccgggtccgctcggtgcggatggcggcggagcggatggccttcaacatgcccgtgcagggcaccgccgccgacctgatgaagatcgccatggtcaagctcttccccaggctaaagcccctgggggcccacctcctcctccaggtgcacgacgagctggtcctggaggtgcccgaggaccgggccgaggaggccaaggccctggtcaaggaggtcatggagaacacctaccccttggacgtgcccctcgaggtggaggtgggcgtgggtcgggactggctggaggcgaagggggattgaagcggtcgac

SEQ ID NO: 3009 - DNA, 2605 bp, Artificial Sequence
  Description of Artificial Sequence: Synthetic DNA sequence of Thermus Rt41A DNA Polymerase E773T
atgaaatacctgctgccgaccgctgctgctggtctgctgctcctcgctgcccagccggcgatggccatggatatcggaattaattcggatccgaattccccactttttgacctggaggaaccccccaagcgggtgcttctggtggacggccaccacctggcctaccgcaccttctacgccctgagcctcaccacctcccggggggagccggtgcagatggtctacggcttcgcccggagcctcctcaaggccttgaaggaggacgggcaggcggtggtcgtggtctttgacgccaaggccccctccttccgccacgaggcctacgaggcctacaaggcgggccgggcccccaccccggaggacttcccccgccagctcgccttggtcaagcggctggtggaccttctgggcctggtccgcctcgaggccccgggttacgaggcggacgacgtcctgggcaccctggccaagaaggccgaaagggaggggatggaggtgcgcatcctcacgggagaccgggacttcttccagctcctctccgagaaggtctcggtcctcctgccggacgggaccctggtcaccccaaaggacgtccaggagaagtacggggtgccgccggagcgctgggtggacttccgcgccctcacgggggaccgctcggacaacatccccggggtggcggggataggggagaagaccgcccttcgactcctcgcggagtgggggagcgtggagaacctcctgaagaacctggaccgggtgaagccggactcggtccggcgcaagatagaggcgcaccttgaggacctccgcctctccttggacctggcccgcatccgcaccgacctccccttggaggtggactttaaggccctgcgccgcaggacccccgacctggagggcctgagggcctttttggaggagctggagttcggaagcctccttcatgagttcggcctcctgggaggggagaagccccgggaggaggccccctggcccccgcccgaaggggccttcgtaggcttcctcctctcccgcaaggagcccatgtgggcggagcttctggccctggcggccgccgcagagggccgggtccaccgggcaacaagcccggttgaggccctggccgacctcaaggaggcccgggggttcctggccaaggacctggccgttttggccctgcgggagggggtggccctggaccccacggacgaccccctcctggtggcctacctcctggacccggccaacaccaaccccgagggggtggcccggcgctacgggggcgagttcacggaggacgcagcggagagggccctcctctccgagaggctcttccagaacctctttccccggctttccgagaagctcctctggctctaccaggaggtggagcggcccctctcccgggtcttggcccacatggaggcccggggggtgaggctggacgtcccccttctggaggccctctcctttgagctggagaaggagatggagcgcctggagggggaggtcttccgcttggccggccaccccttcaacctcaactcccgcgaccagctggaaagggtcctctttgacgagctgggccttaccccggtgggtcggacggagaagacgggcaagcgctccaccgcccagggggccctggaggccctccggggggcccaccccatcgtggagctcatcctccagtaccgggagctttccaagctcaaaagcacctacctggaccccctgccccggctcgtccacccgcggacgggccggcttcacacccgcttcaaccagacggccacggccacgggaaggctttccagctccgaccccaacctgcagaacatccccgtgcgcacccccttggggcagcgcatccgcaaggccttcgtggccgaggaggggtggctccttttggcggcggactactcccagatcgagcttcgggtcctggcccacctctcgggggacgagaacctgaagcgggtcttccgggaggggaaggacatccataccgaaaccgccgcctggatgttcggcttagaccccgctctagtggatccaaagatgcgccgggcggccaagacggtcaacttcggcgtcctctacgggatgtccgcccacaggctctcccaggagctcggcatagactacaaggaggcggaggcctttattgagcgctacttccagagcttccccaaggtgcgggcctggatagaaaggaccctggaggagggccggacgcggggctacgtggagaccctgttcggcaggaggcgctatgtgcccgacctggcctcccgggtccgctcggtgcggactgcggcggagcggatggccttcaacatgcccgtgcagggcaccgccgccgacctgatgaagatcgccatggtcaagctcttccccaggctaaagcccctgggggcccacctcctcctccaggtgcacgacgagctggtcctggaggtgcccgaggaccgggccgaggaggccaaggccctggtcaaggaggtcatggagaacacctaccccttggacgtgcccctcgaggtggaggtgggcgtgggtcgggactggctggaggcgaagggggattgaagcggtcgac

SEQ ID NO: 3010 - DNA, 2605 bp, Artificial Sequence
  Description of Artificial Sequence: Synthetic DNA sequence of Thermus Rt41A DNA Polymerase E773N
atgaaatacctgctgccgaccgctgctgctggtctgctgctcctcgctgcccagccggcgatggccatggatatcggaattaattcggatccgaattccccactttttgacctggaggaaccccccaagcgggtgcttctggtggacggccaccacctggcctaccgcaccttctacgccctgagcctcaccacctcccggggggagccggtgcagatggtctacggcttcgcccggagcctcctcaaggccttgaaggaggacgggcaggcggtggtcgtggtctttgacgccaaggccccctccttccgccacgaggcctacgaggcctacaaggcgggccgggcccccaccccggaggacttcccccgccagctcgccttggtcaagcggctggtggaccttctgggcctggtccgcctcgaggccccgggttacgaggcggacgacgtcctgggcaccctggccaagaaggccgaaagggaggggatggaggtgcgcatcctcacgggagaccgggacttcttccagctcctctccgagaaggtctcggtcctcctgccggacgggaccctggtcaccccaaaggacgtccaggagaagtacggggtgccgccggagcgctgggtggacttccgcgccctcacgggggaccgctcggacaacatccccggggtggcggggataggggagaagaccgcccttcgactcctcgcggagtgggggagcgtggagaacctcctgaagaacctggaccgggtgaagccggactcggtccggcgcaagatagaggcgcaccttgaggacctccgcctctccttggacctggcccgcatccgcaccgacctccccttggaggtggactttaaggccctgcgccgcaggacccccgacctggagggcctgagggcctttttggaggagctggagttcggaagcctccttcatgagttcggcctcctgggaggggagaagccccgggaggaggccccctggcccccgcccgaaggggccttcgtaggcttcctcctctcccgcaaggagcccatgtgggcggagcttctggccctggcggccgccgcagagggccgggtccaccgggcaacaagcccggttgaggccctggccgacctcaaggaggcccgggggttcctggccaaggacctggccgttttggccctgcgggagggggtggccctggaccccacggacgaccccctcctggtggcctacctcctggacccggccaacaccaaccccgagggggtggcccggcgctacgggggcgagttcacggaggacgcagcggagagggccctcctctccgagaggctcttccagaacctctttccccggctttccgagaagctcctctggctctaccaggaggtggagcggcccctctcccgggtcttggcccacatggaggcccggggggtgaggctggacgtcccccttctggaggccctctcctttgagctggagaaggagatggagcgcctggagggggaggtcttccgcttggccggccaccccttcaacctcaactcccgcgaccagctggaaagggtcctctttgacgagctgggccttaccccggtgggtcggacggagaagacgggcaagcgctccaccgcccagggggccctggaggccctccggggggcccaccccatcgtggagctcatcctccagtaccgggagctttccaagctcaaaagcacctacctggaccccctgccccggctcgtccacccgcggacgggccggcttcacacccgcttcaaccagacggccacggccacgggaaggctttccagctccgaccccaacctgcagaacatccccgtgcgcacccccttggggcagcgcatccgcaaggccttcgtggccgaggaggggtggctccttttggcggcggactactcccagatcgagcttcgggtcctggcccacctctcgggggacgagaacctgaagcgggtcttccgggaggggaaggacatccataccgaaaccgccgcctggatgttcggcttagaccccgctctagtggatccaaagatgcgccgggcggccaagacggtcaacttcggcgtcctctacgggatgtccgcccacaggctctcccaggagctcggcatagactacaaggaggcggaggcctttattgagcgctacttccagagcttccccaaggtgcgggcctggatagaaaggaccctggaggagggccggacgcggggctacgtggagaccctgttcggcaggaggcgctatgtgcccgacctggcctcccgggtccgctcggtgcggaatgcggcggagcggatggccttcaacatgcccgtgcagggcaccgccgccgacctgatgaagatcgccatggtcaagctcttccccaggctaaagcccctgggggcccacctcctcctccaggtgcacgacgagctggtcctggaggtgcccgaggaccgggccgaggaggccaaggccctggtcaaggaggtcatggagaacacctaccccttggacgtgcccctcgaggtggaggtgggcgtgggtcgggactggctggaggcgaagggggattgaagcggtcgac

SEQ ID NO: 3011 - DNA, 2605 bp, Artificial Sequence
  Description of Artificial Sequence: Synthetic DNA sequence of Thermus Rt41A DNA Polymerase E773V
atgaaatacctgctgccgaccgctgctgctggtctgctgctcctcgctgcccagccggcgatggccatggatatcggaattaattcggatccgaattccccactttttgacctggaggaaccccccaagcgggtgcttctggtggacggccaccacctggcctaccgcaccttctacgccctgagcctcaccacctcccggggggagccggtgcagatggtctacggcttcgcccggagcctcctcaaggccttgaaggaggacgggcaggcggtggtcgtggtctttgacgccaaggccccctccttccgccacgaggcctacgaggcctacaaggcgggccgggcccccaccccggaggacttcccccgccagctcgccttggtcaagcggctggtggaccttctgggcctggtccgcctcgaggccccgggttacgaggcggacgacgtcctgggcaccctggccaagaaggccgaaagggaggggatggaggtgcgcatcctcacgggagaccgggacttcttccagctcctctccgagaaggtctcggtcctcctgccggacgggaccctggtcaccccaaaggacgtccaggagaagtacggggtgccgccggagcgctgggtggacttccgcgccctcacgggggaccgctcggacaacatccccggggtggcggggataggggagaagaccgcccttcgactcctcgcggagtgggggagcgtggagaacctcctgaagaacctggaccgggtgaagccggactcggtccggcgcaagatagaggcgcaccttgaggacctccgcctctccttggacctggcccgcatccgcaccgacctccccttggaggtggactttaaggccctgcgccgcaggacccccgacctggagggcctgagggcctttttggaggagctggagttcggaagcctccttcatgagttcggcctcctgggaggggagaagccccgggaggaggccccctggcccccgcccgaaggggccttcgtaggcttcctcctctcccgcaaggagcccatgtgggcggagcttctggccctggcggccgccgcagagggccgggtccaccgggcaacaagcccggttgaggccctggccgacctcaaggaggcccgggggttcctggccaaggacctggccgttttggccctgcgggagggggtggccctggaccccacggacgaccccctcctggtggcctacctcctggacccggccaacaccaaccccgagggggtggcccggcgctacgggggcgagttcacggaggacgcagcggagagggccctcctctccgagaggctcttccagaacctctttccccggctttccgagaagctcctctggctctaccaggaggtggagcggcccctctcccgggtcttggcccacatggaggcccggggggtgaggctggacgtcccccttctggaggccctctcctttgagctggagaaggagatggagcgcctggagggggaggtcttccgcttggccggccaccccttcaacctcaactcccgcgaccagctggaaagggtcctctttgacgagctgggccttaccccggtgggtcggacggagaagacgggcaagcgctccaccgcccagggggccctggaggccctccggggggcccaccccatcgtggagctcatcctccagtaccgggagctttccaagctcaaaagcacctacctggaccccctgccccggctcgtccacccgcggacgggccggcttcacacccgcttcaaccagacggccacggccacgggaaggctttccagctccgaccccaacctgcagaacatccccgtgcgcacccccttggggcagcgcatccgcaaggccttcgtggccgaggaggggtggctccttttggcggcggactactcccagatcgagcttcgggtcctggcccacctctcgggggacgagaacctgaagcgggtcttccgggaggggaaggacatccataccgaaaccgccgcctggatgttcggcttagaccccgctctagtggatccaaagatgcgccgggcggccaagacggtcaacttcggcgtcctctacgggatgtccgcccacaggctctcccaggagctcggcatagactacaaggaggcggaggcctttattgagcgctacttccagagcttccccaaggtgcgggcctggatagaaaggaccctggaggagggccggacgcggggctacgtggagaccctgttcggcaggaggcgctatgtgcccgacctggcctcccgggtccgctcggtgcgggtcgcggcggagcggatggccttcaacatgcccgtgcagggcaccgccgccgacctgatgaagatcgccatggtcaagctcttccccaggctaaagcccctgggggcccacctcctcctccaggtgcacgacgagctggtcctggaggtgcccgaggaccgggccgaggaggccaaggccctggtcaaggaggtcatggagaacacctaccccttggacgtgcccctcgaggtggaggtgggcgtgggtcgggactggctggaggcgaagggggattgaagcggtcgac

SEQ ID NO: 3012 - DNA, 2605 bp, Artificial Sequence
  Description of Artificial Sequence: Synthetic DNA sequence of Thermus Rt41A DNA Polymerase A774R
atgaaatacctgctgccgaccgctgctgctggtctgctgctcctcgctgcccagccggcgatggccatggatatcggaattaattcggatccgaattccccactttttgacctggaggaaccccccaagcgggtgcttctggtggacggccaccacctggcctaccgcaccttctacgccctgagcctcaccacctcccggggggagccggtgcagatggtctacggcttcgcccggagcctcctcaaggccttgaaggaggacgggcaggcggtggtcgtggtctttgacgccaaggccccctccttccgccacgaggcctacgaggcctacaaggcgggccgggcccccaccccggaggacttcccccgccagctcgccttggtcaagcggctggtggaccttctgggcctggtccgcctcgaggccccgggttacgaggcggacgacgtcctgggcaccctggccaagaaggccgaaagggaggggatggaggtgcgcatcctcacgggagaccgggacttcttccagctcctctccgagaaggtctcggtcctcctgccggacgggaccctggtcaccccaaaggacgtccaggagaagtacggggtgccgccggagcgctgggtggacttccgcgccctcacgggggaccgctcggacaacatccccggggtggcggggataggggagaagaccgcccttcgactcctcgcggagtgggggagcgtggagaacctcctgaagaacctggaccgggtgaagccggactcggtccggcgcaagatagaggcgcaccttgaggacctccgcctctccttggacctggcccgcatccgcaccgacctccccttggaggtggactttaaggccctgcgccgcaggacccccgacctggagggcctgagggcctttttggaggagctggagttcggaagcctccttcatgagttcggcctcctgggaggggagaagccccgggaggaggccccctggcccccgcccgaaggggccttcgtaggcttcctcctctcccgcaaggagcccatgtgggcggagcttctggccctggcggccgccgcagagggccgggtccaccgggcaacaagcccggttgaggccctggccgacctcaaggaggcccgggggttcctggccaaggacctggccgttttggccctgcgggagggggtggccctggaccccacggacgaccccctcctggtggcctacctcctggacccggccaacaccaaccccgagggggtggcccggcgctacgggggcgagttcacggaggacgcagcggagagggccctcctctccgagaggctcttccagaacctctttccccggctttccgagaagctcctctggctctaccaggaggtggagcggcccctctcccgggtcttggcccacatggaggcccggggggtgaggctggacgtcccccttctggaggccctctcctttgagctggagaaggagatggagcgcctggagggggaggtcttccgcttggccggccaccccttcaacctcaactcccgcgaccagctggaaagggtcctctttgacgagctgggccttaccccggtgggtcggacggagaagacgggcaagcgctccaccgcccagggggccctggaggccctccggggggcccaccccatcgtggagctcatcctccagtaccgggagctttccaagctcaaaagcacctacctggaccccctgccccggctcgtccacccgcggacgggccggcttcacacccgcttcaaccagacggccacggccacgggaaggctttccagctccgaccccaacctgcagaacatccccgtgcgcacccccttggggcagcgcatccgcaaggccttcgtggccgaggaggggtggctccttttggcggcggactactcccagatcgagcttcgggtcctggcccacctctcgggggacgagaacctgaagcgggtcttccgggaggggaaggacatccataccgaaaccgccgcctggatgttcggcttagaccccgctctagtggatccaaagatgcgccgggcggccaagacggtcaacttcggcgtcctctacgggatgtccgcccacaggctctcccaggagctcggcatagactacaaggaggcggaggcctttattgagcgctacttccagagcttccccaaggtgcgggcctggatagaaaggaccctggaggagggccggacgcggggctacgtggagaccctgttcggcaggaggcgctatgtgcccgacctggcctcccgggtccgctcggtgcgggagcgagcggagcggatggccttcaacatgcccgtgcagggcaccgccgccgacctgatgaagatcgccatggtcaagctcttccccaggctaaagcccctgggggcccacctcctcctccaggtgcacgacgagctggtcctggaggtgcccgaggaccgggccgaggaggccaaggccctggtcaaggaggtcatggagaacacctaccccttggacgtgcccctcgaggtggaggtgggcgtgggtcgggactggctggaggcgaagggggattgaagcggtcgac

SEQ ID NO: 3013 - DNA, 2605 bp, Artificial Sequence
  Description of Artificial Sequence: Synthetic DNA sequence of Thermus Rt41A DNA Polymerase A774C
atgaaatacctgctgccgaccgctgctgctggtctgctgctcctcgctgcccagccggcgatggccatggatatcggaattaattcggatccgaattccccactttttgacctggaggaaccccccaagcgggtgcttctggtggacggccaccacctggcctaccgcaccttctacgccctgagcctcaccacctcccggggggagccggtgcagatggtctacggcttcgcccggagcctcctcaaggccttgaaggaggacgggcaggcggtggtcgtggtctttgacgccaaggccccctccttccgccacgaggcctacgaggcctacaaggcgggccgggcccccaccccggaggacttcccccgccagctcgccttggtcaagcggctggtggaccttctgggcctggtccgcctcgaggccccgggttacgaggcggacgacgtcctgggcaccctggccaagaaggccgaaagggaggggatggaggtgcgcatcctcacgggagaccgggacttcttccagctcctctccgagaaggtctcggtcctcctgccggacgggaccctggtcaccccaaaggacgtccaggagaagtacggggtgccgccggagcgctgggtggacttccgcgccctcacgggggaccgctcggacaacatccccggggtggcggggataggggagaagaccgcccttcgactcctcgcggagtgggggagcgtggagaacctcctgaagaacctggaccgggtgaagccggactcggtccggcgcaagatagaggcgcaccttgaggacctccgcctctccttggacctggcccgcatccgcaccgacctccccttggaggtggactttaaggccctgcgccgcaggacccccgacctggagggcctgagggcctttttggaggagctggagttcggaagcctccttcatgagttcggcctcctgggaggggagaagccccgggaggaggccccctggcccccgcccgaaggggccttcgtaggcttcctcctctcccgcaaggagcccatgtgggcggagcttctggccctggcggccgccgcagagggccgggtccaccgggcaacaagcccggttgaggccctggccgacctcaaggaggcccgggggttcctggccaaggacctggccgttttggccctgcgggagggggtggccctggaccccacggacgaccccctcctggtggcctacctcctggacccggccaacaccaaccccgagggggtggcccggcgctacgggggcgagttcacggaggacgcagcggagagggccctcctctccgagaggctcttccagaacctctttccccggctttccgagaagctcctctggctctaccaggaggtggagcggcccctctcccgggtcttggcccacatggaggcccggggggtgaggctggacgtcccccttctggaggccctctcctttgagctggagaaggagatggagcgcctggagggggaggtcttccgcttggccggccaccccttcaacctcaactcccgcgaccagctggaaagggtcctctttgacgagctgggccttaccccggtgggtcggacggagaagacgggcaagcgctccaccgcccagggggccctggaggccctccggggggcccaccccatcgtggagctcatcctccagtaccgggagctttccaagctcaaaagcacctacctggaccccctgccccggctcgtccacccgcggacgggccggcttcacacccgcttcaaccagacggccacggccacgggaaggctttccagctccgaccccaacctgcagaacatccccgtgcgcacccccttggggcagcgcatccgcaaggccttcgtggccgaggaggggtggctccttttggcggcggactactcccagatcgagcttcgggtcctggcccacctctcgggggacgagaacctgaagcgggtcttccgggaggggaaggacatccataccgaaaccgccgcctggatgttcggcttagaccccgctctagtggatccaaagatgcgccgggcggccaagacggtcaacttcggcgtcctctacgggatgtccgcccacaggctctcccaggagctcggcatagactacaaggaggcggaggcctttattgagcgctacttccagagcttccccaaggtgcgggcctggatagaaaggaccctggaggagggccggacgcggggctacgtggagaccctgttcggcaggaggcgctatgtgcccgacctggcctcccgggtccgctcggtgcgggagtgtgcggagcggatggccttcaacatgcccgtgcagggcaccgccgccgacctgatgaagatcgccatggtcaagctcttccccaggctaaagcccctgggggcccacctcctcctccaggtgcacgacgagctggtcctggaggtgcccgaggaccgggccgaggaggccaaggccctggtcaaggaggtcatggagaacacctaccccttggacgtgcccctcgaggtggaggtgggcgtgggtcgggactggctggaggcgaagggggattgaagcggtcgac

SEQ ID NO: 3014 - DNA, 2605 bp, Artificial Sequence
  Description of Artificial Sequence: Synthetic DNA sequence of Thermus Rt41A DNA Polymerase A774G
atgaaatacctgctgccgaccgctgctgctggtctgctgctcctcgctgcccagccggcgatggccatggatatcggaattaattcggatccgaattccccactttttgacctggaggaaccccccaagcgggtgcttctggtggacggccaccacctggcctaccgcaccttctacgccctgagcctcaccacctcccggggggagccggtgcagatggtctacggcttcgcccggagcctcctcaaggccttgaaggaggacgggcaggcggtggtcgtggtctttgacgccaaggccccctccttccgccacgaggcctacgaggcctacaaggcgggccgggcccccaccccggaggacttcccccgccagctcgccttggtcaagcggctggtggaccttctgggcctggtccgcctcgaggccccgggttacgaggcggacgacgtcctgggcaccctggccaagaaggccgaaagggaggggatggaggtgcgcatcctcacgggagaccgggacttcttccagctcctctccgagaaggtctcggtcctcctgccggacgggaccctggtcaccccaaaggacgtccaggagaagtacggggtgccgccggagcgctgggtggacttccgcgccctcacgggggaccgctcggacaacatccccggggtggcggggataggggagaagaccgcccttcgactcctcgcggagtgggggagcgtggagaacctcctgaagaacctggaccgggtgaagccggactcggtccggcgcaagatagaggcgcaccttgaggacctccgcctctccttggacctggcccgcatccgcaccgacctccccttggaggtggactttaaggccctgcgccgcaggacccccgacctggagggcctgagggcctttttggaggagctggagttcggaagcctccttcatgagttcggcctcctgggaggggagaagccccgggaggaggccccctggcccccgcccgaaggggccttcgtaggcttcctcctctcccgcaaggagcccatgtgggcggagcttctggccctggcggccgccgcagagggccgggtccaccgggcaacaagcccggttgaggccctggccgacctcaaggaggcccgggggttcctggccaaggacctggccgttttggccctgcgggagggggtggccctggaccccacggacgaccccctcctggtggcctacctcctggacccggccaacaccaaccccgagggggtggcccggcgctacgggggcgagttcacggaggacgcagcggagagggccctcctctccgagaggctcttccagaacctctttccccggctttccgagaagctcctctggctctaccaggaggtggagcggcccctctcccgggtcttggcccacatggaggcccggggggtgaggctggacgtcccccttctggaggccctctcctttgagctggagaaggagatggagcgcctggagggggaggtcttccgcttggccggccaccccttcaacctcaactcccgcgaccagctggaaagggtcctctttgacgagctgggccttaccccggtgggtcggacggagaagacgggcaagcgctccaccgcccagggggccctggaggccctccggggggcccaccccatcgtggagctcatcctccagtaccgggagctttccaagctcaaaagcacctacctggaccccctgccccggctcgtccacccgcggacgggccggcttcacacccgcttcaaccagacggccacggccacgggaaggctttccagctccgaccccaacctgcagaacatccccgtgcgcacccccttggggcagcgcatccgcaaggccttcgtggccgaggaggggtggctccttttggcggcggactactcccagatcgagcttcgggtcctggcccacctctcgggggacgagaacctgaagcgggtcttccgggaggggaaggacatccataccgaaaccgccgcctggatgttcggcttagaccccgctctagtggatccaaagatgcgccgggcggccaagacggtcaacttcggcgtcctctacgggatgtccgcccacaggctctcccaggagctcggcatagactacaaggaggcggaggcctttattgagcgctacttccagagcttccccaaggtgcgggcctggatagaaaggaccctggaggagggccggacgcggggctacgtggagaccctgttcggcaggaggcgctatgtgcccgacctggcctcccgggtccgctcggtgcgggagggtgcggagcggatggccttcaacatgcccgtgcagggcaccgccgccgacctgatgaagatcgccatggtcaagctcttccccaggctaaagcccctgggggcccacctcctcctccaggtgcacgacgagctggtcctggaggtgcccgaggaccgggccgaggaggccaaggccctggtcaaggaggtcatggagaacacctaccccttggacgtgcccctcgaggtggaggtgggcgtgggtcgggactggctggaggcgaagggggattgaagcggtcgac

SEQ ID NO: 3015 - DNA, 2605 bp, Artificial Sequence
  Description of Artificial Sequence: Synthetic DNA sequence of Thermus Rt41A DNA Polymerase A774Q
atgaaatacctgctgccgaccgctgctgctggtctgctgctcctcgctgcccagccggcgatggccatggatatcggaattaattcggatccgaattccccactttttgacctggaggaaccccccaagcgggtgcttctggtggacggccaccacctggcctaccgcaccttctacgccctgagcctcaccacctcccggggggagccggtgcagatggtctacggcttcgcccggagcctcctcaaggccttgaaggaggacgggcaggcggtggtcgtggtctttgacgccaaggccccctccttccgccacgaggcctacgaggcctacaaggcgggccgggcccccaccccggaggacttcccccgccagctcgccttggtcaagcggctggtggaccttctgggcctggtccgcctcgaggccccgggttacgaggcggacgacgtcctgggcaccctggccaagaaggccgaaagggaggggatggaggtgcgcatcctcacgggagaccgggacttcttccagctcctctccgagaaggtctcggtcctcctgccggacgggaccctggtcaccccaaaggacgtccaggagaagtacggggtgccgccggagcgctgggtggacttccgcgccctcacgggggaccgctcggacaacatccccggggtggcggggataggggagaagaccgcccttcgactcctcgcggagtgggggagcgtggagaacctcctgaagaacctggaccgggtgaagccggactcggtccggcgcaagatagaggcgcaccttgaggacctccgcctctccttggacctggcccgcatccgcaccgacctccccttggaggtggactttaaggccctgcgccgcaggacccccgacctggagggcctgagggcctttttggaggagctggagttcggaagcctccttcatgagttcggcctcctgggaggggagaagccccgggaggaggccccctggcccccgcccgaaggggccttcgtaggcttcctcctctcccgcaaggagcccatgtgggcggagcttctggccctggcggccgccgcagagggccgggtccaccgggcaacaagcccggttgaggccctggccgacctcaaggaggcccgggggttcctggccaaggacctggccgttttggccctgcgggagggggtggccctggaccccacggacgaccccctcctggtggcctacctcctggacccggccaacaccaaccccgagggggtggcccggcgctacgggggcgagttcacggaggacgcagcggagagggccctcctctccgagaggctcttccagaacctctttccccggctttccgagaagctcctctggctctaccaggaggtggagcggcccctctcccgggtcttggcccacatggaggcccggggggtgaggctggacgtcccccttctggaggccctctcctttgagctggagaaggagatggagcgcctggagggggaggtcttccgcttggccggccaccccttcaacctcaactcccgcgaccagctggaaagggtcctctttgacgagctgggccttaccccggtgggtcggacggagaagacgggcaagcgctccaccgcccagggggccctggaggccctccggggggcccaccccatcgtggagctcatcctccagtaccgggagctttccaagctcaaaagcacctacctggaccccctgccccggctcgtccacccgcggacgggccggcttcacacccgcttcaaccagacggccacggccacgggaaggctttccagctccgaccccaacctgcagaacatccccgtgcgcacccccttggggcagcgcatccgcaaggccttcgtggccgaggaggggtggctccttttggcggcggactactcccagatcgagcttcgggtcctggcccacctctcgggggacgagaacctgaagcgggtcttccgggaggggaaggacatccataccgaaaccgccgcctggatgttcggcttagaccccgctctagtggatccaaagatgcgccgggcggccaagacggtcaacttcggcgtcctctacgggatgtccgcccacaggctctcccaggagctcggcatagactacaaggaggcggaggcctttattgagcgctacttccagagcttccccaaggtgcgggcctggatagaaaggaccctggaggagggccggacgcggggctacgtggagaccctgttcggcaggaggcgctatgtgcccgacctggcctcccgggtccgctcggtgcgggagcaagcggagcggatggccttcaacatgcccgtgcagggcaccgccgccgacctgatgaagatcgccatggtcaagctcttccccaggctaaagcccctgggggcccacctcctcctccaggtgcacgacgagctggtcctggaggtgcccgaggaccgggccgaggaggccaaggccctggtcaaggaggtcatggagaacacctaccccttggacgtgcccctcgaggtggaggtgggcgtgggtcgggactggctggaggcgaagggggattgaagcggtcgac

SEQ ID NO: 3016 - DNA, 2605 bp, Artificial Sequence
  Description of Artificial Sequence: Synthetic DNA sequence of Thermus Rt41A DNA Polymerase A774H
atgaaatacctgctgccgaccgctgctgctggtctgctgctcctcgctgcccagccggcgatggccatggatatcggaattaattcggatccgaattccccactttttgacctggaggaaccccccaagcgggtgcttctggtggacggccaccacctggcctaccgcaccttctacgccctgagcctcaccacctcccggggggagccggtgcagatggtctacggcttcgcccggagcctcctcaaggccttgaaggaggacgggcaggcggtggtcgtggtctttgacgccaaggccccctccttccgccacgaggcctacgaggcctacaaggcgggccgggcccccaccccggaggacttcccccgccagctcgccttggtcaagcggctggtggaccttctgggcctggtccgcctcgaggccccgggttacgaggcggacgacgtcctgggcaccctggccaagaaggccgaaagggaggggatggaggtgcgcatcctcacgggagaccgggacttcttccagctcctctccgagaaggtctcggtcctcctgccggacgggaccctggtcaccccaaaggacgtccaggagaagtacggggtgccgccggagcgctgggtggacttccgcgccctcacgggggaccgctcggacaacatccccggggtggcggggataggggagaagaccgcccttcgactcctcgcggagtgggggagcgtggagaacctcctgaagaacctggaccgggtgaagccggactcggtccggcgcaagatagaggcgcaccttgaggacctccgcctctccttggacctggcccgcatccgcaccgacctccccttggaggtggactttaaggccctgcgccgcaggacccccgacctggagggcctgagggcctttttggaggagctggagttcggaagcctccttcatgagttcggcctcctgggaggggagaagccccgggaggaggccccctggcccccgcccgaaggggccttcgtaggcttcctcctctcccgcaaggagcccatgtgggcggagcttctggccctggcggccgccgcagagggccgggtccaccgggcaacaagcccggttgaggccctggccgacctcaaggaggcccgggggttcctggccaaggacctggccgttttggccctgcgggagggggtggccctggaccccacggacgaccccctcctggtggcctacctcctggacccggccaacaccaaccccgagggggtggcccggcgctacgggggcgagttcacggaggacgcagcggagagggccctcctctccgagaggctcttccagaacctctttccccggctttccgagaagctcctctggctctaccaggaggtggagcggcccctctcccgggtcttggcccacatggaggcccggggggtgaggctggacgtcccccttctggaggccctctcctttgagctggagaaggagatggagcgcctggagggggaggtcttccgcttggccggccaccccttcaacctcaactcccgcgaccagctggaaagggtcctctttgacgagctgggccttaccccggtgggtcggacggagaagacgggcaagcgctccaccgcccagggggccctggaggccctccggggggcccaccccatcgtggagctcatcctccagtaccgggagctttccaagctcaaaagcacctacctggaccccctgccccggctcgtccacccgcggacgggccggcttcacacccgcttcaaccagacggccacggccacgggaaggctttccagctccgaccccaacctgcagaacatccccgtgcgcacccccttggggcagcgcatccgcaaggccttcgtggccgaggaggggtggctccttttggcggcggactactcccagatcgagcttcgggtcctggcccacctctcgggggacgagaacctgaagcgggtcttccgggaggggaaggacatccataccgaaaccgccgcctggatgttcggcttagaccccgctctagtggatccaaagatgcgccgggcggccaagacggtcaacttcggcgtcctctacgggatgtccgcccacaggctctcccaggagctcggcatagactacaaggaggcggaggcctttattgagcgctacttccagagcttccccaaggtgcgggcctggatagaaaggaccctggaggagggccggacgcggggctacgtggagaccctgttcggcaggaggcgctatgtgcccgacctggcctcccgggtccgctcggtgcgggagcatgcggagcggatggccttcaacatgcccgtgcagggcaccgccgccgacctgatgaagatcgccatggtcaagctcttccccaggctaaagcccctgggggcccacctcctcctccaggtgcacgacgagctggtcctggaggtgcccgaggaccgggccgaggaggccaaggccctggtcaaggaggtcatggagaacacctaccccttggacgtgcccctcgaggtggaggtgggcgtgggtcgggactggctggaggcgaagggggattgaagcggtcgac

SEQ ID NO: 3017 - DNA, 2605 bp, Artificial Sequence
  Description of Artificial Sequence: Synthetic DNA sequence of Thermus Rt41A DNA Polymerase A774I
atgaaatacctgctgccgaccgctgctgctggtctgctgctcctcgctgcccagccggcgatggccatggatatcggaattaattcggatccgaattccccactttttgacctggaggaaccccccaagcgggtgcttctggtggacggccaccacctggcctaccgcaccttctacgccctgagcctcaccacctcccggggggagccggtgcagatggtctacggcttcgcccggagcctcctcaaggccttgaaggaggacgggcaggcggtggtcgtggtctttgacgccaaggccccctccttccgccacgaggcctacgaggcctacaaggcgggccgggcccccaccccggaggacttcccccgccagctcgccttggtcaagcggctggtggaccttctgggcctggtccgcctcgaggccccgggttacgaggcggacgacgtcctgggcaccctggccaagaaggccgaaagggaggggatggaggtgcgcatcctcacgggagaccgggacttcttccagctcctctccgagaaggtctcggtcctcctgccggacgggaccctggtcaccccaaaggacgtccaggagaagtacggggtgccgccggagcgctgggtggacttccgcgccctcacgggggaccgctcggacaacatccccggggtggcggggataggggagaagaccgcccttcgactcctcgcggagtgggggagcgtggagaacctcctgaagaacctggaccgggtgaagccggactcggtccggcgcaagatagaggcgcaccttgaggacctccgcctctccttggacctggcccgcatccgcaccgacctccccttggaggtggactttaaggccctgcgccgcaggacccccgacctggagggcctgagggcctttttggaggagctggagttcggaagcctccttcatgagttcggcctcctgggaggggagaagccccgggaggaggccccctggcccccgcccgaaggggccttcgtaggcttcctcctctcccgcaaggagcccatgtgggcggagcttctggccctggcggccgccgcagagggccgggtccaccgggcaacaagcccggttgaggccctggccgacctcaaggaggcccgggggttcctggccaaggacctggccgttttggccctgcgggagggggtggccctggaccccacggacgaccccctcctggtggcctacctcctggacccggccaacaccaaccccgagggggtggcccggcgctacgggggcgagttcacggaggacgcagcggagagggccctcctctccgagaggctcttccagaacctctttccccggctttccgagaagctcctctggctctaccaggaggtggagcggcccctctcccgggtcttggcccacatggaggcccggggggtgaggctggacgtcccccttctggaggccctctcctttgagctggagaaggagatggagcgcctggagggggaggtcttccgcttggccggccaccccttcaacctcaactcccgcgaccagctggaaagggtcctctttgacgagctgggccttaccccggtgggtcggacggagaagacgggcaagcgctccaccgcccagggggccctggaggccctccggggggcccaccccatcgtggagctcatcctccagtaccgggagctttccaagctcaaaagcacctacctggaccccctgccccggctcgtccacccgcggacgggccggcttcacacccgcttcaaccagacggccacggccacgggaaggctttccagctccgaccccaacctgcagaacatccccgtgcgcacccccttggggcagcgcatccgcaaggccttcgtggccgaggaggggtggctccttttggcggcggactactcccagatcgagcttcgggtcctggcccacctctcgggggacgagaacctgaagcgggtcttccgggaggggaaggacatccataccgaaaccgccgcctggatgttcggcttagaccccgctctagtggatccaaagatgcgccgggcggccaagacggtcaacttcggcgtcctctacgggatgtccgcccacaggctctcccaggagctcggcatagactacaaggaggcggaggcctttattgagcgctacttccagagcttccccaaggtgcgggcctggatagaaaggaccctggaggagggccggacgcggggctacgtggagaccctgttcggcaggaggcgctatgtgcccgacctggcctcccgggtccgctcggtgcgggagattgcggagcggatggccttcaacatgcccgtgcagggcaccgccgccgacctgatgaagatcgccatggtcaagctcttccccaggctaaagcccctgggggcccacctcctcctccaggtgcacgacgagctggtcctggaggtgcccgaggaccgggccgaggaggccaaggccctggtcaaggaggtcatggagaacacctaccccttggacgtgcccctcgaggtggaggtgggcgtgggtcgggactggctggaggcgaagggggattgaagcggtcgac

SEQ ID NO: 3018 - DNA, 2605 bp, Artificial Sequence
  Description of Artificial Sequence: Synthetic DNA sequence of Thermus Rt41A DNA Polymerase A774L
atgaaatacctgctgccgaccgctgctgctggtctgctgctcctcgctgcccagccggcgatggccatggatatcggaattaattcggatccgaattccccactttttgacctggaggaaccccccaagcgggtgcttctggtggacggccaccacctggcctaccgcaccttctacgccctgagcctcaccacctcccggggggagccggtgcagatggtctacggcttcgcccggagcctcctcaaggccttgaaggaggacgggcaggcggtggtcgtggtctttgacgccaaggccccctccttccgccacgaggcctacgaggcctacaaggcgggccgggcccccaccccggaggacttcccccgccagctcgccttggtcaagcggctggtggaccttctgggcctggtccgcctcgaggccccgggttacgaggcggacgacgtcctgggcaccctggccaagaaggccgaaagggaggggatggaggtgcgcatcctcacgggagaccgggacttcttccagctcctctccgagaaggtctcggtcctcctgccggacgggaccctggtcaccccaaaggacgtccaggagaagtacggggtgccgccggagcgctgggtggacttccgcgccctcacgggggaccgctcggacaacatccccggggtggcggggataggggagaagaccgcccttcgactcctcgcggagtgggggagcgtggagaacctcctgaagaacctggaccgggtgaagccggactcggtccggcgcaagatagaggcgcaccttgaggacctccgcctctccttggacctggcccgcatccgcaccgacctccccttggaggtggactttaaggccctgcgccgcaggacccccgacctggagggcctgagggcctttttggaggagctggagttcggaagcctccttcatgagttcggcctcctgggaggggagaagccccgggaggaggccccctggcccccgcccgaaggggccttcgtaggcttcctcctctcccgcaaggagcccatgtgggcggagcttctggccctggcggccgccgcagagggccgggtccaccgggcaacaagcccggttgaggccctggccgacctcaaggaggcccgggggttcctggccaaggacctggccgttttggccctgcgggagggggtggccctggaccccacggacgaccccctcctggtggcctacctcctggacccggccaacaccaaccccgagggggtggcccggcgctacgggggcgagttcacggaggacgcagcggagagggccctcctctccgagaggctcttccagaacctctttccccggctttccgagaagctcctctggctctaccaggaggtggagcggcccctctcccgggtcttggcccacatggaggcccggggggtgaggctggacgtcccccttctggaggccctctcctttgagctggagaaggagatggagcgcctggagggggaggtcttccgcttggccggccaccccttcaacctcaactcccgcgaccagctggaaagggtcctctttgacgagctgggccttaccccggtgggtcggacggagaagacgggcaagcgctccaccgcccagggggccctggaggccctccggggggcccaccccatcgtggagctcatcctccagtaccgggagctttccaagctcaaaagcacctacctggaccccctgccccggctcgtccacccgcggacgggccggcttcacacccgcttcaaccagacggccacggccacgggaaggctttccagctccgaccccaacctgcagaacatccccgtgcgcacccccttggggcagcgcatccgcaaggccttcgtggccgaggaggggtggctccttttggcggcggactactcccagatcgagcttcgggtcctggcccacctctcgggggacgagaacctgaagcgggtcttccgggaggggaaggacatccataccgaaaccgccgcctggatgttcggcttagaccccgctctagtggatccaaagatgcgccgggcggccaagacggtcaacttcggcgtcctctacgggatgtccgcccacaggctctcccaggagctcggcatagactacaaggaggcggaggcctttattgagcgctacttccagagcttccccaaggtgcgggcctggatagaaaggaccctggaggagggccggacgcggggctacgtggagaccctgttcggcaggaggcgctatgtgcccgacctggcctcccgggtccgctcggtgcgggagttagcggagcggatggccttcaacatgcccgtgcagggcaccgccgccgacctgatgaagatcgccatggtcaagctcttccccaggctaaagcccctgggggcccacctcctcctccaggtgcacgacgagctggtcctggaggtgcccgaggaccgggccgaggaggccaaggccctggtcaaggaggtcatggagaacacctaccccttggacgtgcccctcgaggtggaggtgggcgtgggtcgggactggctggaggcgaagggggattgaagcggtcgac

SEQ ID NO: 3019 - DNA, 2605 bp, Artificial Sequence
  Description of Artificial Sequence: Synthetic DNA sequence of Thermus Rt41A DNA Polymerase A774K
atgaaatacctgctgccgaccgctgctgctggtctgctgctcctcgctgcccagccggcgatggccatggatatcggaattaattcggatccgaattccccactttttgacctggaggaaccccccaagcgggtgcttctggtggacggccaccacctggcctaccgcaccttctacgccctgagcctcaccacctcccggggggagccggtgcagatggtctacggcttcgcccggagcctcctcaaggccttgaaggaggacgggcaggcggtggtcgtggtctttgacgccaaggccccctccttccgccacgaggcctacgaggcctacaaggcgggccgggcccccaccccggaggacttcccccgccagctcgccttggtcaagcggctggtggaccttctgggcctggtccgcctcgaggccccgggttacgaggcggacgacgtcctgggcaccctggccaagaaggccgaaagggaggggatggaggtgcgcatcctcacgggagaccgggacttcttccagctcctctccgagaaggtctcggtcctcctgccggacgggaccctggtcaccccaaaggacgtccaggagaagtacggggtgccgccggagcgctgggtggacttccgcgccctcacgggggaccgctcggacaacatccccggggtggcggggataggggagaagaccgcccttcgactcctcgcggagtgggggagcgtggagaacctcctgaagaacctggaccgggtgaagccggactcggtccggcgcaagatagaggcgcaccttgaggacctccgcctctccttggacctggcccgcatccgcaccgacctccccttggaggtggactttaaggccctgcgccgcaggacccccgacctggagggcctgagggcctttttggaggagctggagttcggaagcctccttcatgagttcggcctcctgggaggggagaagccccgggaggaggccccctggcccccgcccgaaggggccttcgtaggcttcctcctctcccgcaaggagcccatgtgggcggagcttctggccctggcggccgccgcagagggccgggtccaccgggcaacaagcccggttgaggccctggccgacctcaaggaggcccgggggttcctggccaaggacctggccgttttggccctgcgggagggggtggccctggaccccacggacgaccccctcctggtggcctacctcctggacccggccaacaccaaccccgagggggtggcccggcgctacgggggcgagttcacggaggacgcagcggagagggccctcctctccgagaggctcttccagaacctctttccccggctttccgagaagctcctctggctctaccaggaggtggagcggcccctctcccgggtcttggcccacatggaggcccggggggtgaggctggacgtcccccttctggaggccctctcctttgagctggagaaggagatggagcgcctggagggggaggtcttccgcttggccggccaccccttcaacctcaactcccgcgaccagctggaaagggtcctctttgacgagctgggccttaccccggtgggtcggacggagaagacgggcaagcgctccaccgcccagggggccctggaggccctccggggggcccaccccatcgtggagctcatcctccagtaccgggagctttccaagctcaaaagcacctacctggaccccctgccccggctcgtccacccgcggacgggccggcttcacacccgcttcaaccagacggccacggccacgggaaggctttccagctccgaccccaacctgcagaacatccccgtgcgcacccccttggggcagcgcatccgcaaggccttcgtggccgaggaggggtggctccttttggcggcggactactcccagatcgagcttcgggtcctggcccacctctcgggggacgagaacctgaagcgggtcttccgggaggggaaggacatccataccgaaaccgccgcctggatgttcggcttagaccccgctctagtggatccaaagatgcgccgggcggccaagacggtcaacttcggcgtcctctacgggatgtccgcccacaggctctcccaggagctcggcatagactacaaggaggcggaggcctttattgagcgctacttccagagcttccccaaggtgcgggcctggatagaaaggaccctggaggagggccggacgcggggctacgtggagaccctgttcggcaggaggcgctatgtgcccgacctggcctcccgggtccgctcggtgcgggagaaagcggagcggatggccttcaacatgcccgtgcagggcaccgccgccgacctgatgaagatcgccatggtcaagctcttccccaggctaaagcccctgggggcccacctcctcctccaggtgcacgacgagctggtcctggaggtgcccgaggaccgggccgaggaggccaaggccctggtcaaggaggtcatggagaacacctaccccttggacgtgcccctcgaggtggaggtgggcgtgggtcgggactggctggaggcgaagggggattgaagcggtcgac

SEQ ID NO: 3020 - DNA, 2605 bp, Artificial Sequence
  Description of Artificial Sequence: Synthetic DNA sequence of Thermus Rt41A DNA Polymerase A774E
atgaaatacctgctgccgaccgctgctgctggtctgctgctcctcgctgcccagccggcgatggccatggatatcggaattaattcggatccgaattccccactttttgacctggaggaaccccccaagcgggtgcttctggtggacggccaccacctggcctaccgcaccttctacgccctgagcctcaccacctcccggggggagccggtgcagatggtctacggcttcgcccggagcctcctcaaggccttgaaggaggacgggcaggcggtggtcgtggtctttgacgccaaggccccctccttccgccacgaggcctacgaggcctacaaggcgggccgggcccccaccccggaggacttcccccgccagctcgccttggtcaagcggctggtggaccttctgggcctggtccgcctcgaggccccgggttacgaggcggacgacgtcctgggcaccctggccaagaaggccgaaagggaggggatggaggtgcgcatcctcacgggagaccgggacttcttccagctcctctccgagaaggtctcggtcctcctgccggacgggaccctggtcaccccaaaggacgtccaggagaagtacggggtgccgccggagcgctgggtggacttccgcgccctcacgggggaccgctcggacaacatccccggggtggcggggataggggagaagaccgcccttcgactcctcgcggagtgggggagcgtggagaacctcctgaagaacctggaccgggtgaagccggactcggtccggcgcaagatagaggcgcaccttgaggacctccgcctctccttggacctggcccgcatccgcaccgacctccccttggaggtggactttaaggccctgcgccgcaggacccccgacctggagggcctgagggcctttttggaggagctggagttcggaagcctccttcatgagttcggcctcctgggaggggagaagccccgggaggaggccccctggcccccgcccgaaggggccttcgtaggcttcctcctctcccgcaaggagcccatgtgggcggagcttctggccctggcggccgccgcagagggccgggtccaccgggcaacaagcccggttgaggccctggccgacctcaaggaggcccgggggttcctggccaaggacctggccgttttggccctgcgggagggggtggccctggaccccacggacgaccccctcctggtggcctacctcctggacccggccaacaccaaccccgagggggtggcccggcgctacgggggcgagttcacggaggacgcagcggagagggccctcctctccgagaggctcttccagaacctctttccccggctttccgagaagctcctctggctctaccaggaggtggagcggcccctctcccgggtcttggcccacatggaggcccggggggtgaggctggacgtcccccttctggaggccctctcctttgagctggagaaggagatggagcgcctggagggggaggtcttccgcttggccggccaccccttcaacctcaactcccgcgaccagctggaaagggtcctctttgacgagctgggccttaccccggtgggtcggacggagaagacgggcaagcgctccaccgcccagggggccctggaggccctccggggggcccaccccatcgtggagctcatcctccagtaccgggagctttccaagctcaaaagcacctacctggaccccctgccccggctcgtccacccgcggacgggccggcttcacacccgcttcaaccagacggccacggccacgggaaggctttccagctccgaccccaacctgcagaacatccccgtgcgcacccccttggggcagcgcatccgcaaggccttcgtggccgaggaggggtggctccttttggcggcggactactcccagatcgagcttcgggtcctggcccacctctcgggggacgagaacctgaagcgggtcttccgggaggggaaggacatccataccgaaaccgccgcctggatgttcggcttagaccccgctctagtggatccaaagatgcgccgggcggccaagacggtcaacttcggcgtcctctacgggatgtccgcccacaggctctcccaggagctcggcatagactacaaggaggcggaggcctttattgagcgctacttccagagcttccccaaggtgcgggcctggatagaaaggaccctggaggagggccggacgcggggctacgtggagaccctgttcggcaggaggcgctatgtgcccgacctggcctcccgggtccgctcggtgcgggaggaagcggagcggatggccttcaacatgcccgtgcagggcaccgccgccgacctgatgaagatcgccatggtcaagctcttccccaggctaaagcccctgggggcccacctcctcctccaggtgcacgacgagctggtcctggaggtgcccgaggaccgggccgaggaggccaaggccctggtcaaggaggtcatggagaacacctaccccttggacgtgcccctcgaggtggaggtgggcgtgggtcgggactggctggaggcgaagggggattgaagcggtcgac

SEQ ID NO: 3021 - DNA, 2605 bp, Artificial Sequence
  Description of Artificial Sequence: Synthetic DNA sequence of Thermus Rt41A DNA Polymerase A774D
atgaaatacctgctgccgaccgctgctgctggtctgctgctcctcgctgcccagccggcgatggccatggatatcggaattaattcggatccgaattccccactttttgacctggaggaaccccccaagcgggtgcttctggtggacggccaccacctggcctaccgcaccttctacgccctgagcctcaccacctcccggggggagccggtgcagatggtctacggcttcgcccggagcctcctcaaggccttgaaggaggacgggcaggcggtggtcgtggtctttgacgccaaggccccctccttccgccacgaggcctacgaggcctacaaggcgggccgggcccccaccccggaggacttcccccgccagctcgccttggtcaagcggctggtggaccttctgggcctggtccgcctcgaggccccgggttacgaggcggacgacgtcctgggcaccctggccaagaaggccgaaagggaggggatggaggtgcgcatcctcacgggagaccgggacttcttccagctcctctccgagaaggtctcggtcctcctgccggacgggaccctggtcaccccaaaggacgtccaggagaagtacggggtgccgccggagcgctgggtggacttccgcgccctcacgggggaccgctcggacaacatccccggggtggcggggataggggagaagaccgcccttcgactcctcgcggagtgggggagcgtggagaacctcctgaagaacctggaccgggtgaagccggactcggtccggcgcaagatagaggcgcaccttgaggacctccgcctctccttggacctggcccgcatccgcaccgacctccccttggaggtggactttaaggccctgcgccgcaggacccccgacctggagggcctgagggcctttttggaggagctggagttcggaagcctccttcatgagttcggcctcctgggaggggagaagccccgggaggaggccccctggcccccgcccgaaggggccttcgtaggcttcctcctctcccgcaaggagcccatgtgggcggagcttctggccctggcggccgccgcagagggccgggtccaccgggcaacaagcccggttgaggccctggccgacctcaaggaggcccgggggttcctggccaaggacctggccgttttggccctgcgggagggggtggccctggaccccacggacgaccccctcctggtggcctacctcctggacccggccaacaccaaccccgagggggtggcccggcgctacgggggcgagttcacggaggacgcagcggagagggccctcctctccgagaggctcttccagaacctctttccccggctttccgagaagctcctctggctctaccaggaggtggagcggcccctctcccgggtcttggcccacatggaggcccggggggtgaggctggacgtcccccttctggaggccctctcctttgagctggagaaggagatggagcgcctggagggggaggtcttccgcttggccggccaccccttcaacctcaactcccgcgaccagctggaaagggtcctctttgacgagctgggccttaccccggtgggtcggacggagaagacgggcaagcgctccaccgcccagggggccctggaggccctccggggggcccaccccatcgtggagctcatcctccagtaccgggagctttccaagctcaaaagcacctacctggaccccctgccccggctcgtccacccgcggacgggccggcttcacacccgcttcaaccagacggccacggccacgggaaggctttccagctccgaccccaacctgcagaacatccccgtgcgcacccccttggggcagcgcatccgcaaggccttcgtggccgaggaggggtggctccttttggcggcggactactcccagatcgagcttcgggtcctggcccacctctcgggggacgagaacctgaagcgggtcttccgggaggggaaggacatccataccgaaaccgccgcctggatgttcggcttagaccccgctctagtggatccaaagatgcgccgggcggccaagacggtcaacttcggcgtcctctacgggatgtccgcccacaggctctcccaggagctcggcatagactacaaggaggcggaggcctttattgagcgctacttccagagcttccccaaggtgcgggcctggatagaaaggaccctggaggagggccggacgcggggctacgtggagaccctgttcggcaggaggcgctatgtgcccgacctggcctcccgggtccgctcggtgcgggaggatgcggagcggatggccttcaacatgcccgtgcagggcaccgccgccgacctgatgaagatcgccatggtcaagctcttccccaggctaaagcccctgggggcccacctcctcctccaggtgcacgacgagctggtcctggaggtgcccgaggaccgggccgaggaggccaaggccctggtcaaggaggtcatggagaacacctaccccttggacgtgcccctcgaggtggaggtgggcgtgggtcgggactggctggaggcgaagggggattgaagcggtcgac

SEQ ID NO: 3022 - DNA, 2605 bp, Artificial Sequence
  Description of Artificial Sequence: Synthetic DNA sequence of Thermus Rt41A DNA Polymerase A774F
atgaaatacctgctgccgaccgctgctgctggtctgctgctcctcgctgcccagccggcgatggccatggatatcggaattaattcggatccgaattccccactttttgacctggaggaaccccccaagcgggtgcttctggtggacggccaccacctggcctaccgcaccttctacgccctgagcctcaccacctcccggggggagccggtgcagatggtctacggcttcgcccggagcctcctcaaggccttgaaggaggacgggcaggcggtggtcgtggtctttgacgccaaggccccctccttccgccacgaggcctacgaggcctacaaggcgggccgggcccccaccccggaggacttcccccgccagctcgccttggtcaagcggctggtggaccttctgggcctggtccgcctcgaggccccgggttacgaggcggacgacgtcctgggcaccctggccaagaaggccgaaagggaggggatggaggtgcgcatcctcacgggagaccgggacttcttccagctcctctccgagaaggtctcggtcctcctgccggacgggaccctggtcaccccaaaggacgtccaggagaagtacggggtgccgccggagcgctgggtggacttccgcgccctcacgggggaccgctcggacaacatccccggggtggcggggataggggagaagaccgcccttcgactcctcgcggagtgggggagcgtggagaacctcctgaagaacctggaccgggtgaagccggactcggtccggcgcaagatagaggcgcaccttgaggacctccgcctctccttggacctggcccgcatccgcaccgacctccccttggaggtggactttaaggccctgcgccgcaggacccccgacctggagggcctgagggcctttttggaggagctggagttcggaagcctccttcatgagttcggcctcctgggaggggagaagccccgggaggaggccccctggcccccgcccgaaggggccttcgtaggcttcctcctctcccgcaaggagcccatgtgggcggagcttctggccctggcggccgccgcagagggccgggtccaccgggcaacaagcccggttgaggccctggccgacctcaaggaggcccgggggttcctggccaaggacctggccgttttggccctgcgggagggggtggccctggaccccacggacgaccccctcctggtggcctacctcctggacccggccaacaccaaccccgagggggtggcccggcgctacgggggcgagttcacggaggacgcagcggagagggccctcctctccgagaggctcttccagaacctctttccccggctttccgagaagctcctctggctctaccaggaggtggagcggcccctctcccgggtcttggcccacatggaggcccggggggtgaggctggacgtcccccttctggaggccctctcctttgagctggagaaggagatggagcgcctggagggggaggtcttccgcttggccggccaccccttcaacctcaactcccgcgaccagctggaaagggtcctctttgacgagctgggccttaccccggtgggtcggacggagaagacgggcaagcgctccaccgcccagggggccctggaggccctccggggggcccaccccatcgtggagctcatcctccagtaccgggagctttccaagctcaaaagcacctacctggaccccctgccccggctcgtccacccgcggacgggccggcttcacacccgcttcaaccagacggccacggccacgggaaggctttccagctccgaccccaacctgcagaacatccccgtgcgcacccccttggggcagcgcatccgcaaggccttcgtggccgaggaggggtggctccttttggcggcggactactcccagatcgagcttcgggtcctggcccacctctcgggggacgagaacctgaagcgggtcttccgggaggggaaggacatccataccgaaaccgccgcctggatgttcggcttagaccccgctctagtggatccaaagatgcgccgggcggccaagacggtcaacttcggcgtcctctacgggatgtccgcccacaggctctcccaggagctcggcatagactacaaggaggcggaggcctttattgagcgctacttccagagcttccccaaggtgcgggcctggatagaaaggaccctggaggagggccggacgcggggctacgtggagaccctgttcggcaggaggcgctatgtgcccgacctggcctcccgggtccgctcggtgcgggagtttgcggagcggatggccttcaacatgcccgtgcagggcaccgccgccgacctgatgaagatcgccatggtcaagctcttccccaggctaaagcccctgggggcccacctcctcctccaggtgcacgacgagctggtcctggaggtgcccgaggaccgggccgaggaggccaaggccctggtcaaggaggtcatggagaacacctaccccttggacgtgcccctcgaggtggaggtgggcgtgggtcgggactggctggaggcgaagggggattgaagcggtcgac

SEQ ID NO: 3023 - DNA, 2605 bp, Artificial Sequence
  Description of Artificial Sequence: Synthetic DNA sequence of Thermus Rt41A DNA Polymerase A774S
atgaaatacctgctgccgaccgctgctgctggtctgctgctcctcgctgcccagccggcgatggccatggatatcggaattaattcggatccgaattccccactttttgacctggaggaaccccccaagcgggtgcttctggtggacggccaccacctggcctaccgcaccttctacgccctgagcctcaccacctcccggggggagccggtgcagatggtctacggcttcgcccggagcctcctcaaggccttgaaggaggacgggcaggcggtggtcgtggtctttgacgccaaggccccctccttccgccacgaggcctacgaggcctacaaggcgggccgggcccccaccccggaggacttcccccgccagctcgccttggtcaagcggctggtggaccttctgggcctggtccgcctcgaggccccgggttacgaggcggacgacgtcctgggcaccctggccaagaaggccgaaagggaggggatggaggtgcgcatcctcacgggagaccgggacttcttccagctcctctccgagaaggtctcggtcctcctgccggacgggaccctggtcaccccaaaggacgtccaggagaagtacggggtgccgccggagcgctgggtggacttccgcgccctcacgggggaccgctcggacaacatccccggggtggcggggataggggagaagaccgcccttcgactcctcgcggagtgggggagcgtggagaacctcctgaagaacctggaccgggtgaagccggactcggtccggcgcaagatagaggcgcaccttgaggacctccgcctctccttggacctggcccgcatccgcaccgacctccccttggaggtggactttaaggccctgcgccgcaggacccccgacctggagggcctgagggcctttttggaggagctggagttcggaagcctccttcatgagttcggcctcctgggaggggagaagccccgggaggaggccccctggcccccgcccgaaggggccttcgtaggcttcctcctctcccgcaaggagcccatgtgggcggagcttctggccctggcggccgccgcagagggccgggtccaccgggcaacaagcccggttgaggccctggccgacctcaaggaggcccgggggttcctggccaaggacctggccgttttggccctgcgggagggggtggccctggaccccacggacgaccccctcctggtggcctacctcctggacccggccaacaccaaccccgagggggtggcccggcgctacgggggcgagttcacggaggacgcagcggagagggccctcctctccgagaggctcttccagaacctctttccccggctttccgagaagctcctctggctctaccaggaggtggagcggcccctctcccgggtcttggcccacatggaggcccggggggtgaggctggacgtcccccttctggaggccctctcctttgagctggagaaggagatggagcgcctggagggggaggtcttccgcttggccggccaccccttcaacctcaactcccgcgaccagctggaaagggtcctctttgacgagctgggccttaccccggtgggtcggacggagaagacgggcaagcgctccaccgcccagggggccctggaggccctccggggggcccaccccatcgtggagctcatcctccagtaccgggagctttccaagctcaaaagcacctacctggaccccctgccccggctcgtccacccgcggacgggccggcttcacacccgcttcaaccagacggccacggccacgggaaggctttccagctccgaccccaacctgcagaacatccccgtgcgcacccccttggggcagcgcatccgcaaggccttcgtggccgaggaggggtggctccttttggcggcggactactcccagatcgagcttcgggtcctggcccacctctcgggggacgagaacctgaagcgggtcttccgggaggggaaggacatccataccgaaaccgccgcctggatgttcggcttagaccccgctctagtggatccaaagatgcgccgggcggccaagacggtcaacttcggcgtcctctacgggatgtccgcccacaggctctcccaggagctcggcatagactacaaggaggcggaggcctttattgagcgctacttccagagcttccccaaggtgcgggcctggatagaaaggaccctggaggagggccggacgcggggctacgtggagaccctgttcggcaggaggcgctatgtgcccgacctggcctcccgggtccgctcggtgcgggagtctgcggagcggatggccttcaacatgcccgtgcagggcaccgccgccgacctgatgaagatcgccatggtcaagctcttccccaggctaaagcccctgggggcccacctcctcctccaggtgcacgacgagctggtcctggaggtgcccgaggaccgggccgaggaggccaaggccctggtcaaggaggtcatggagaacacctaccccttggacgtgcccctcgaggtggaggtgggcgtgggtcgggactggctggaggcgaagggggattgaagcggtcgac

SEQ ID NO: 3024 - DNA, 2605 bp, Artificial Sequence
  Description of Artificial Sequence: Synthetic DNA sequence of Thermus Rt41A DNA Polymerase A774Y
atgaaatacctgctgccgaccgctgctgctggtctgctgctcctcgctgcccagccggcgatggccatggatatcggaattaattcggatccgaattccccactttttgacctggaggaaccccccaagcgggtgcttctggtggacggccaccacctggcctaccgcaccttctacgccctgagcctcaccacctcccggggggagccggtgcagatggtctacggcttcgcccggagcctcctcaaggccttgaaggaggacgggcaggcggtggtcgtggtctttgacgccaaggccccctccttccgccacgaggcctacgaggcctacaaggcgggccgggcccccaccccggaggacttcccccgccagctcgccttggtcaagcggctggtggaccttctgggcctggtccgcctcgaggccccgggttacgaggcggacgacgtcctgggcaccctggccaagaaggccgaaagggaggggatggaggtgcgcatcctcacgggagaccgggacttcttccagctcctctccgagaaggtctcggtcctcctgccggacgggaccctggtcaccccaaaggacgtccaggagaagtacggggtgccgccggagcgctgggtggacttccgcgccctcacgggggaccgctcggacaacatccccggggtggcggggataggggagaagaccgcccttcgactcctcgcggagtgggggagcgtggagaacctcctgaagaacctggaccgggtgaagccggactcggtccggcgcaagatagaggcgcaccttgaggacctccgcctctccttggacctggcccgcatccgcaccgacctccccttggaggtggactttaaggccctgcgccgcaggacccccgacctggagggcctgagggcctttttggaggagctggagttcggaagcctccttcatgagttcggcctcctgggaggggagaagccccgggaggaggccccctggcccccgcccgaaggggccttcgtaggcttcctcctctcccgcaaggagcccatgtgggcggagcttctggccctggcggccgccgcagagggccgggtccaccgggcaacaagcccggttgaggccctggccgacctcaaggaggcccgggggttcctggccaaggacctggccgttttggccctgcgggagggggtggccctggaccccacggacgaccccctcctggtggcctacctcctggacccggccaacaccaaccccgagggggtggcccggcgctacgggggcgagttcacggaggacgcagcggagagggccctcctctccgagaggctcttccagaacctctttccccggctttccgagaagctcctctggctctaccaggaggtggagcggcccctctcccgggtcttggcccacatggaggcccggggggtgaggctggacgtcccccttctggaggccctctcctttgagctggagaaggagatggagcgcctggagggggaggtcttccgcttggccggccaccccttcaacctcaactcccgcgaccagctggaaagggtcctctttgacgagctgggccttaccccggtgggtcggacggagaagacgggcaagcgctccaccgcccagggggccctggaggccctccggggggcccaccccatcgtggagctcatcctccagtaccgggagctttccaagctcaaaagcacctacctggaccccctgccccggctcgtccacccgcggacgggccggcttcacacccgcttcaaccagacggccacggccacgggaaggctttccagctccgaccccaacctgcagaacatccccgtgcgcacccccttggggcagcgcatccgcaaggccttcgtggccgaggaggggtggctccttttggcggcggactactcccagatcgagcttcgggtcctggcccacctctcgggggacgagaacctgaagcgggtcttccgggaggggaaggacatccataccgaaaccgccgcctggatgttcggcttagaccccgctctagtggatccaaagatgcgccgggcggccaagacggtcaacttcggcgtcctctacgggatgtccgcccacaggctctcccaggagctcggcatagactacaaggaggcggaggcctttattgagcgctacttccagagcttccccaaggtgcgggcctggatagaaaggaccctggaggagggccggacgcggggctacgtggagaccctgttcggcaggaggcgctatgtgcccgacctggcctcccgggtccgctcggtgcgggagtatgcggagcggatggccttcaacatgcccgtgcagggcaccgccgccgacctgatgaagatcgccatggtcaagctcttccccaggctaaagcccctgggggcccacctcctcctccaggtgcacgacgagctggtcctggaggtgcccgaggaccgggccgaggaggccaaggccctggtcaaggaggtcatggagaacacctaccccttggacgtgcccctcgaggtggaggtgggcgtgggtcgggactggctggaggcgaagggggattgaagcggtcgac

SEQ ID NO: 3025 - DNA, 2605 bp, Artificial Sequence
  Description of Artificial Sequence: Synthetic DNA sequence of Thermus Rt41A DNA Polymerase A774W
atgaaatacctgctgccgaccgctgctgctggtctgctgctcctcgctgcccagccggcgatggccatggatatcggaattaattcggatccgaattccccactttttgacctggaggaaccccccaagcgggtgcttctggtggacggccaccacctggcctaccgcaccttctacgccctgagcctcaccacctcccggggggagccggtgcagatggtctacggcttcgcccggagcctcctcaaggccttgaaggaggacgggcaggcggtggtcgtggtctttgacgccaaggccccctccttccgccacgaggcctacgaggcctacaaggcgggccgggcccccaccccggaggacttcccccgccagctcgccttggtcaagcggctggtggaccttctgggcctggtccgcctcgaggccccgggttacgaggcggacgacgtcctgggcaccctggccaagaaggccgaaagggaggggatggaggtgcgcatcctcacgggagaccgggacttcttccagctcctctccgagaaggtctcggtcctcctgccggacgggaccctggtcaccccaaaggacgtccaggagaagtacggggtgccgccggagcgctgggtggacttccgcgccctcacgggggaccgctcggacaacatccccggggtggcggggataggggagaagaccgcccttcgactcctcgcggagtgggggagcgtggagaacctcctgaagaacctggaccgggtgaagccggactcggtccggcgcaagatagaggcgcaccttgaggacctccgcctctccttggacctggcccgcatccgcaccgacctccccttggaggtggactttaaggccctgcgccgcaggacccccgacctggagggcctgagggcctttttggaggagctggagttcggaagcctccttcatgagttcggcctcctgggaggggagaagccccgggaggaggccccctggcccccgcccgaaggggccttcgtaggcttcctcctctcccgcaaggagcccatgtgggcggagcttctggccctggcggccgccgcagagggccgggtccaccgggcaacaagcccggttgaggccctggccgacctcaaggaggcccgggggttcctggccaaggacctggccgttttggccctgcgggagggggtggccctggaccccacggacgaccccctcctggtggcctacctcctggacccggccaacaccaaccccgagggggtggcccggcgctacgggggcgagttcacggaggacgcagcggagagggccctcctctccgagaggctcttccagaacctctttccccggctttccgagaagctcctctggctctaccaggaggtggagcggcccctctcccgggtcttggcccacatggaggcccggggggtgaggctggacgtcccccttctggaggccctctcctttgagctggagaaggagatggagcgcctggagggggaggtcttccgcttggccggccaccccttcaacctcaactcccgcgaccagctggaaagggtcctctttgacgagctgggccttaccccggtgggtcggacggagaagacgggcaagcgctccaccgcccagggggccctggaggccctccggggggcccaccccatcgtggagctcatcctccagtaccgggagctttccaagctcaaaagcacctacctggaccccctgccccggctcgtccacccgcggacgggccggcttcacacccgcttcaaccagacggccacggccacgggaaggctttccagctccgaccccaacctgcagaacatccccgtgcgcacccccttggggcagcgcatccgcaaggccttcgtggccgaggaggggtggctccttttggcggcggactactcccagatcgagcttcgggtcctggcccacctctcgggggacgagaacctgaagcgggtcttccgggaggggaaggacatccataccgaaaccgccgcctggatgttcggcttagaccccgctctagtggatccaaagatgcgccgggcggccaagacggtcaacttcggcgtcctctacgggatgtccgcccacaggctctcccaggagctcggcatagactacaaggaggcggaggcctttattgagcgctacttccagagcttccccaaggtgcgggcctggatagaaaggaccctggaggagggccggacgcggggctacgtggagaccctgttcggcaggaggcgctatgtgcccgacctggcctcccgggtccgctcggtgcgggagtgggcggagcggatggccttcaacatgcccgtgcagggcaccgccgccgacctgatgaagatcgccatggtcaagctcttccccaggctaaagcccctgggggcccacctcctcctccaggtgcacgacgagctggtcctggaggtgcccgaggaccgggccgaggaggccaaggccctggtcaaggaggtcatggagaacacctaccccttggacgtgcccctcgaggtggaggtgggcgtgggtcgggactggctggaggcgaagggggattgaagcggtcgac

SEQ ID NO: 3026 - DNA, 2605 bp, Artificial Sequence
  Description of Artificial Sequence: Synthetic DNA sequence of Thermus Rt41A DNA Polymerase A774P
atgaaatacctgctgccgaccgctgctgctggtctgctgctcctcgctgcccagccggcgatggccatggatatcggaattaattcggatccgaattccccactttttgacctggaggaaccccccaagcgggtgcttctggtggacggccaccacctggcctaccgcaccttctacgccctgagcctcaccacctcccggggggagccggtgcagatggtctacggcttcgcccggagcctcctcaaggccttgaaggaggacgggcaggcggtggtcgtggtctttgacgccaaggccccctccttccgccacgaggcctacgaggcctacaaggcgggccgggcccccaccccggaggacttcccccgccagctcgccttggtcaagcggctggtggaccttctgggcctggtccgcctcgaggccccgggttacgaggcggacgacgtcctgggcaccctggccaagaaggccgaaagggaggggatggaggtgcgcatcctcacgggagaccgggacttcttccagctcctctccgagaaggtctcggtcctcctgccggacgggaccctggtcaccccaaaggacgtccaggagaagtacggggtgccgccggagcgctgggtggacttccgcgccctcacgggggaccgctcggacaacatccccggggtggcggggataggggagaagaccgcccttcgactcctcgcggagtgggggagcgtggagaacctcctgaagaacctggaccgggtgaagccggactcggtccggcgcaagatagaggcgcaccttgaggacctccgcctctccttggacctggcccgcatccgcaccgacctccccttggaggtggactttaaggccctgcgccgcaggacccccgacctggagggcctgagggcctttttggaggagctggagttcggaagcctccttcatgagttcggcctcctgggaggggagaagccccgggaggaggccccctggcccccgcccgaaggggccttcgtaggcttcctcctctcccgcaaggagcccatgtgggcggagcttctggccctggcggccgccgcagagggccgggtccaccgggcaacaagcccggttgaggccctggccgacctcaaggaggcccgggggttcctggccaaggacctggccgttttggccctgcgggagggggtggccctggaccccacggacgaccccctcctggtggcctacctcctggacccggccaacaccaaccccgagggggtggcccggcgctacgggggcgagttcacggaggacgcagcggagagggccctcctctccgagaggctcttccagaacctctttccccggctttccgagaagctcctctggctctaccaggaggtggagcggcccctctcccgggtcttggcccacatggaggcccggggggtgaggctggacgtcccccttctggaggccctctcctttgagctggagaaggagatggagcgcctggagggggaggtcttccgcttggccggccaccccttcaacctcaactcccgcgaccagctggaaagggtcctctttgacgagctgggccttaccccggtgggtcggacggagaagacgggcaagcgctccaccgcccagggggccctggaggccctccggggggcccaccccatcgtggagctcatcctccagtaccgggagctttccaagctcaaaagcacctacctggaccccctgccccggctcgtccacccgcggacgggccggcttcacacccgcttcaaccagacggccacggccacgggaaggctttccagctccgaccccaacctgcagaacatccccgtgcgcacccccttggggcagcgcatccgcaaggccttcgtggccgaggaggggtggctccttttggcggcggactactcccagatcgagcttcgggtcctggcccacctctcgggggacgagaacctgaagcgggtcttccgggaggggaaggacatccataccgaaaccgccgcctggatgttcggcttagaccccgctctagtggatccaaagatgcgccgggcggccaagacggtcaacttcggcgtcctctacgggatgtccgcccacaggctctcccaggagctcggcatagactacaaggaggcggaggcctttattgagcgctacttccagagcttccccaaggtgcgggcctggatagaaaggaccctggaggagggccggacgcggggctacgtggagaccctgttcggcaggaggcgctatgtgcccgacctggcctcccgggtccgctcggtgcgggagcctgcggagcggatggccttcaacatgcccgtgcagggcaccgccgccgacctgatgaagatcgccatggtcaagctcttccccaggctaaagcccctgggggcccacctcctcctccaggtgcacgacgagctggtcctggaggtgcccgaggaccgggccgaggaggccaaggccctggtcaaggaggtcatggagaacacctaccccttggacgtgcccctcgaggtggaggtgggcgtgggtcgggactggctggaggcgaagggggattgaagcggtcgac

SEQ ID NO: 3027 - DNA, 2605 bp, Artificial Sequence
  Description of Artificial Sequence: Synthetic DNA sequence of Thermus Rt41A DNA Polymerase A774M
atgaaatacctgctgccgaccgctgctgctggtctgctgctcctcgctgcccagccggcgatggccatggatatcggaattaattcggatccgaattccccactttttgacctggaggaaccccccaagcgggtgcttctggtggacggccaccacctggcctaccgcaccttctacgccctgagcctcaccacctcccggggggagccggtgcagatggtctacggcttcgcccggagcctcctcaaggccttgaaggaggacgggcaggcggtggtcgtggtctttgacgccaaggccccctccttccgccacgaggcctacgaggcctacaaggcgggccgggcccccaccccggaggacttcccccgccagctcgccttggtcaagcggctggtggaccttctgggcctggtccgcctcgaggccccgggttacgaggcggacgacgtcctgggcaccctggccaagaaggccgaaagggaggggatggaggtgcgcatcctcacgggagaccgggacttcttccagctcctctccgagaaggtctcggtcctcctgccggacgggaccctggtcaccccaaaggacgtccaggagaagtacggggtgccgccggagcgctgggtggacttccgcgccctcacgggggaccgctcggacaacatccccggggtggcggggataggggagaagaccgcccttcgactcctcgcggagtgggggagcgtggagaacctcctgaagaacctggaccgggtgaagccggactcggtccggcgcaagatagaggcgcaccttgaggacctccgcctctccttggacctggcccgcatccgcaccgacctccccttggaggtggactttaaggccctgcgccgcaggacccccgacctggagggcctgagggcctttttggaggagctggagttcggaagcctccttcatgagttcggcctcctgggaggggagaagccccgggaggaggccccctggcccccgcccgaaggggccttcgtaggcttcctcctctcccgcaaggagcccatgtgggcggagcttctggccctggcggccgccgcagagggccgggtccaccgggcaacaagcccggttgaggccctggccgacctcaaggaggcccgggggttcctggccaaggacctggccgttttggccctgcgggagggggtggccctggaccccacggacgaccccctcctggtggcctacctcctggacccggccaacaccaaccccgagggggtggcccggcgctacgggggcgagttcacggaggacgcagcggagagggccctcctctccgagaggctcttccagaacctctttccccggctttccgagaagctcctctggctctaccaggaggtggagcggcccctctcccgggtcttggcccacatggaggcccggggggtgaggctggacgtcccccttctggaggccctctcctttgagctggagaaggagatggagcgcctggagggggaggtcttccgcttggccggccaccccttcaacctcaactcccgcgaccagctggaaagggtcctctttgacgagctgggccttaccccggtgggtcggacggagaagacgggcaagcgctccaccgcccagggggccctggaggccctccggggggcccaccccatcgtggagctcatcctccagtaccgggagctttccaagctcaaaagcacctacctggaccccctgccccggctcgtccacccgcggacgggccggcttcacacccgcttcaaccagacggccacggccacgggaaggctttccagctccgaccccaacctgcagaacatccccgtgcgcacccccttggggcagcgcatccgcaaggccttcgtggccgaggaggggtggctccttttggcggcggactactcccagatcgagcttcgggtcctggcccacctctcgggggacgagaacctgaagcgggtcttccgggaggggaaggacatccataccgaaaccgccgcctggatgttcggcttagaccccgctctagtggatccaaagatgcgccgggcggccaagacggtcaacttcggcgtcctctacgggatgtccgcccacaggctctcccaggagctcggcatagactacaaggaggcggaggcctttattgagcgctacttccagagcttccccaaggtgcgggcctggatagaaaggaccctggaggagggccggacgcggggctacgtggagaccctgttcggcaggaggcgctatgtgcccgacctggcctcccgggtccgctcggtgcgggagatggcggagcggatggccttcaacatgcccgtgcagggcaccgccgccgacctgatgaagatcgccatggtcaagctcttccccaggctaaagcccctgggggcccacctcctcctccaggtgcacgacgagctggtcctggaggtgcccgaggaccgggccgaggaggccaaggccctggtcaaggaggtcatggagaacacctaccccttggacgtgcccctcgaggtggaggtgggcgtgggtcgggactggctggaggcgaagggggattgaagcggtcgac

SEQ ID NO: 3028 - DNA, 2605 bp, Artificial Sequence
  Description of Artificial Sequence: Synthetic DNA sequence of Thermus Rt41A DNA Polymerase A774T
atgaaatacctgctgccgaccgctgctgctggtctgctgctcctcgctgcccagccggcgatggccatggatatcggaattaattcggatccgaattccccactttttgacctggaggaaccccccaagcgggtgcttctggtggacggccaccacctggcctaccgcaccttctacgccctgagcctcaccacctcccggggggagccggtgcagatggtctacggcttcgcccggagcctcctcaaggccttgaaggaggacgggcaggcggtggtcgtggtctttgacgccaaggccccctccttccgccacgaggcctacgaggcctacaaggcgggccgggcccccaccccggaggacttcccccgccagctcgccttggtcaagcggctggtggaccttctgggcctggtccgcctcgaggccccgggttacgaggcggacgacgtcctgggcaccctggccaagaaggccgaaagggaggggatggaggtgcgcatcctcacgggagaccgggacttcttccagctcctctccgagaaggtctcggtcctcctgccggacgggaccctggtcaccccaaaggacgtccaggagaagtacggggtgccgccggagcgctgggtggacttccgcgccctcacgggggaccgctcggacaacatccccggggtggcggggataggggagaagaccgcccttcgactcctcgcggagtgggggagcgtggagaacctcctgaagaacctggaccgggtgaagccggactcggtccggcgcaagatagaggcgcaccttgaggacctccgcctctccttggacctggcccgcatccgcaccgacctccccttggaggtggactttaaggccctgcgccgcaggacccccgacctggagggcctgagggcctttttggaggagctggagttcggaagcctccttcatgagttcggcctcctgggaggggagaagccccgggaggaggccccctggcccccgcccgaaggggccttcgtaggcttcctcctctcccgcaaggagcccatgtgggcggagcttctggccctggcggccgccgcagagggccgggtccaccgggcaacaagcccggttgaggccctggccgacctcaaggaggcccgggggttcctggccaaggacctggccgttttggccctgcgggagggggtggccctggaccccacggacgaccccctcctggtggcctacctcctggacccggccaacaccaaccccgagggggtggcccggcgctacgggggcgagttcacggaggacgcagcggagagggccctcctctccgagaggctcttccagaacctctttccccggctttccgagaagctcctctggctctaccaggaggtggagcggcccctctcccgggtcttggcccacatggaggcccggggggtgaggctggacgtcccccttctggaggccctctcctttgagctggagaaggagatggagcgcctggagggggaggtcttccgcttggccggccaccccttcaacctcaactcccgcgaccagctggaaagggtcctctttgacgagctgggccttaccccggtgggtcggacggagaagacgggcaagcgctccaccgcccagggggccctggaggccctccggggggcccaccccatcgtggagctcatcctccagtaccgggagctttccaagctcaaaagcacctacctggaccccctgccccggctcgtccacccgcggacgggccggcttcacacccgcttcaaccagacggccacggccacgggaaggctttccagctccgaccccaacctgcagaacatccccgtgcgcacccccttggggcagcgcatccgcaaggccttcgtggccgaggaggggtggctccttttggcggcggactactcccagatcgagcttcgggtcctggcccacctctcgggggacgagaacctgaagcgggtcttccgggaggggaaggacatccataccgaaaccgccgcctggatgttcggcttagaccccgctctagtggatccaaagatgcgccgggcggccaagacggtcaacttcggcgtcctctacgggatgtccgcccacaggctctcccaggagctcggcatagactacaaggaggcggaggcctttattgagcgctacttccagagcttccccaaggtgcgggcctggatagaaaggaccctggaggagggccggacgcggggctacgtggagaccctgttcggcaggaggcgctatgtgcccgacctggcctcccgggtccgctcggtgcgggagactgcggagcggatggccttcaacatgcccgtgcagggcaccgccgccgacctgatgaagatcgccatggtcaagctcttccccaggctaaagcccctgggggcccacctcctcctccaggtgcacgacgagctggtcctggaggtgcccgaggaccgggccgaggaggccaaggccctggtcaaggaggtcatggagaacacctaccccttggacgtgcccctcgaggtggaggtgggcgtgggtcgggactggctggaggcgaagggggattgaagcggtcgac

SEQ ID NO: 3029 - DNA, 2605 bp, Artificial Sequence
  Description of Artificial Sequence: Synthetic DNA sequence of Thermus Rt41A DNA Polymerase A774N
atgaaatacctgctgccgaccgctgctgctggtctgctgctcctcgctgcccagccggcgatggccatggatatcggaattaattcggatccgaattccccactttttgacctggaggaaccccccaagcgggtgcttctggtggacggccaccacctggcctaccgcaccttctacgccctgagcctcaccacctcccggggggagccggtgcagatggtctacggcttcgcccggagcctcctcaaggccttgaaggaggacgggcaggcggtggtcgtggtctttgacgccaaggccccctccttccgccacgaggcctacgaggcctacaaggcgggccgggcccccaccccggaggacttcccccgccagctcgccttggtcaagcggctggtggaccttctgggcctggtccgcctcgaggccccgggttacgaggcggacgacgtcctgggcaccctggccaagaaggccgaaagggaggggatggaggtgcgcatcctcacgggagaccgggacttcttccagctcctctccgagaaggtctcggtcctcctgccggacgggaccctggtcaccccaaaggacgtccaggagaagtacggggtgccgccggagcgctgggtggacttccgcgccctcacgggggaccgctcggacaacatccccggggtggcggggataggggagaagaccgcccttcgactcctcgcggagtgggggagcgtggagaacctcctgaagaacctggaccgggtgaagccggactcggtccggcgcaagatagaggcgcaccttgaggacctccgcctctccttggacctggcccgcatccgcaccgacctccccttggaggtggactttaaggccctgcgccgcaggacccccgacctggagggcctgagggcctttttggaggagctggagttcggaagcctccttcatgagttcggcctcctgggaggggagaagccccgggaggaggccccctggcccccgcccgaaggggccttcgtaggcttcctcctctcccgcaaggagcccatgtgggcggagcttctggccctggcggccgccgcagagggccgggtccaccgggcaacaagcccggttgaggccctggccgacctcaaggaggcccgggggttcctggccaaggacctggccgttttggccctgcgggagggggtggccctggaccccacggacgaccccctcctggtggcctacctcctggacccggccaacaccaaccccgagggggtggcccggcgctacgggggcgagttcacggaggacgcagcggagagggccctcctctccgagaggctcttccagaacctctttccccggctttccgagaagctcctctggctctaccaggaggtggagcggcccctctcccgggtcttggcccacatggaggcccggggggtgaggctggacgtcccccttctggaggccctctcctttgagctggagaaggagatggagcgcctggagggggaggtcttccgcttggccggccaccccttcaacctcaactcccgcgaccagctggaaagggtcctctttgacgagctgggccttaccccggtgggtcggacggagaagacgggcaagcgctccaccgcccagggggccctggaggccctccggggggcccaccccatcgtggagctcatcctccagtaccgggagctttccaagctcaaaagcacctacctggaccccctgccccggctcgtccacccgcggacgggccggcttcacacccgcttcaaccagacggccacggccacgggaaggctttccagctccgaccccaacctgcagaacatccccgtgcgcacccccttggggcagcgcatccgcaaggccttcgtggccgaggaggggtggctccttttggcggcggactactcccagatcgagcttcgggtcctggcccacctctcgggggacgagaacctgaagcgggtcttccgggaggggaaggacatccataccgaaaccgccgcctggatgttcggcttagaccccgctctagtggatccaaagatgcgccgggcggccaagacggtcaacttcggcgtcctctacgggatgtccgcccacaggctctcccaggagctcggcatagactacaaggaggcggaggcctttattgagcgctacttccagagcttccccaaggtgcgggcctggatagaaaggaccctggaggagggccggacgcggggctacgtggagaccctgttcggcaggaggcgctatgtgcccgacctggcctcccgggtccgctcggtgcgggagaatgcggagcggatggccttcaacatgcccgtgcagggcaccgccgccgacctgatgaagatcgccatggtcaagctcttccccaggctaaagcccctgggggcccacctcctcctccaggtgcacgacgagctggtcctggaggtgcccgaggaccgggccgaggaggccaaggccctggtcaaggaggtcatggagaacacctaccccttggacgtgcccctcgaggtggaggtgggcgtgggtcgggactggctggaggcgaagggggattgaagcggtcgac

SEQ ID NO: 3030 - DNA, 2605 bp, Artificial Sequence
  Description of Artificial Sequence: Synthetic DNA sequence of Thermus Rt41A DNA Polymerase A774V
atgaaatacctgctgccgaccgctgctgctggtctgctgctcctcgctgcccagccggcgatggccatggatatcggaattaattcggatccgaattccccactttttgacctggaggaaccccccaagcgggtgcttctggtggacggccaccacctggcctaccgcaccttctacgccctgagcctcaccacctcccggggggagccggtgcagatggtctacggcttcgcccggagcctcctcaaggccttgaaggaggacgggcaggcggtggtcgtggtctttgacgccaaggccccctccttccgccacgaggcctacgaggcctacaaggcgggccgggcccccaccccggaggacttcccccgccagctcgccttggtcaagcggctggtggaccttctgggcctggtccgcctcgaggccccgggttacgaggcggacgacgtcctgggcaccctggccaagaaggccgaaagggaggggatggaggtgcgcatcctcacgggagaccgggacttcttccagctcctctccgagaaggtctcggtcctcctgccggacgggaccctggtcaccccaaaggacgtccaggagaagtacggggtgccgccggagcgctgggtggacttccgcgccctcacgggggaccgctcggacaacatccccggggtggcggggataggggagaagaccgcccttcgactcctcgcggagtgggggagcgtggagaacctcctgaagaacctggaccgggtgaagccggactcggtccggcgcaagatagaggcgcaccttgaggacctccgcctctccttggacctggcccgcatccgcaccgacctccccttggaggtggactttaaggccctgcgccgcaggacccccgacctggagggcctgagggcctttttggaggagctggagttcggaagcctccttcatgagttcggcctcctgggaggggagaagccccgggaggaggccccctggcccccgcccgaaggggccttcgtaggcttcctcctctcccgcaaggagcccatgtgggcggagcttctggccctggcggccgccgcagagggccgggtccaccgggcaacaagcccggttgaggccctggccgacctcaaggaggcccgggggttcctggccaaggacctggccgttttggccctgcgggagggggtggccctggaccccacggacgaccccctcctggtggcctacctcctggacccggccaacaccaaccccgagggggtggcccggcgctacgggggcgagttcacggaggacgcagcggagagggccctcctctccgagaggctcttccagaacctctttccccggctttccgagaagctcctctggctctaccaggaggtggagcggcccctctcccgggtcttggcccacatggaggcccggggggtgaggctggacgtcccccttctggaggccctctcctttgagctggagaaggagatggagcgcctggagggggaggtcttccgcttggccggccaccccttcaacctcaactcccgcgaccagctggaaagggtcctctttgacgagctgggccttaccccggtgggtcggacggagaagacgggcaagcgctccaccgcccagggggccctggaggccctccggggggcccaccccatcgtggagctcatcctccagtaccgggagctttccaagctcaaaagcacctacctggaccccctgccccggctcgtccacccgcggacgggccggcttcacacccgcttcaaccagacggccacggccacgggaaggctttccagctccgaccccaacctgcagaacatccccgtgcgcacccccttggggcagcgcatccgcaaggccttcgtggccgaggaggggtggctccttttggcggcggactactcccagatcgagcttcgggtcctggcccacctctcgggggacgagaacctgaagcgggtcttccgggaggggaaggacatccataccgaaaccgccgcctggatgttcggcttagaccccgctctagtggatccaaagatgcgccgggcggccaagacggtcaacttcggcgtcctctacgggatgtccgcccacaggctctcccaggagctcggcatagactacaaggaggcggaggcctttattgagcgctacttccagagcttccccaaggtgcgggcctggatagaaaggaccctggaggagggccggacgcggggctacgtggagaccctgttcggcaggaggcgctatgtgcccgacctggcctcccgggtccgctcggtgcgggaggtcgcggagcggatggccttcaacatgcccgtgcagggcaccgccgccgacctgatgaagatcgccatggtcaagctcttccccaggctaaagcccctgggggcccacctcctcctccaggtgcacgacgagctggtcctggaggtgcccgaggaccgggccgaggaggccaaggccctggtcaaggaggtcatggagaacacctaccccttggacgtgcccctcgaggtggaggtgggcgtgggtcgggactggctggaggcgaagggggattgaagcggtcgac

SEQ ID NO: 3031 - DNA, 2605 bp, Artificial Sequence
  Description of Artificial Sequence: Synthetic DNA sequence of Thermus Rt41A DNA Polymerase A775R
atgaaatacctgctgccgaccgctgctgctggtctgctgctcctcgctgcccagccggcgatggccatggatatcggaattaattcggatccgaattccccactttttgacctggaggaaccccccaagcgggtgcttctggtggacggccaccacctggcctaccgcaccttctacgccctgagcctcaccacctcccggggggagccggtgcagatggtctacggcttcgcccggagcctcctcaaggccttgaaggaggacgggcaggcggtggtcgtggtctttgacgccaaggccccctccttccgccacgaggcctacgaggcctacaaggcgggccgggcccccaccccggaggacttcccccgccagctcgccttggtcaagcggctggtggaccttctgggcctggtccgcctcgaggccccgggttacgaggcggacgacgtcctgggcaccctggccaagaaggccgaaagggaggggatggaggtgcgcatcctcacgggagaccgggacttcttccagctcctctccgagaaggtctcggtcctcctgccggacgggaccctggtcaccccaaaggacgtccaggagaagtacggggtgccgccggagcgctgggtggacttccgcgccctcacgggggaccgctcggacaacatccccggggtggcggggataggggagaagaccgcccttcgactcctcgcggagtgggggagcgtggagaacctcctgaagaacctggaccgggtgaagccggactcggtccggcgcaagatagaggcgcaccttgaggacctccgcctctccttggacctggcccgcatccgcaccgacctccccttggaggtggactttaaggccctgcgccgcaggacccccgacctggagggcctgagggcctttttggaggagctggagttcggaagcctccttcatgagttcggcctcctgggaggggagaagccccgggaggaggccccctggcccccgcccgaaggggccttcgtaggcttcctcctctcccgcaaggagcccatgtgggcggagcttctggccctggcggccgccgcagagggccgggtccaccgggcaacaagcccggttgaggccctggccgacctcaaggaggcccgggggttcctggccaaggacctggccgttttggccctgcgggagggggtggccctggaccccacggacgaccccctcctggtggcctacctcctggacccggccaacaccaaccccgagggggtggcccggcgctacgggggcgagttcacggaggacgcagcggagagggccctcctctccgagaggctcttccagaacctctttccccggctttccgagaagctcctctggctctaccaggaggtggagcggcccctctcccgggtcttggcccacatggaggcccggggggtgaggctggacgtcccccttctggaggccctctcctttgagctggagaaggagatggagcgcctggagggggaggtcttccgcttggccggccaccccttcaacctcaactcccgcgaccagctggaaagggtcctctttgacgagctgggccttaccccggtgggtcggacggagaagacgggcaagcgctccaccgcccagggggccctggaggccctccggggggcccaccccatcgtggagctcatcctccagtaccgggagctttccaagctcaaaagcacctacctggaccccctgccccggctcgtccacccgcggacgggccggcttcacacccgcttcaaccagacggccacggccacgggaaggctttccagctccgaccccaacctgcagaacatccccgtgcgcacccccttggggcagcgcatccgcaaggccttcgtggccgaggaggggtggctccttttggcggcggactactcccagatcgagcttcgggtcctggcccacctctcgggggacgagaacctgaagcgggtcttccgggaggggaaggacatccataccgaaaccgccgcctggatgttcggcttagaccccgctctagtggatccaaagatgcgccgggcggccaagacggtcaacttcggcgtcctctacgggatgtccgcccacaggctctcccaggagctcggcatagactacaaggaggcggaggcctttattgagcgctacttccagagcttccccaaggtgcgggcctggatagaaaggaccctggaggagggccggacgcggggctacgtggagaccctgttcggcaggaggcgctatgtgcccgacctggcctcccgggtccgctcggtgcgggaggcgcgagagcggatggccttcaacatgcccgtgcagggcaccgccgccgacctgatgaagatcgccatggtcaagctcttccccaggctaaagcccctgggggcccacctcctcctccaggtgcacgacgagctggtcctggaggtgcccgaggaccgggccgaggaggccaaggccctggtcaaggaggtcatggagaacacctaccccttggacgtgcccctcgaggtggaggtgggcgtgggtcgggactggctggaggcgaagggggattgaagcggtcgac

SEQ ID NO: 3032 - DNA, 2605 bp, Artificial Sequence
  Description of Artificial Sequence: Synthetic DNA sequence of Thermus Rt41A DNA Polymerase A775C
atgaaatacctgctgccgaccgctgctgctggtctgctgctcctcgctgcccagccggcgatggccatggatatcggaattaattcggatccgaattccccactttttgacctggaggaaccccccaagcgggtgcttctggtggacggccaccacctggcctaccgcaccttctacgccctgagcctcaccacctcccggggggagccggtgcagatggtctacggcttcgcccggagcctcctcaaggccttgaaggaggacgggcaggcggtggtcgtggtctttgacgccaaggccccctccttccgccacgaggcctacgaggcctacaaggcgggccgggcccccaccccggaggacttcccccgccagctcgccttggtcaagcggctggtggaccttctgggcctggtccgcctcgaggccccgggttacgaggcggacgacgtcctgggcaccctggccaagaaggccgaaagggaggggatggaggtgcgcatcctcacgggagaccgggacttcttccagctcctctccgagaaggtctcggtcctcctgccggacgggaccctggtcaccccaaaggacgtccaggagaagtacggggtgccgccggagcgctgggtggacttccgcgccctcacgggggaccgctcggacaacatccccggggtggcggggataggggagaagaccgcccttcgactcctcgcggagtgggggagcgtggagaacctcctgaagaacctggaccgggtgaagccggactcggtccggcgcaagatagaggcgcaccttgaggacctccgcctctccttggacctggcccgcatccgcaccgacctccccttggaggtggactttaaggccctgcgccgcaggacccccgacctggagggcctgagggcctttttggaggagctggagttcggaagcctccttcatgagttcggcctcctgggaggggagaagccccgggaggaggccccctggcccccgcccgaaggggccttcgtaggcttcctcctctcccgcaaggagcccatgtgggcggagcttctggccctggcggccgccgcagagggccgggtccaccgggcaacaagcccggttgaggccctggccgacctcaaggaggcccgggggttcctggccaaggacctggccgttttggccctgcgggagggggtggccctggaccccacggacgaccccctcctggtggcctacctcctggacccggccaacaccaaccccgagggggtggcccggcgctacgggggcgagttcacggaggacgcagcggagagggccctcctctccgagaggctcttccagaacctctttccccggctttccgagaagctcctctggctctaccaggaggtggagcggcccctctcccgggtcttggcccacatggaggcccggggggtgaggctggacgtcccccttctggaggccctctcctttgagctggagaaggagatggagcgcctggagggggaggtcttccgcttggccggccaccccttcaacctcaactcccgcgaccagctggaaagggtcctctttgacgagctgggccttaccccggtgggtcggacggagaagacgggcaagcgctccaccgcccagggggccctggaggccctccggggggcccaccccatcgtggagctcatcctccagtaccgggagctttccaagctcaaaagcacctacctggaccccctgccccggctcgtccacccgcggacgggccggcttcacacccgcttcaaccagacggccacggccacgggaaggctttccagctccgaccccaacctgcagaacatccccgtgcgcacccccttggggcagcgcatccgcaaggccttcgtggccgaggaggggtggctccttttggcggcggactactcccagatcgagcttcgggtcctggcccacctctcgggggacgagaacctgaagcgggtcttccgggaggggaaggacatccataccgaaaccgccgcctggatgttcggcttagaccccgctctagtggatccaaagatgcgccgggcggccaagacggtcaacttcggcgtcctctacgggatgtccgcccacaggctctcccaggagctcggcatagactacaaggaggcggaggcctttattgagcgctacttccagagcttccccaaggtgcgggcctggatagaaaggaccctggaggagggccggacgcggggctacgtggagaccctgttcggcaggaggcgctatgtgcccgacctggcctcccgggtccgctcggtgcgggaggcgtgtgagcggatggccttcaacatgcccgtgcagggcaccgccgccgacctgatgaagatcgccatggtcaagctcttccccaggctaaagcccctgggggcccacctcctcctccaggtgcacgacgagctggtcctggaggtgcccgaggaccgggccgaggaggccaaggccctggtcaaggaggtcatggagaacacctaccccttggacgtgcccctcgaggtggaggtgggcgtgggtcgggactggctggaggcgaagggggattgaagcggtcgac

SEQ ID NO: 3033 - DNA, 2605 bp, Artificial Sequence
  Description of Artificial Sequence: Synthetic DNA sequence of Thermus Rt41A DNA Polymerase A775G
atgaaatacctgctgccgaccgctgctgctggtctgctgctcctcgctgcccagccggcgatggccatggatatcggaattaattcggatccgaattccccactttttgacctggaggaaccccccaagcgggtgcttctggtggacggccaccacctggcctaccgcaccttctacgccctgagcctcaccacctcccggggggagccggtgcagatggtctacggcttcgcccggagcctcctcaaggccttgaaggaggacgggcaggcggtggtcgtggtctttgacgccaaggccccctccttccgccacgaggcctacgaggcctacaaggcgggccgggcccccaccccggaggacttcccccgccagctcgccttggtcaagcggctggtggaccttctgggcctggtccgcctcgaggccccgggttacgaggcggacgacgtcctgggcaccctggccaagaaggccgaaagggaggggatggaggtgcgcatcctcacgggagaccgggacttcttccagctcctctccgagaaggtctcggtcctcctgccggacgggaccctggtcaccccaaaggacgtccaggagaagtacggggtgccgccggagcgctgggtggacttccgcgccctcacgggggaccgctcggacaacatccccggggtggcggggataggggagaagaccgcccttcgactcctcgcggagtgggggagcgtggagaacctcctgaagaacctggaccgggtgaagccggactcggtccggcgcaagatagaggcgcaccttgaggacctccgcctctccttggacctggcccgcatccgcaccgacctccccttggaggtggactttaaggccctgcgccgcaggacccccgacctggagggcctgagggcctttttggaggagctggagttcggaagcctccttcatgagttcggcctcctgggaggggagaagccccgggaggaggccccctggcccccgcccgaaggggccttcgtaggcttcctcctctcccgcaaggagcccatgtgggcggagcttctggccctggcggccgccgcagagggccgggtccaccgggcaacaagcccggttgaggccctggccgacctcaaggaggcccgggggttcctggccaaggacctggccgttttggccctgcgggagggggtggccctggaccccacggacgaccccctcctggtggcctacctcctggacccggccaacaccaaccccgagggggtggcccggcgctacgggggcgagttcacggaggacgcagcggagagggccctcctctccgagaggctcttccagaacctctttccccggctttccgagaagctcctctggctctaccaggaggtggagcggcccctctcccgggtcttggcccacatggaggcccggggggtgaggctggacgtcccccttctggaggccctctcctttgagctggagaaggagatggagcgcctggagggggaggtcttccgcttggccggccaccccttcaacctcaactcccgcgaccagctggaaagggtcctctttgacgagctgggccttaccccggtgggtcggacggagaagacgggcaagcgctccaccgcccagggggccctggaggccctccggggggcccaccccatcgtggagctcatcctccagtaccgggagctttccaagctcaaaagcacctacctggaccccctgccccggctcgtccacccgcggacgggccggcttcacacccgcttcaaccagacggccacggccacgggaaggctttccagctccgaccccaacctgcagaacatccccgtgcgcacccccttggggcagcgcatccgcaaggccttcgtggccgaggaggggtggctccttttggcggcggactactcccagatcgagcttcgggtcctggcccacctctcgggggacgagaacctgaagcgggtcttccgggaggggaaggacatccataccgaaaccgccgcctggatgttcggcttagaccccgctctagtggatccaaagatgcgccgggcggccaagacggtcaacttcggcgtcctctacgggatgtccgcccacaggctctcccaggagctcggcatagactacaaggaggcggaggcctttattgagcgctacttccagagcttccccaaggtgcgggcctggatagaaaggaccctggaggagggccggacgcggggctacgtggagaccctgttcggcaggaggcgctatgtgcccgacctggcctcccgggtccgctcggtgcgggaggcgggtgagcggatggccttcaacatgcccgtgcagggcaccgccgccgacctgatgaagatcgccatggtcaagctcttccccaggctaaagcccctgggggcccacctcctcctccaggtgcacgacgagctggtcctggaggtgcccgaggaccgggccgaggaggccaaggccctggtcaaggaggtcatggagaacacctaccccttggacgtgcccctcgaggtggaggtgggcgtgggtcgggactggctggaggcgaagggggattgaagcggtcgac

SEQ ID NO: 3034 - DNA, 2605 bp, Artificial Sequence
  Description of Artificial Sequence: Synthetic DNA sequence of Thermus Rt41A DNA Polymerase A775Q
atgaaatacctgctgccgaccgctgctgctggtctgctgctcctcgctgcccagccggcgatggccatggatatcggaattaattcggatccgaattccccactttttgacctggaggaaccccccaagcgggtgcttctggtggacggccaccacctggcctaccgcaccttctacgccctgagcctcaccacctcccggggggagccggtgcagatggtctacggcttcgcccggagcctcctcaaggccttgaaggaggacgggcaggcggtggtcgtggtctttgacgccaaggccccctccttccgccacgaggcctacgaggcctacaaggcgggccgggcccccaccccggaggacttcccccgccagctcgccttggtcaagcggctggtggaccttctgggcctggtccgcctcgaggccccgggttacgaggcggacgacgtcctgggcaccctggccaagaaggccgaaagggaggggatggaggtgcgcatcctcacgggagaccgggacttcttccagctcctctccgagaaggtctcggtcctcctgccggacgggaccctggtcaccccaaaggacgtccaggagaagtacggggtgccgccggagcgctgggtggacttccgcgccctcacgggggaccgctcggacaacatccccggggtggcggggataggggagaagaccgcccttcgactcctcgcggagtgggggagcgtggagaacctcctgaagaacctggaccgggtgaagccggactcggtccggcgcaagatagaggcgcaccttgaggacctccgcctctccttggacctggcccgcatccgcaccgacctccccttggaggtggactttaaggccctgcgccgcaggacccccgacctggagggcctgagggcctttttggaggagctggagttcggaagcctccttcatgagttcggcctcctgggaggggagaagccccgggaggaggccccctggcccccgcccgaaggggccttcgtaggcttcctcctctcccgcaaggagcccatgtgggcggagcttctggccctggcggccgccgcagagggccgggtccaccgggcaacaagcccggttgaggccctggccgacctcaaggaggcccgggggttcctggccaaggacctggccgttttggccctgcgggagggggtggccctggaccccacggacgaccccctcctggtggcctacctcctggacccggccaacaccaaccccgagggggtggcccggcgctacgggggcgagttcacggaggacgcagcggagagggccctcctctccgagaggctcttccagaacctctttccccggctttccgagaagctcctctggctctaccaggaggtggagcggcccctctcccgggtcttggcccacatggaggcccggggggtgaggctggacgtcccccttctggaggccctctcctttgagctggagaaggagatggagcgcctggagggggaggtcttccgcttggccggccaccccttcaacctcaactcccgcgaccagctggaaagggtcctctttgacgagctgggccttaccccggtgggtcggacggagaagacgggcaagcgctccaccgcccagggggccctggaggccctccggggggcccaccccatcgtggagctcatcctccagtaccgggagctttccaagctcaaaagcacctacctggaccccctgccccggctcgtccacccgcggacgggccggcttcacacccgcttcaaccagacggccacggccacgggaaggctttccagctccgaccccaacctgcagaacatccccgtgcgcacccccttggggcagcgcatccgcaaggccttcgtggccgaggaggggtggctccttttggcggcggactactcccagatcgagcttcgggtcctggcccacctctcgggggacgagaacctgaagcgggtcttccgggaggggaaggacatccataccgaaaccgccgcctggatgttcggcttagaccccgctctagtggatccaaagatgcgccgggcggccaagacggtcaacttcggcgtcctctacgggatgtccgcccacaggctctcccaggagctcggcatagactacaaggaggcggaggcctttattgagcgctacttccagagcttccccaaggtgcgggcctggatagaaaggaccctggaggagggccggacgcggggctacgtggagaccctgttcggcaggaggcgctatgtgcccgacctggcctcccgggtccgctcggtgcgggaggcgcaagagcggatggccttcaacatgcccgtgcagggcaccgccgccgacctgatgaagatcgccatggtcaagctcttccccaggctaaagcccctgggggcccacctcctcctccaggtgcacgacgagctggtcctggaggtgcccgaggaccgggccgaggaggccaaggccctggtcaaggaggtcatggagaacacctaccccttggacgtgcccctcgaggtggaggtgggcgtgggtcgggactggctggaggcgaagggggattgaagcggtcgac

SEQ ID NO: 3035 - DNA, 2605 bp, Artificial Sequence
  Description of Artificial Sequence: Synthetic DNA sequence of Thermus Rt41A DNA Polymerase A775H
atgaaatacctgctgccgaccgctgctgctggtctgctgctcctcgctgcccagccggcgatggccatggatatcggaattaattcggatccgaattccccactttttgacctggaggaaccccccaagcgggtgcttctggtggacggccaccacctggcctaccgcaccttctacgccctgagcctcaccacctcccggggggagccggtgcagatggtctacggcttcgcccggagcctcctcaaggccttgaaggaggacgggcaggcggtggtcgtggtctttgacgccaaggccccctccttccgccacgaggcctacgaggcctacaaggcgggccgggcccccaccccggaggacttcccccgccagctcgccttggtcaagcggctggtggaccttctgggcctggtccgcctcgaggccccgggttacgaggcggacgacgtcctgggcaccctggccaagaaggccgaaagggaggggatggaggtgcgcatcctcacgggagaccgggacttcttccagctcctctccgagaaggtctcggtcctcctgccggacgggaccctggtcaccccaaaggacgtccaggagaagtacggggtgccgccggagcgctgggtggacttccgcgccctcacgggggaccgctcggacaacatccccggggtggcggggataggggagaagaccgcccttcgactcctcgcggagtgggggagcgtggagaacctcctgaagaacctggaccgggtgaagccggactcggtccggcgcaagatagaggcgcaccttgaggacctccgcctctccttggacctggcccgcatccgcaccgacctccccttggaggtggactttaaggccctgcgccgcaggacccccgacctggagggcctgagggcctttttggaggagctggagttcggaagcctccttcatgagttcggcctcctgggaggggagaagccccgggaggaggccccctggcccccgcccgaaggggccttcgtaggcttcctcctctcccgcaaggagcccatgtgggcggagcttctggccctggcggccgccgcagagggccgggtccaccgggcaacaagcccggttgaggccctggccgacctcaaggaggcccgggggttcctggccaaggacctggccgttttggccctgcgggagggggtggccctggaccccacggacgaccccctcctggtggcctacctcctggacccggccaacaccaaccccgagggggtggcccggcgctacgggggcgagttcacggaggacgcagcggagagggccctcctctccgagaggctcttccagaacctctttccccggctttccgagaagctcctctggctctaccaggaggtggagcggcccctctcccgggtcttggcccacatggaggcccggggggtgaggctggacgtcccccttctggaggccctctcctttgagctggagaaggagatggagcgcctggagggggaggtcttccgcttggccggccaccccttcaacctcaactcccgcgaccagctggaaagggtcctctttgacgagctgggccttaccccggtgggtcggacggagaagacgggcaagcgctccaccgcccagggggccctggaggccctccggggggcccaccccatcgtggagctcatcctccagtaccgggagctttccaagctcaaaagcacctacctggaccccctgccccggctcgtccacccgcggacgggccggcttcacacccgcttcaaccagacggccacggccacgggaaggctttccagctccgaccccaacctgcagaacatccccgtgcgcacccccttggggcagcgcatccgcaaggccttcgtggccgaggaggggtggctccttttggcggcggactactcccagatcgagcttcgggtcctggcccacctctcgggggacgagaacctgaagcgggtcttccgggaggggaaggacatccataccgaaaccgccgcctggatgttcggcttagaccccgctctagtggatccaaagatgcgccgggcggccaagacggtcaacttcggcgtcctctacgggatgtccgcccacaggctctcccaggagctcggcatagactacaaggaggcggaggcctttattgagcgctacttccagagcttccccaaggtgcgggcctggatagaaaggaccctggaggagggccggacgcggggctacgtggagaccctgttcggcaggaggcgctatgtgcccgacctggcctcccgggtccgctcggtgcgggaggcgcatgagcggatggccttcaacatgcccgtgcagggcaccgccgccgacctgatgaagatcgccatggtcaagctcttccccaggctaaagcccctgggggcccacctcctcctccaggtgcacgacgagctggtcctggaggtgcccgaggaccgggccgaggaggccaaggccctggtcaaggaggtcatggagaacacctaccccttggacgtgcccctcgaggtggaggtgggcgtgggtcgggactggctggaggcgaagggggattgaagcggtcgac

SEQ ID NO: 3036 - DNA, 2605 bp, Artificial Sequence
  Description of Artificial Sequence: Synthetic DNA sequence of Thermus Rt41A DNA Polymerase A775I
atgaaatacctgctgccgaccgctgctgctggtctgctgctcctcgctgcccagccggcgatggccatggatatcggaattaattcggatccgaattccccactttttgacctggaggaaccccccaagcgggtgcttctggtggacggccaccacctggcctaccgcaccttctacgccctgagcctcaccacctcccggggggagccggtgcagatggtctacggcttcgcccggagcctcctcaaggccttgaaggaggacgggcaggcggtggtcgtggtctttgacgccaaggccccctccttccgccacgaggcctacgaggcctacaaggcgggccgggcccccaccccggaggacttcccccgccagctcgccttggtcaagcggctggtggaccttctgggcctggtccgcctcgaggccccgggttacgaggcggacgacgtcctgggcaccctggccaagaaggccgaaagggaggggatggaggtgcgcatcctcacgggagaccgggacttcttccagctcctctccgagaaggtctcggtcctcctgccggacgggaccctggtcaccccaaaggacgtccaggagaagtacggggtgccgccggagcgctgggtggacttccgcgccctcacgggggaccgctcggacaacatccccggggtggcggggataggggagaagaccgcccttcgactcctcgcggagtgggggagcgtggagaacctcctgaagaacctggaccgggtgaagccggactcggtccggcgcaagatagaggcgcaccttgaggacctccgcctctccttggacctggcccgcatccgcaccgacctccccttggaggtggactttaaggccctgcgccgcaggacccccgacctggagggcctgagggcctttttggaggagctggagttcggaagcctccttcatgagttcggcctcctgggaggggagaagccccgggaggaggccccctggcccccgcccgaaggggccttcgtaggcttcctcctctcccgcaaggagcccatgtgggcggagcttctggccctggcggccgccgcagagggccgggtccaccgggcaacaagcccggttgaggccctggccgacctcaaggaggcccgggggttcctggccaaggacctggccgttttggccctgcgggagggggtggccctggaccccacggacgaccccctcctggtggcctacctcctggacccggccaacaccaaccccgagggggtggcccggcgctacgggggcgagttcacggaggacgcagcggagagggccctcctctccgagaggctcttccagaacctctttccccggctttccgagaagctcctctggctctaccaggaggtggagcggcccctctcccgggtcttggcccacatggaggcccggggggtgaggctggacgtcccccttctggaggccctctcctttgagctggagaaggagatggagcgcctggagggggaggtcttccgcttggccggccaccccttcaacctcaactcccgcgaccagctggaaagggtcctctttgacgagctgggccttaccccggtgggtcggacggagaagacgggcaagcgctccaccgcccagggggccctggaggccctccggggggcccaccccatcgtggagctcatcctccagtaccgggagctttccaagctcaaaagcacctacctggaccccctgccccggctcgtccacccgcggacgggccggcttcacacccgcttcaaccagacggccacggccacgggaaggctttccagctccgaccccaacctgcagaacatccccgtgcgcacccccttggggcagcgcatccgcaaggccttcgtggccgaggaggggtggctccttttggcggcggactactcccagatcgagcttcgggtcctggcccacctctcgggggacgagaacctgaagcgggtcttccgggaggggaaggacatccataccgaaaccgccgcctggatgttcggcttagaccccgctctagtggatccaaagatgcgccgggcggccaagacggtcaacttcggcgtcctctacgggatgtccgcccacaggctctcccaggagctcggcatagactacaaggaggcggaggcctttattgagcgctacttccagagcttccccaaggtgcgggcctggatagaaaggaccctggaggagggccggacgcggggctacgtggagaccctgttcggcaggaggcgctatgtgcccgacctggcctcccgggtccgctcggtgcgggaggcgattgagcggatggccttcaacatgcccgtgcagggcaccgccgccgacctgatgaagatcgccatggtcaagctcttccccaggctaaagcccctgggggcccacctcctcctccaggtgcacgacgagctggtcctggaggtgcccgaggaccgggccgaggaggccaaggccctggtcaaggaggtcatggagaacacctaccccttggacgtgcccctcgaggtggaggtgggcgtgggtcgggactggctggaggcgaagggggattgaagcggtcgac

SEQ ID NO: 3037 - DNA, 2605 bp, Artificial Sequence
  Description of Artificial Sequence: Synthetic DNA sequence of Thermus Rt41A DNA Polymerase A775L
atgaaatacctgctgccgaccgctgctgctggtctgctgctcctcgctgcccagccggcgatggccatggatatcggaattaattcggatccgaattccccactttttgacctggaggaaccccccaagcgggtgcttctggtggacggccaccacctggcctaccgcaccttctacgccctgagcctcaccacctcccggggggagccggtgcagatggtctacggcttcgcccggagcctcctcaaggccttgaaggaggacgggcaggcggtggtcgtggtctttgacgccaaggccccctccttccgccacgaggcctacgaggcctacaaggcgggccgggcccccaccccggaggacttcccccgccagctcgccttggtcaagcggctggtggaccttctgggcctggtccgcctcgaggccccgggttacgaggcggacgacgtcctgggcaccctggccaagaaggccgaaagggaggggatggaggtgcgcatcctcacgggagaccgggacttcttccagctcctctccgagaaggtctcggtcctcctgccggacgggaccctggtcaccccaaaggacgtccaggagaagtacggggtgccgccggagcgctgggtggacttccgcgccctcacgggggaccgctcggacaacatccccggggtggcggggataggggagaagaccgcccttcgactcctcgcggagtgggggagcgtggagaacctcctgaagaacctggaccgggtgaagccggactcggtccggcgcaagatagaggcgcaccttgaggacctccgcctctccttggacctggcccgcatccgcaccgacctccccttggaggtggactttaaggccctgcgccgcaggacccccgacctggagggcctgagggcctttttggaggagctggagttcggaagcctccttcatgagttcggcctcctgggaggggagaagccccgggaggaggccccctggcccccgcccgaaggggccttcgtaggcttcctcctctcccgcaaggagcccatgtgggcggagcttctggccctggcggccgccgcagagggccgggtccaccgggcaacaagcccggttgaggccctggccgacctcaaggaggcccgggggttcctggccaaggacctggccgttttggccctgcgggagggggtggccctggaccccacggacgaccccctcctggtggcctacctcctggacccggccaacaccaaccccgagggggtggcccggcgctacgggggcgagttcacggaggacgcagcggagagggccctcctctccgagaggctcttccagaacctctttccccggctttccgagaagctcctctggctctaccaggaggtggagcggcccctctcccgggtcttggcccacatggaggcccggggggtgaggctggacgtcccccttctggaggccctctcctttgagctggagaaggagatggagcgcctggagggggaggtcttccgcttggccggccaccccttcaacctcaactcccgcgaccagctggaaagggtcctctttgacgagctgggccttaccccggtgggtcggacggagaagacgggcaagcgctccaccgcccagggggccctggaggccctccggggggcccaccccatcgtggagctcatcctccagtaccgggagctttccaagctcaaaagcacctacctggaccccctgccccggctcgtccacccgcggacgggccggcttcacacccgcttcaaccagacggccacggccacgggaaggctttccagctccgaccccaacctgcagaacatccccgtgcgcacccccttggggcagcgcatccgcaaggccttcgtggccgaggaggggtggctccttttggcggcggactactcccagatcgagcttcgggtcctggcccacctctcgggggacgagaacctgaagcgggtcttccgggaggggaaggacatccataccgaaaccgccgcctggatgttcggcttagaccccgctctagtggatccaaagatgcgccgggcggccaagacggtcaacttcggcgtcctctacgggatgtccgcccacaggctctcccaggagctcggcatagactacaaggaggcggaggcctttattgagcgctacttccagagcttccccaaggtgcgggcctggatagaaaggaccctggaggagggccggacgcggggctacgtggagaccctgttcggcaggaggcgctatgtgcccgacctggcctcccgggtccgctcggtgcgggaggcgttagagcggatggccttcaacatgcccgtgcagggcaccgccgccgacctgatgaagatcgccatggtcaagctcttccccaggctaaagcccctgggggcccacctcctcctccaggtgcacgacgagctggtcctggaggtgcccgaggaccgggccgaggaggccaaggccctggtcaaggaggtcatggagaacacctaccccttggacgtgcccctcgaggtggaggtgggcgtgggtcgggactggctggaggcgaagggggattgaagcggtcgac

SEQ ID NO: 3038 - DNA, 2605 bp, Artificial Sequence
  Description of Artificial Sequence: Synthetic DNA sequence of Thermus Rt41A DNA Polymerase A775K
atgaaatacctgctgccgaccgctgctgctggtctgctgctcctcgctgcccagccggcgatggccatggatatcggaattaattcggatccgaattccccactttttgacctggaggaaccccccaagcgggtgcttctggtggacggccaccacctggcctaccgcaccttctacgccctgagcctcaccacctcccggggggagccggtgcagatggtctacggcttcgcccggagcctcctcaaggccttgaaggaggacgggcaggcggtggtcgtggtctttgacgccaaggccccctccttccgccacgaggcctacgaggcctacaaggcgggccgggcccccaccccggaggacttcccccgccagctcgccttggtcaagcggctggtggaccttctgggcctggtccgcctcgaggccccgggttacgaggcggacgacgtcctgggcaccctggccaagaaggccgaaagggaggggatggaggtgcgcatcctcacgggagaccgggacttcttccagctcctctccgagaaggtctcggtcctcctgccggacgggaccctggtcaccccaaaggacgtccaggagaagtacggggtgccgccggagcgctgggtggacttccgcgccctcacgggggaccgctcggacaacatccccggggtggcggggataggggagaagaccgcccttcgactcctcgcggagtgggggagcgtggagaacctcctgaagaacctggaccgggtgaagccggactcggtccggcgcaagatagaggcgcaccttgaggacctccgcctctccttggacctggcccgcatccgcaccgacctccccttggaggtggactttaaggccctgcgccgcaggacccccgacctggagggcctgagggcctttttggaggagctggagttcggaagcctccttcatgagttcggcctcctgggaggggagaagccccgggaggaggccccctggcccccgcccgaaggggccttcgtaggcttcctcctctcccgcaaggagcccatgtgggcggagcttctggccctggcggccgccgcagagggccgggtccaccgggcaacaagcccggttgaggccctggccgacctcaaggaggcccgggggttcctggccaaggacctggccgttttggccctgcgggagggggtggccctggaccccacggacgaccccctcctggtggcctacctcctggacccggccaacaccaaccccgagggggtggcccggcgctacgggggcgagttcacggaggacgcagcggagagggccctcctctccgagaggctcttccagaacctctttccccggctttccgagaagctcctctggctctaccaggaggtggagcggcccctctcccgggtcttggcccacatggaggcccggggggtgaggctggacgtcccccttctggaggccctctcctttgagctggagaaggagatggagcgcctggagggggaggtcttccgcttggccggccaccccttcaacctcaactcccgcgaccagctggaaagggtcctctttgacgagctgggccttaccccggtgggtcggacggagaagacgggcaagcgctccaccgcccagggggccctggaggccctccggggggcccaccccatcgtggagctcatcctccagtaccgggagctttccaagctcaaaagcacctacctggaccccctgccccggctcgtccacccgcggacgggccggcttcacacccgcttcaaccagacggccacggccacgggaaggctttccagctccgaccccaacctgcagaacatccccgtgcgcacccccttggggcagcgcatccgcaaggccttcgtggccgaggaggggtggctccttttggcggcggactactcccagatcgagcttcgggtcctggcccacctctcgggggacgagaacctgaagcgggtcttccgggaggggaaggacatccataccgaaaccgccgcctggatgttcggcttagaccccgctctagtggatccaaagatgcgccgggcggccaagacggtcaacttcggcgtcctctacgggatgtccgcccacaggctctcccaggagctcggcatagactacaaggaggcggaggcctttattgagcgctacttccagagcttccccaaggtgcgggcctggatagaaaggaccctggaggagggccggacgcggggctacgtggagaccctgttcggcaggaggcgctatgtgcccgacctggcctcccgggtccgctcggtgcgggaggcgaaagagcggatggccttcaacatgcccgtgcagggcaccgccgccgacctgatgaagatcgccatggtcaagctcttccccaggctaaagcccctgggggcccacctcctcctccaggtgcacgacgagctggtcctggaggtgcccgaggaccgggccgaggaggccaaggccctggtcaaggaggtcatggagaacacctaccccttggacgtgcccctcgaggtggaggtgggcgtgggtcgggactggctggaggcgaagggggattgaagcggtcgac

SEQ ID NO: 3039 - DNA, 2605 bp, Artificial Sequence
  Description of Artificial Sequence: Synthetic DNA sequence of Thermus Rt41A DNA Polymerase A775E
atgaaatacctgctgccgaccgctgctgctggtctgctgctcctcgctgcccagccggcgatggccatggatatcggaattaattcggatccgaattccccactttttgacctggaggaaccccccaagcgggtgcttctggtggacggccaccacctggcctaccgcaccttctacgccctgagcctcaccacctcccggggggagccggtgcagatggtctacggcttcgcccggagcctcctcaaggccttgaaggaggacgggcaggcggtggtcgtggtctttgacgccaaggccccctccttccgccacgaggcctacgaggcctacaaggcgggccgggcccccaccccggaggacttcccccgccagctcgccttggtcaagcggctggtggaccttctgggcctggtccgcctcgaggccccgggttacgaggcggacgacgtcctgggcaccctggccaagaaggccgaaagggaggggatggaggtgcgcatcctcacgggagaccgggacttcttccagctcctctccgagaaggtctcggtcctcctgccggacgggaccctggtcaccccaaaggacgtccaggagaagtacggggtgccgccggagcgctgggtggacttccgcgccctcacgggggaccgctcggacaacatccccggggtggcggggataggggagaagaccgcccttcgactcctcgcggagtgggggagcgtggagaacctcctgaagaacctggaccgggtgaagccggactcggtccggcgcaagatagaggcgcaccttgaggacctccgcctctccttggacctggcccgcatccgcaccgacctccccttggaggtggactttaaggccctgcgccgcaggacccccgacctggagggcctgagggcctttttggaggagctggagttcggaagcctccttcatgagttcggcctcctgggaggggagaagccccgggaggaggccccctggcccccgcccgaaggggccttcgtaggcttcctcctctcccgcaaggagcccatgtgggcggagcttctggccctggcggccgccgcagagggccgggtccaccgggcaacaagcccggttgaggccctggccgacctcaaggaggcccgggggttcctggccaaggacctggccgttttggccctgcgggagggggtggccctggaccccacggacgaccccctcctggtggcctacctcctggacccggccaacaccaaccccgagggggtggcccggcgctacgggggcgagttcacggaggacgcagcggagagggccctcctctccgagaggctcttccagaacctctttccccggctttccgagaagctcctctggctctaccaggaggtggagcggcccctctcccgggtcttggcccacatggaggcccggggggtgaggctggacgtcccccttctggaggccctctcctttgagctggagaaggagatggagcgcctggagggggaggtcttccgcttggccggccaccccttcaacctcaactcccgcgaccagctggaaagggtcctctttgacgagctgggccttaccccggtgggtcggacggagaagacgggcaagcgctccaccgcccagggggccctggaggccctccggggggcccaccccatcgtggagctcatcctccagtaccgggagctttccaagctcaaaagcacctacctggaccccctgccccggctcgtccacccgcggacgggccggcttcacacccgcttcaaccagacggccacggccacgggaaggctttccagctccgaccccaacctgcagaacatccccgtgcgcacccccttggggcagcgcatccgcaaggccttcgtggccgaggaggggtggctccttttggcggcggactactcccagatcgagcttcgggtcctggcccacctctcgggggacgagaacctgaagcgggtcttccgggaggggaaggacatccataccgaaaccgccgcctggatgttcggcttagaccccgctctagtggatccaaagatgcgccgggcggccaagacggtcaacttcggcgtcctctacgggatgtccgcccacaggctctcccaggagctcggcatagactacaaggaggcggaggcctttattgagcgctacttccagagcttccccaaggtgcgggcctggatagaaaggaccctggaggagggccggacgcggggctacgtggagaccctgttcggcaggaggcgctatgtgcccgacctggcctcccgggtccgctcggtgcgggaggcggaagagcggatggccttcaacatgcccgtgcagggcaccgccgccgacctgatgaagatcgccatggtcaagctcttccccaggctaaagcccctgggggcccacctcctcctccaggtgcacgacgagctggtcctggaggtgcccgaggaccgggccgaggaggccaaggccctggtcaaggaggtcatggagaacacctaccccttggacgtgcccctcgaggtggaggtgggcgtgggtcgggactggctggaggcgaagggggattgaagcggtcgac

SEQ ID NO: 3040 - DNA, 2605 bp, Artificial Sequence
  Description of Artificial Sequence: Synthetic DNA sequence of Thermus Rt41A DNA Polymerase A775D
atgaaatacctgctgccgaccgctgctgctggtctgctgctcctcgctgcccagccggcgatggccatggatatcggaattaattcggatccgaattccccactttttgacctggaggaaccccccaagcgggtgcttctggtggacggccaccacctggcctaccgcaccttctacgccctgagcctcaccacctcccggggggagccggtgcagatggtctacggcttcgcccggagcctcctcaaggccttgaaggaggacgggcaggcggtggtcgtggtctttgacgccaaggccccctccttccgccacgaggcctacgaggcctacaaggcgggccgggcccccaccccggaggacttcccccgccagctcgccttggtcaagcggctggtggaccttctgggcctggtccgcctcgaggccccgggttacgaggcggacgacgtcctgggcaccctggccaagaaggccgaaagggaggggatggaggtgcgcatcctcacgggagaccgggacttcttccagctcctctccgagaaggtctcggtcctcctgccggacgggaccctggtcaccccaaaggacgtccaggagaagtacggggtgccgccggagcgctgggtggacttccgcgccctcacgggggaccgctcggacaacatccccggggtggcggggataggggagaagaccgcccttcgactcctcgcggagtgggggagcgtggagaacctcctgaagaacctggaccgggtgaagccggactcggtccggcgcaagatagaggcgcaccttgaggacctccgcctctccttggacctggcccgcatccgcaccgacctccccttggaggtggactttaaggccctgcgccgcaggacccccgacctggagggcctgagggcctttttggaggagctggagttcggaagcctccttcatgagttcggcctcctgggaggggagaagccccgggaggaggccccctggcccccgcccgaaggggccttcgtaggcttcctcctctcccgcaaggagcccatgtgggcggagcttctggccctggcggccgccgcagagggccgggtccaccgggcaacaagcccggttgaggccctggccgacctcaaggaggcccgggggttcctggccaaggacctggccgttttggccctgcgggagggggtggccctggaccccacggacgaccccctcctggtggcctacctcctggacccggccaacaccaaccccgagggggtggcccggcgctacgggggcgagttcacggaggacgcagcggagagggccctcctctccgagaggctcttccagaacctctttccccggctttccgagaagctcctctggctctaccaggaggtggagcggcccctctcccgggtcttggcccacatggaggcccggggggtgaggctggacgtcccccttctggaggccctctcctttgagctggagaaggagatggagcgcctggagggggaggtcttccgcttggccggccaccccttcaacctcaactcccgcgaccagctggaaagggtcctctttgacgagctgggccttaccccggtgggtcggacggagaagacgggcaagcgctccaccgcccagggggccctggaggccctccggggggcccaccccatcgtggagctcatcctccagtaccgggagctttccaagctcaaaagcacctacctggaccccctgccccggctcgtccacccgcggacgggccggcttcacacccgcttcaaccagacggccacggccacgggaaggctttccagctccgaccccaacctgcagaacatccccgtgcgcacccccttggggcagcgcatccgcaaggccttcgtggccgaggaggggtggctccttttggcggcggactactcccagatcgagcttcgggtcctggcccacctctcgggggacgagaacctgaagcgggtcttccgggaggggaaggacatccataccgaaaccgccgcctggatgttcggcttagaccccgctctagtggatccaaagatgcgccgggcggccaagacggtcaacttcggcgtcctctacgggatgtccgcccacaggctctcccaggagctcggcatagactacaaggaggcggaggcctttattgagcgctacttccagagcttccccaaggtgcgggcctggatagaaaggaccctggaggagggccggacgcggggctacgtggagaccctgttcggcaggaggcgctatgtgcccgacctggcctcccgggtccgctcggtgcgggaggcggatgagcggatggccttcaacatgcccgtgcagggcaccgccgccgacctgatgaagatcgccatggtcaagctcttccccaggctaaagcccctgggggcccacctcctcctccaggtgcacgacgagctggtcctggaggtgcccgaggaccgggccgaggaggccaaggccctggtcaaggaggtcatggagaacacctaccccttggacgtgcccctcgaggtggaggtgggcgtgggtcgggactggctggaggcgaagggggattgaagcggtcgac

SEQ ID NO: 3041 - DNA, 2605 bp, Artificial Sequence
  Description of Artificial Sequence: Synthetic DNA sequence of Thermus Rt41A DNA Polymerase A775F
atgaaatacctgctgccgaccgctgctgctggtctgctgctcctcgctgcccagccggcgatggccatggatatcggaattaattcggatccgaattccccactttttgacctggaggaaccccccaagcgggtgcttctggtggacggccaccacctggcctaccgcaccttctacgccctgagcctcaccacctcccggggggagccggtgcagatggtctacggcttcgcccggagcctcctcaaggccttgaaggaggacgggcaggcggtggtcgtggtctttgacgccaaggccccctccttccgccacgaggcctacgaggcctacaaggcgggccgggcccccaccccggaggacttcccccgccagctcgccttggtcaagcggctggtggaccttctgggcctggtccgcctcgaggccccgggttacgaggcggacgacgtcctgggcaccctggccaagaaggccgaaagggaggggatggaggtgcgcatcctcacgggagaccgggacttcttccagctcctctccgagaaggtctcggtcctcctgccggacgggaccctggtcaccccaaaggacgtccaggagaagtacggggtgccgccggagcgctgggtggacttccgcgccctcacgggggaccgctcggacaacatccccggggtggcggggataggggagaagaccgcccttcgactcctcgcggagtgggggagcgtggagaacctcctgaagaacctggaccgggtgaagccggactcggtccggcgcaagatagaggcgcaccttgaggacctccgcctctccttggacctggcccgcatccgcaccgacctccccttggaggtggactttaaggccctgcgccgcaggacccccgacctggagggcctgagggcctttttggaggagctggagttcggaagcctccttcatgagttcggcctcctgggaggggagaagccccgggaggaggccccctggcccccgcccgaaggggccttcgtaggcttcctcctctcccgcaaggagcccatgtgggcggagcttctggccctggcggccgccgcagagggccgggtccaccgggcaacaagcccggttgaggccctggccgacctcaaggaggcccgggggttcctggccaaggacctggccgttttggccctgcgggagggggtggccctggaccccacggacgaccccctcctggtggcctacctcctggacccggccaacaccaaccccgagggggtggcccggcgctacgggggcgagttcacggaggacgcagcggagagggccctcctctccgagaggctcttccagaacctctttccccggctttccgagaagctcctctggctctaccaggaggtggagcggcccctctcccgggtcttggcccacatggaggcccggggggtgaggctggacgtcccccttctggaggccctctcctttgagctggagaaggagatggagcgcctggagggggaggtcttccgcttggccggccaccccttcaacctcaactcccgcgaccagctggaaagggtcctctttgacgagctgggccttaccccggtgggtcggacggagaagacgggcaagcgctccaccgcccagggggccctggaggccctccggggggcccaccccatcgtggagctcatcctccagtaccgggagctttccaagctcaaaagcacctacctggaccccctgccccggctcgtccacccgcggacgggccggcttcacacccgcttcaaccagacggccacggccacgggaaggctttccagctccgaccccaacctgcagaacatccccgtgcgcacccccttggggcagcgcatccgcaaggccttcgtggccgaggaggggtggctccttttggcggcggactactcccagatcgagcttcgggtcctggcccacctctcgggggacgagaacctgaagcgggtcttccgggaggggaaggacatccataccgaaaccgccgcctggatgttcggcttagaccccgctctagtggatccaaagatgcgccgggcggccaagacggtcaacttcggcgtcctctacgggatgtccgcccacaggctctcccaggagctcggcatagactacaaggaggcggaggcctttattgagcgctacttccagagcttccccaaggtgcgggcctggatagaaaggaccctggaggagggccggacgcggggctacgtggagaccctgttcggcaggaggcgctatgtgcccgacctggcctcccgggtccgctcggtgcgggaggcgtttgagcggatggccttcaacatgcccgtgcagggcaccgccgccgacctgatgaagatcgccatggtcaagctcttccccaggctaaagcccctgggggcccacctcctcctccaggtgcacgacgagctggtcctggaggtgcccgaggaccgggccgaggaggccaaggccctggtcaaggaggtcatggagaacacctaccccttggacgtgcccctcgaggtggaggtgggcgtgggtcgggactggctggaggcgaagggggattgaagcggtcgac

SEQ ID NO: 3042 - DNA, 2605 bp, Artificial Sequence
  Description of Artificial Sequence: Synthetic DNA sequence of Thermus Rt41A DNA Polymerase A775S
atgaaatacctgctgccgaccgctgctgctggtctgctgctcctcgctgcccagccggcgatggccatggatatcggaattaattcggatccgaattccccactttttgacctggaggaaccccccaagcgggtgcttctggtggacggccaccacctggcctaccgcaccttctacgccctgagcctcaccacctcccggggggagccggtgcagatggtctacggcttcgcccggagcctcctcaaggccttgaaggaggacgggcaggcggtggtcgtggtctttgacgccaaggccccctccttccgccacgaggcctacgaggcctacaaggcgggccgggcccccaccccggaggacttcccccgccagctcgccttggtcaagcggctggtggaccttctgggcctggtccgcctcgaggccccgggttacgaggcggacgacgtcctgggcaccctggccaagaaggccgaaagggaggggatggaggtgcgcatcctcacgggagaccgggacttcttccagctcctctccgagaaggtctcggtcctcctgccggacgggaccctggtcaccccaaaggacgtccaggagaagtacggggtgccgccggagcgctgggtggacttccgcgccctcacgggggaccgctcggacaacatccccggggtggcggggataggggagaagaccgcccttcgactcctcgcggagtgggggagcgtggagaacctcctgaagaacctggaccgggtgaagccggactcggtccggcgcaagatagaggcgcaccttgaggacctccgcctctccttggacctggcccgcatccgcaccgacctccccttggaggtggactttaaggccctgcgccgcaggacccccgacctggagggcctgagggcctttttggaggagctggagttcggaagcctccttcatgagttcggcctcctgggaggggagaagccccgggaggaggccccctggcccccgcccgaaggggccttcgtaggcttcctcctctcccgcaaggagcccatgtgggcggagcttctggccctggcggccgccgcagagggccgggtccaccgggcaacaagcccggttgaggccctggccgacctcaaggaggcccgggggttcctggccaaggacctggccgttttggccctgcgggagggggtggccctggaccccacggacgaccccctcctggtggcctacctcctggacccggccaacaccaaccccgagggggtggcccggcgctacgggggcgagttcacggaggacgcagcggagagggccctcctctccgagaggctcttccagaacctctttccccggctttccgagaagctcctctggctctaccaggaggtggagcggcccctctcccgggtcttggcccacatggaggcccggggggtgaggctggacgtcccccttctggaggccctctcctttgagctggagaaggagatggagcgcctggagggggaggtcttccgcttggccggccaccccttcaacctcaactcccgcgaccagctggaaagggtcctctttgacgagctgggccttaccccggtgggtcggacggagaagacgggcaagcgctccaccgcccagggggccctggaggccctccggggggcccaccccatcgtggagctcatcctccagtaccgggagctttccaagctcaaaagcacctacctggaccccctgccccggctcgtccacccgcggacgggccggcttcacacccgcttcaaccagacggccacggccacgggaaggctttccagctccgaccccaacctgcagaacatccccgtgcgcacccccttggggcagcgcatccgcaaggccttcgtggccgaggaggggtggctccttttggcggcggactactcccagatcgagcttcgggtcctggcccacctctcgggggacgagaacctgaagcgggtcttccgggaggggaaggacatccataccgaaaccgccgcctggatgttcggcttagaccccgctctagtggatccaaagatgcgccgggcggccaagacggtcaacttcggcgtcctctacgggatgtccgcccacaggctctcccaggagctcggcatagactacaaggaggcggaggcctttattgagcgctacttccagagcttccccaaggtgcgggcctggatagaaaggaccctggaggagggccggacgcggggctacgtggagaccctgttcggcaggaggcgctatgtgcccgacctggcctcccgggtccgctcggtgcgggaggcgtctgagcggatggccttcaacatgcccgtgcagggcaccgccgccgacctgatgaagatcgccatggtcaagctcttccccaggctaaagcccctgggggcccacctcctcctccaggtgcacgacgagctggtcctggaggtgcccgaggaccgggccgaggaggccaaggccctggtcaaggaggtcatggagaacacctaccccttggacgtgcccctcgaggtggaggtgggcgtgggtcgggactggctggaggcgaagggggattgaagcggtcgac

SEQ ID NO: 3043 - DNA, 2605 bp, Artificial Sequence
  Description of Artificial Sequence: Synthetic DNA sequence of Thermus Rt41A DNA Polymerase A775Y
atgaaatacctgctgccgaccgctgctgctggtctgctgctcctcgctgcccagccggcgatggccatggatatcggaattaattcggatccgaattccccactttttgacctggaggaaccccccaagcgggtgcttctggtggacggccaccacctggcctaccgcaccttctacgccctgagcctcaccacctcccggggggagccggtgcagatggtctacggcttcgcccggagcctcctcaaggccttgaaggaggacgggcaggcggtggtcgtggtctttgacgccaaggccccctccttccgccacgaggcctacgaggcctacaaggcgggccgggcccccaccccggaggacttcccccgccagctcgccttggtcaagcggctggtggaccttctgggcctggtccgcctcgaggccccgggttacgaggcggacgacgtcctgggcaccctggccaagaaggccgaaagggaggggatggaggtgcgcatcctcacgggagaccgggacttcttccagctcctctccgagaaggtctcggtcctcctgccggacgggaccctggtcaccccaaaggacgtccaggagaagtacggggtgccgccggagcgctgggtggacttccgcgccctcacgggggaccgctcggacaacatccccggggtggcggggataggggagaagaccgcccttcgactcctcgcggagtgggggagcgtggagaacctcctgaagaacctggaccgggtgaagccggactcggtccggcgcaagatagaggcgcaccttgaggacctccgcctctccttggacctggcccgcatccgcaccgacctccccttggaggtggactttaaggccctgcgccgcaggacccccgacctggagggcctgagggcctttttggaggagctggagttcggaagcctccttcatgagttcggcctcctgggaggggagaagccccgggaggaggccccctggcccccgcccgaaggggccttcgtaggcttcctcctctcccgcaaggagcccatgtgggcggagcttctggccctggcggccgccgcagagggccgggtccaccgggcaacaagcccggttgaggccctggccgacctcaaggaggcccgggggttcctggccaaggacctggccgttttggccctgcgggagggggtggccctggaccccacggacgaccccctcctggtggcctacctcctggacccggccaacaccaaccccgagggggtggcccggcgctacgggggcgagttcacggaggacgcagcggagagggccctcctctccgagaggctcttccagaacctctttccccggctttccgagaagctcctctggctctaccaggaggtggagcggcccctctcccgggtcttggcccacatggaggcccggggggtgaggctggacgtcccccttctggaggccctctcctttgagctggagaaggagatggagcgcctggagggggaggtcttccgcttggccggccaccccttcaacctcaactcccgcgaccagctggaaagggtcctctttgacgagctgggccttaccccggtgggtcggacggagaagacgggcaagcgctccaccgcccagggggccctggaggccctccggggggcccaccccatcgtggagctcatcctccagtaccgggagctttccaagctcaaaagcacctacctggaccccctgccccggctcgtccacccgcggacgggccggcttcacacccgcttcaaccagacggccacggccacgggaaggctttccagctccgaccccaacctgcagaacatccccgtgcgcacccccttggggcagcgcatccgcaaggccttcgtggccgaggaggggtggctccttttggcggcggactactcccagatcgagcttcgggtcctggcccacctctcgggggacgagaacctgaagcgggtcttccgggaggggaaggacatccataccgaaaccgccgcctggatgttcggcttagaccccgctctagtggatccaaagatgcgccgggcggccaagacggtcaacttcggcgtcctctacgggatgtccgcccacaggctctcccaggagctcggcatagactacaaggaggcggaggcctttattgagcgctacttccagagcttccccaaggtgcgggcctggatagaaaggaccctggaggagggccggacgcggggctacgtggagaccctgttcggcaggaggcgctatgtgcccgacctggcctcccgggtccgctcggtgcgggaggcgtatgagcggatggccttcaacatgcccgtgcagggcaccgccgccgacctgatgaagatcgccatggtcaagctcttccccaggctaaagcccctgggggcccacctcctcctccaggtgcacgacgagctggtcctggaggtgcccgaggaccgggccgaggaggccaaggccctggtcaaggaggtcatggagaacacctaccccttggacgtgcccctcgaggtggaggtgggcgtgggtcgggactggctggaggcgaagggggattgaagcggtcgac

SEQ ID NO: 3044 - DNA, 2605 bp, Artificial Sequence
  Description of Artificial Sequence: Synthetic DNA sequence of Thermus Rt41A DNA Polymerase A775W
atgaaatacctgctgccgaccgctgctgctggtctgctgctcctcgctgcccagccggcgatggccatggatatcggaattaattcggatccgaattccccactttttgacctggaggaaccccccaagcgggtgcttctggtggacggccaccacctggcctaccgcaccttctacgccctgagcctcaccacctcccggggggagccggtgcagatggtctacggcttcgcccggagcctcctcaaggccttgaaggaggacgggcaggcggtggtcgtggtctttgacgccaaggccccctccttccgccacgaggcctacgaggcctacaaggcgggccgggcccccaccccggaggacttcccccgccagctcgccttggtcaagcggctggtggaccttctgggcctggtccgcctcgaggccccgggttacgaggcggacgacgtcctgggcaccctggccaagaaggccgaaagggaggggatggaggtgcgcatcctcacgggagaccgggacttcttccagctcctctccgagaaggtctcggtcctcctgccggacgggaccctggtcaccccaaaggacgtccaggagaagtacggggtgccgccggagcgctgggtggacttccgcgccctcacgggggaccgctcggacaacatccccggggtggcggggataggggagaagaccgcccttcgactcctcgcggagtgggggagcgtggagaacctcctgaagaacctggaccgggtgaagccggactcggtccggcgcaagatagaggcgcaccttgaggacctccgcctctccttggacctggcccgcatccgcaccgacctccccttggaggtggactttaaggccctgcgccgcaggacccccgacctggagggcctgagggcctttttggaggagctggagttcggaagcctccttcatgagttcggcctcctgggaggggagaagccccgggaggaggccccctggcccccgcccgaaggggccttcgtaggcttcctcctctcccgcaaggagcccatgtgggcggagcttctggccctggcggccgccgcagagggccgggtccaccgggcaacaagcccggttgaggccctggccgacctcaaggaggcccgggggttcctggccaaggacctggccgttttggccctgcgggagggggtggccctggaccccacggacgaccccctcctggtggcctacctcctggacccggccaacaccaaccccgagggggtggcccggcgctacgggggcgagttcacggaggacgcagcggagagggccctcctctccgagaggctcttccagaacctctttccccggctttccgagaagctcctctggctctaccaggaggtggagcggcccctctcccgggtcttggcccacatggaggcccggggggtgaggctggacgtcccccttctggaggccctctcctttgagctggagaaggagatggagcgcctggagggggaggtcttccgcttggccggccaccccttcaacctcaactcccgcgaccagctggaaagggtcctctttgacgagctgggccttaccccggtgggtcggacggagaagacgggcaagcgctccaccgcccagggggccctggaggccctccggggggcccaccccatcgtggagctcatcctccagtaccgggagctttccaagctcaaaagcacctacctggaccccctgccccggctcgtccacccgcggacgggccggcttcacacccgcttcaaccagacggccacggccacgggaaggctttccagctccgaccccaacctgcagaacatccccgtgcgcacccccttggggcagcgcatccgcaaggccttcgtggccgaggaggggtggctccttttggcggcggactactcccagatcgagcttcgggtcctggcccacctctcgggggacgagaacctgaagcgggtcttccgggaggggaaggacatccataccgaaaccgccgcctggatgttcggcttagaccccgctctagtggatccaaagatgcgccgggcggccaagacggtcaacttcggcgtcctctacgggatgtccgcccacaggctctcccaggagctcggcatagactacaaggaggcggaggcctttattgagcgctacttccagagcttccccaaggtgcgggcctggatagaaaggaccctggaggagggccggacgcggggctacgtggagaccctgttcggcaggaggcgctatgtgcccgacctggcctcccgggtccgctcggtgcgggaggcgtgggagcggatggccttcaacatgcccgtgcagggcaccgccgccgacctgatgaagatcgccatggtcaagctcttccccaggctaaagcccctgggggcccacctcctcctccaggtgcacgacgagctggtcctggaggtgcccgaggaccgggccgaggaggccaaggccctggtcaaggaggtcatggagaacacctaccccttggacgtgcccctcgaggtggaggtgggcgtgggtcgggactggctggaggcgaagggggattgaagcggtcgac

SEQ ID NO: 3045 - DNA, 2605 bp, Artificial Sequence
  Description of Artificial Sequence: Synthetic DNA sequence of Thermus Rt41A DNA Polymerase A775P
atgaaatacctgctgccgaccgctgctgctggtctgctgctcctcgctgcccagccggcgatggccatggatatcggaattaattcggatccgaattccccactttttgacctggaggaaccccccaagcgggtgcttctggtggacggccaccacctggcctaccgcaccttctacgccctgagcctcaccacctcccggggggagccggtgcagatggtctacggcttcgcccggagcctcctcaaggccttgaaggaggacgggcaggcggtggtcgtggtctttgacgccaaggccccctccttccgccacgaggcctacgaggcctacaaggcgggccgggcccccaccccggaggacttcccccgccagctcgccttggtcaagcggctggtggaccttctgggcctggtccgcctcgaggccccgggttacgaggcggacgacgtcctgggcaccctggccaagaaggccgaaagggaggggatggaggtgcgcatcctcacgggagaccgggacttcttccagctcctctccgagaaggtctcggtcctcctgccggacgggaccctggtcaccccaaaggacgtccaggagaagtacggggtgccgccggagcgctgggtggacttccgcgccctcacgggggaccgctcggacaacatccccggggtggcggggataggggagaagaccgcccttcgactcctcgcggagtgggggagcgtggagaacctcctgaagaacctggaccgggtgaagccggactcggtccggcgcaagatagaggcgcaccttgaggacctccgcctctccttggacctggcccgcatccgcaccgacctccccttggaggtggactttaaggccctgcgccgcaggacccccgacctggagggcctgagggcctttttggaggagctggagttcggaagcctccttcatgagttcggcctcctgggaggggagaagccccgggaggaggccccctggcccccgcccgaaggggccttcgtaggcttcctcctctcccgcaaggagcccatgtgggcggagcttctggccctggcggccgccgcagagggccgggtccaccgggcaacaagcccggttgaggccctggccgacctcaaggaggcccgggggttcctggccaaggacctggccgttttggccctgcgggagggggtggccctggaccccacggacgaccccctcctggtggcctacctcctggacccggccaacaccaaccccgagggggtggcccggcgctacgggggcgagttcacggaggacgcagcggagagggccctcctctccgagaggctcttccagaacctctttccccggctttccgagaagctcctctggctctaccaggaggtggagcggcccctctcccgggtcttggcccacatggaggcccggggggtgaggctggacgtcccccttctggaggccctctcctttgagctggagaaggagatggagcgcctggagggggaggtcttccgcttggccggccaccccttcaacctcaactcccgcgaccagctggaaagggtcctctttgacgagctgggccttaccccggtgggtcggacggagaagacgggcaagcgctccaccgcccagggggccctggaggccctccggggggcccaccccatcgtggagctcatcctccagtaccgggagctttccaagctcaaaagcacctacctggaccccctgccccggctcgtccacccgcggacgggccggcttcacacccgcttcaaccagacggccacggccacgggaaggctttccagctccgaccccaacctgcagaacatccccgtgcgcacccccttggggcagcgcatccgcaaggccttcgtggccgaggaggggtggctccttttggcggcggactactcccagatcgagcttcgggtcctggcccacctctcgggggacgagaacctgaagcgggtcttccgggaggggaaggacatccataccgaaaccgccgcctggatgttcggcttagaccccgctctagtggatccaaagatgcgccgggcggccaagacggtcaacttcggcgtcctctacgggatgtccgcccacaggctctcccaggagctcggcatagactacaaggaggcggaggcctttattgagcgctacttccagagcttccccaaggtgcgggcctggatagaaaggaccctggaggagggccggacgcggggctacgtggagaccctgttcggcaggaggcgctatgtgcccgacctggcctcccgggtccgctcggtgcgggaggcgcctgagcggatggccttcaacatgcccgtgcagggcaccgccgccgacctgatgaagatcgccatggtcaagctcttccccaggctaaagcccctgggggcccacctcctcctccaggtgcacgacgagctggtcctggaggtgcccgaggaccgggccgaggaggccaaggccctggtcaaggaggtcatggagaacacctaccccttggacgtgcccctcgaggtggaggtgggcgtgggtcgggactggctggaggcgaagggggattgaagcggtcgac

SEQ ID NO: 3046 - DNA, 2605 bp, Artificial Sequence
  Description of Artificial Sequence: Synthetic DNA sequence of Thermus Rt41A DNA Polymerase A775M
atgaaatacctgctgccgaccgctgctgctggtctgctgctcctcgctgcccagccggcgatggccatggatatcggaattaattcggatccgaattccccactttttgacctggaggaaccccccaagcgggtgcttctggtggacggccaccacctggcctaccgcaccttctacgccctgagcctcaccacctcccggggggagccggtgcagatggtctacggcttcgcccggagcctcctcaaggccttgaaggaggacgggcaggcggtggtcgtggtctttgacgccaaggccccctccttccgccacgaggcctacgaggcctacaaggcgggccgggcccccaccccggaggacttcccccgccagctcgccttggtcaagcggctggtggaccttctgggcctggtccgcctcgaggccccgggttacgaggcggacgacgtcctgggcaccctggccaagaaggccgaaagggaggggatggaggtgcgcatcctcacgggagaccgggacttcttccagctcctctccgagaaggtctcggtcctcctgccggacgggaccctggtcaccccaaaggacgtccaggagaagtacggggtgccgccggagcgctgggtggacttccgcgccctcacgggggaccgctcggacaacatccccggggtggcggggataggggagaagaccgcccttcgactcctcgcggagtgggggagcgtggagaacctcctgaagaacctggaccgggtgaagccggactcggtccggcgcaagatagaggcgcaccttgaggacctccgcctctccttggacctggcccgcatccgcaccgacctccccttggaggtggactttaaggccctgcgccgcaggacccccgacctggagggcctgagggcctttttggaggagctggagttcggaagcctccttcatgagttcggcctcctgggaggggagaagccccgggaggaggccccctggcccccgcccgaaggggccttcgtaggcttcctcctctcccgcaaggagcccatgtgggcggagcttctggccctggcggccgccgcagagggccgggtccaccgggcaacaagcccggttgaggccctggccgacctcaaggaggcccgggggttcctggccaaggacctggccgttttggccctgcgggagggggtggccctggaccccacggacgaccccctcctggtggcctacctcctggacccggccaacaccaaccccgagggggtggcccggcgctacgggggcgagttcacggaggacgcagcggagagggccctcctctccgagaggctcttccagaacctctttccccggctttccgagaagctcctctggctctaccaggaggtggagcggcccctctcccgggtcttggcccacatggaggcccggggggtgaggctggacgtcccccttctggaggccctctcctttgagctggagaaggagatggagcgcctggagggggaggtcttccgcttggccggccaccccttcaacctcaactcccgcgaccagctggaaagggtcctctttgacgagctgggccttaccccggtgggtcggacggagaagacgggcaagcgctccaccgcccagggggccctggaggccctccggggggcccaccccatcgtggagctcatcctccagtaccgggagctttccaagctcaaaagcacctacctggaccccctgccccggctcgtccacccgcggacgggccggcttcacacccgcttcaaccagacggccacggccacgggaaggctttccagctccgaccccaacctgcagaacatccccgtgcgcacccccttggggcagcgcatccgcaaggccttcgtggccgaggaggggtggctccttttggcggcggactactcccagatcgagcttcgggtcctggcccacctctcgggggacgagaacctgaagcgggtcttccgggaggggaaggacatccataccgaaaccgccgcctggatgttcggcttagaccccgctctagtggatccaaagatgcgccgggcggccaagacggtcaacttcggcgtcctctacgggatgtccgcccacaggctctcccaggagctcggcatagactacaaggaggcggaggcctttattgagcgctacttccagagcttccccaaggtgcgggcctggatagaaaggaccctggaggagggccggacgcggggctacgtggagaccctgttcggcaggaggcgctatgtgcccgacctggcctcccgggtccgctcggtgcgggaggcgatggagcggatggccttcaacatgcccgtgcagggcaccgccgccgacctgatgaagatcgccatggtcaagctcttccccaggctaaagcccctgggggcccacctcctcctccaggtgcacgacgagctggtcctggaggtgcccgaggaccgggccgaggaggccaaggccctggtcaaggaggtcatggagaacacctaccccttggacgtgcccctcgaggtggaggtgggcgtgggtcgggactggctggaggcgaagggggattgaagcggtcgac

SEQ ID NO: 3047 - DNA, 2605 bp, Artificial Sequence
  Description of Artificial Sequence: Synthetic DNA sequence of Thermus Rt41A DNA Polymerase A775T
atgaaatacctgctgccgaccgctgctgctggtctgctgctcctcgctgcccagccggcgatggccatggatatcggaattaattcggatccgaattccccactttttgacctggaggaaccccccaagcgggtgcttctggtggacggccaccacctggcctaccgcaccttctacgccctgagcctcaccacctcccggggggagccggtgcagatggtctacggcttcgcccggagcctcctcaaggccttgaaggaggacgggcaggcggtggtcgtggtctttgacgccaaggccccctccttccgccacgaggcctacgaggcctacaaggcgggccgggcccccaccccggaggacttcccccgccagctcgccttggtcaagcggctggtggaccttctgggcctggtccgcctcgaggccccgggttacgaggcggacgacgtcctgggcaccctggccaagaaggccgaaagggaggggatggaggtgcgcatcctcacgggagaccgggacttcttccagctcctctccgagaaggtctcggtcctcctgccggacgggaccctggtcaccccaaaggacgtccaggagaagtacggggtgccgccggagcgctgggtggacttccgcgccctcacgggggaccgctcggacaacatccccggggtggcggggataggggagaagaccgcccttcgactcctcgcggagtgggggagcgtggagaacctcctgaagaacctggaccgggtgaagccggactcggtccggcgcaagatagaggcgcaccttgaggacctccgcctctccttggacctggcccgcatccgcaccgacctccccttggaggtggactttaaggccctgcgccgcaggacccccgacctggagggcctgagggcctttttggaggagctggagttcggaagcctccttcatgagttcggcctcctgggaggggagaagccccgggaggaggccccctggcccccgcccgaaggggccttcgtaggcttcctcctctcccgcaaggagcccatgtgggcggagcttctggccctggcggccgccgcagagggccgggtccaccgggcaacaagcccggttgaggccctggccgacctcaaggaggcccgggggttcctggccaaggacctggccgttttggccctgcgggagggggtggccctggaccccacggacgaccccctcctggtggcctacctcctggacccggccaacaccaaccccgagggggtggcccggcgctacgggggcgagttcacggaggacgcagcggagagggccctcctctccgagaggctcttccagaacctctttccccggctttccgagaagctcctctggctctaccaggaggtggagcggcccctctcccgggtcttggcccacatggaggcccggggggtgaggctggacgtcccccttctggaggccctctcctttgagctggagaaggagatggagcgcctggagggggaggtcttccgcttggccggccaccccttcaacctcaactcccgcgaccagctggaaagggtcctctttgacgagctgggccttaccccggtgggtcggacggagaagacgggcaagcgctccaccgcccagggggccctggaggccctccggggggcccaccccatcgtggagctcatcctccagtaccgggagctttccaagctcaaaagcacctacctggaccccctgccccggctcgtccacccgcggacgggccggcttcacacccgcttcaaccagacggccacggccacgggaaggctttccagctccgaccccaacctgcagaacatccccgtgcgcacccccttggggcagcgcatccgcaaggccttcgtggccgaggaggggtggctccttttggcggcggactactcccagatcgagcttcgggtcctggcccacctctcgggggacgagaacctgaagcgggtcttccgggaggggaaggacatccataccgaaaccgccgcctggatgttcggcttagaccccgctctagtggatccaaagatgcgccgggcggccaagacggtcaacttcggcgtcctctacgggatgtccgcccacaggctctcccaggagctcggcatagactacaaggaggcggaggcctttattgagcgctacttccagagcttccccaaggtgcgggcctggatagaaaggaccctggaggagggccggacgcggggctacgtggagaccctgttcggcaggaggcgctatgtgcccgacctggcctcccgggtccgctcggtgcgggaggcgactgagcggatggccttcaacatgcccgtgcagggcaccgccgccgacctgatgaagatcgccatggtcaagctcttccccaggctaaagcccctgggggcccacctcctcctccaggtgcacgacgagctggtcctggaggtgcccgaggaccgggccgaggaggccaaggccctggtcaaggaggtcatggagaacacctaccccttggacgtgcccctcgaggtggaggtgggcgtgggtcgggactggctggaggcgaagggggattgaagcggtcgac

SEQ ID NO: 3048 - DNA, 2605 bp, Artificial Sequence
  Description of Artificial Sequence: Synthetic DNA sequence of Thermus Rt41A DNA Polymerase A775N
atgaaatacctgctgccgaccgctgctgctggtctgctgctcctcgctgcccagccggcgatggccatggatatcggaattaattcggatccgaattccccactttttgacctggaggaaccccccaagcgggtgcttctggtggacggccaccacctggcctaccgcaccttctacgccctgagcctcaccacctcccggggggagccggtgcagatggtctacggcttcgcccggagcctcctcaaggccttgaaggaggacgggcaggcggtggtcgtggtctttgacgccaaggccccctccttccgccacgaggcctacgaggcctacaaggcgggccgggcccccaccccggaggacttcccccgccagctcgccttggtcaagcggctggtggaccttctgggcctggtccgcctcgaggccccgggttacgaggcggacgacgtcctgggcaccctggccaagaaggccgaaagggaggggatggaggtgcgcatcctcacgggagaccgggacttcttccagctcctctccgagaaggtctcggtcctcctgccggacgggaccctggtcaccccaaaggacgtccaggagaagtacggggtgccgccggagcgctgggtggacttccgcgccctcacgggggaccgctcggacaacatccccggggtggcggggataggggagaagaccgcccttcgactcctcgcggagtgggggagcgtggagaacctcctgaagaacctggaccgggtgaagccggactcggtccggcgcaagatagaggcgcaccttgaggacctccgcctctccttggacctggcccgcatccgcaccgacctccccttggaggtggactttaaggccctgcgccgcaggacccccgacctggagggcctgagggcctttttggaggagctggagttcggaagcctccttcatgagttcggcctcctgggaggggagaagccccgggaggaggccccctggcccccgcccgaaggggccttcgtaggcttcctcctctcccgcaaggagcccatgtgggcggagcttctggccctggcggccgccgcagagggccgggtccaccgggcaacaagcccggttgaggccctggccgacctcaaggaggcccgggggttcctggccaaggacctggccgttttggccctgcgggagggggtggccctggaccccacggacgaccccctcctggtggcctacctcctggacccggccaacaccaaccccgagggggtggcccggcgctacgggggcgagttcacggaggacgcagcggagagggccctcctctccgagaggctcttccagaacctctttccccggctttccgagaagctcctctggctctaccaggaggtggagcggcccctctcccgggtcttggcccacatggaggcccggggggtgaggctggacgtcccccttctggaggccctctcctttgagctggagaaggagatggagcgcctggagggggaggtcttccgcttggccggccaccccttcaacctcaactcccgcgaccagctggaaagggtcctctttgacgagctgggccttaccccggtgggtcggacggagaagacgggcaagcgctccaccgcccagggggccctggaggccctccggggggcccaccccatcgtggagctcatcctccagtaccgggagctttccaagctcaaaagcacctacctggaccccctgccccggctcgtccacccgcggacgggccggcttcacacccgcttcaaccagacggccacggccacgggaaggctttccagctccgaccccaacctgcagaacatccccgtgcgcacccccttggggcagcgcatccgcaaggccttcgtggccgaggaggggtggctccttttggcggcggactactcccagatcgagcttcgggtcctggcccacctctcgggggacgagaacctgaagcgggtcttccgggaggggaaggacatccataccgaaaccgccgcctggatgttcggcttagaccccgctctagtggatccaaagatgcgccgggcggccaagacggtcaacttcggcgtcctctacgggatgtccgcccacaggctctcccaggagctcggcatagactacaaggaggcggaggcctttattgagcgctacttccagagcttccccaaggtgcgggcctggatagaaaggaccctggaggagggccggacgcggggctacgtggagaccctgttcggcaggaggcgctatgtgcccgacctggcctcccgggtccgctcggtgcgggaggcgaatgagcggatggccttcaacatgcccgtgcagggcaccgccgccgacctgatgaagatcgccatggtcaagctcttccccaggctaaagcccctgggggcccacctcctcctccaggtgcacgacgagctggtcctggaggtgcccgaggaccgggccgaggaggccaaggccctggtcaaggaggtcatggagaacacctaccccttggacgtgcccctcgaggtggaggtgggcgtgggtcgggactggctggaggcgaagggggattgaagcggtcgac

SEQ ID NO: 3049 - DNA, 2605 bp, Artificial Sequence
  Description of Artificial Sequence: Synthetic DNA sequence of Thermus Rt41A DNA Polymerase A775V
atgaaatacctgctgccgaccgctgctgctggtctgctgctcctcgctgcccagccggcgatggccatggatatcggaattaattcggatccgaattccccactttttgacctggaggaaccccccaagcgggtgcttctggtggacggccaccacctggcctaccgcaccttctacgccctgagcctcaccacctcccggggggagccggtgcagatggtctacggcttcgcccggagcctcctcaaggccttgaaggaggacgggcaggcggtggtcgtggtctttgacgccaaggccccctccttccgccacgaggcctacgaggcctacaaggcgggccgggcccccaccccggaggacttcccccgccagctcgccttggtcaagcggctggtggaccttctgggcctggtccgcctcgaggccccgggttacgaggcggacgacgtcctgggcaccctggccaagaaggccgaaagggaggggatggaggtgcgcatcctcacgggagaccgggacttcttccagctcctctccgagaaggtctcggtcctcctgccggacgggaccctggtcaccccaaaggacgtccaggagaagtacggggtgccgccggagcgctgggtggacttccgcgccctcacgggggaccgctcggacaacatccccggggtggcggggataggggagaagaccgcccttcgactcctcgcggagtgggggagcgtggagaacctcctgaagaacctggaccgggtgaagccggactcggtccggcgcaagatagaggcgcaccttgaggacctccgcctctccttggacctggcccgcatccgcaccgacctccccttggaggtggactttaaggccctgcgccgcaggacccccgacctggagggcctgagggcctttttggaggagctggagttcggaagcctccttcatgagttcggcctcctgggaggggagaagccccgggaggaggccccctggcccccgcccgaaggggccttcgtaggcttcctcctctcccgcaaggagcccatgtgggcggagcttctggccctggcggccgccgcagagggccgggtccaccgggcaacaagcccggttgaggccctggccgacctcaaggaggcccgggggttcctggccaaggacctggccgttttggccctgcgggagggggtggccctggaccccacggacgaccccctcctggtggcctacctcctggacccggccaacaccaaccccgagggggtggcccggcgctacgggggcgagttcacggaggacgcagcggagagggccctcctctccgagaggctcttccagaacctctttccccggctttccgagaagctcctctggctctaccaggaggtggagcggcccctctcccgggtcttggcccacatggaggcccggggggtgaggctggacgtcccccttctggaggccctctcctttgagctggagaaggagatggagcgcctggagggggaggtcttccgcttggccggccaccccttcaacctcaactcccgcgaccagctggaaagggtcctctttgacgagctgggccttaccccggtgggtcggacggagaagacgggcaagcgctccaccgcccagggggccctggaggccctccggggggcccaccccatcgtggagctcatcctccagtaccgggagctttccaagctcaaaagcacctacctggaccccctgccccggctcgtccacccgcggacgggccggcttcacacccgcttcaaccagacggccacggccacgggaaggctttccagctccgaccccaacctgcagaacatccccgtgcgcacccccttggggcagcgcatccgcaaggccttcgtggccgaggaggggtggctccttttggcggcggactactcccagatcgagcttcgggtcctggcccacctctcgggggacgagaacctgaagcgggtcttccgggaggggaaggacatccataccgaaaccgccgcctggatgttcggcttagaccccgctctagtggatccaaagatgcgccgggcggccaagacggtcaacttcggcgtcctctacgggatgtccgcccacaggctctcccaggagctcggcatagactacaaggaggcggaggcctttattgagcgctacttccagagcttccccaaggtgcgggcctggatagaaaggaccctggaggagggccggacgcggggctacgtggagaccctgttcggcaggaggcgctatgtgcccgacctggcctcccgggtccgctcggtgcgggaggcggtcgagcggatggccttcaacatgcccgtgcagggcaccgccgccgacctgatgaagatcgccatggtcaagctcttccccaggctaaagcccctgggggcccacctcctcctccaggtgcacgacgagctggtcctggaggtgcccgaggaccgggccgaggaggccaaggccctggtcaaggaggtcatggagaacacctaccccttggacgtgcccctcgaggtggaggtgggcgtgggtcgggactggctggaggcgaagggggattgaagcggtcgac

SEQ ID NO: 3050 - DNA, 2605 bp, Artificial Sequence
  Description of Artificial Sequence: Synthetic DNA sequence of Thermus Rt41A DNA Polymerase E776A
atgaaatacctgctgccgaccgctgctgctggtctgctgctcctcgctgcccagccggcgatggccatggatatcggaattaattcggatccgaattccccactttttgacctggaggaaccccccaagcgggtgcttctggtggacggccaccacctggcctaccgcaccttctacgccctgagcctcaccacctcccggggggagccggtgcagatggtctacggcttcgcccggagcctcctcaaggccttgaaggaggacgggcaggcggtggtcgtggtctttgacgccaaggccccctccttccgccacgaggcctacgaggcctacaaggcgggccgggcccccaccccggaggacttcccccgccagctcgccttggtcaagcggctggtggaccttctgggcctggtccgcctcgaggccccgggttacgaggcggacgacgtcctgggcaccctggccaagaaggccgaaagggaggggatggaggtgcgcatcctcacgggagaccgggacttcttccagctcctctccgagaaggtctcggtcctcctgccggacgggaccctggtcaccccaaaggacgtccaggagaagtacggggtgccgccggagcgctgggtggacttccgcgccctcacgggggaccgctcggacaacatccccggggtggcggggataggggagaagaccgcccttcgactcctcgcggagtgggggagcgtggagaacctcctgaagaacctggaccgggtgaagccggactcggtccggcgcaagatagaggcgcaccttgaggacctccgcctctccttggacctggcccgcatccgcaccgacctccccttggaggtggactttaaggccctgcgccgcaggacccccgacctggagggcctgagggcctttttggaggagctggagttcggaagcctccttcatgagttcggcctcctgggaggggagaagccccgggaggaggccccctggcccccgcccgaaggggccttcgtaggcttcctcctctcccgcaaggagcccatgtgggcggagcttctggccctggcggccgccgcagagggccgggtccaccgggcaacaagcccggttgaggccctggccgacctcaaggaggcccgggggttcctggccaaggacctggccgttttggccctgcgggagggggtggccctggaccccacggacgaccccctcctggtggcctacctcctggacccggccaacaccaaccccgagggggtggcccggcgctacgggggcgagttcacggaggacgcagcggagagggccctcctctccgagaggctcttccagaacctctttccccggctttccgagaagctcctctggctctaccaggaggtggagcggcccctctcccgggtcttggcccacatggaggcccggggggtgaggctggacgtcccccttctggaggccctctcctttgagctggagaaggagatggagcgcctggagggggaggtcttccgcttggccggccaccccttcaacctcaactcccgcgaccagctggaaagggtcctctttgacgagctgggccttaccccggtgggtcggacggagaagacgggcaagcgctccaccgcccagggggccctggaggccctccggggggcccaccccatcgtggagctcatcctccagtaccgggagctttccaagctcaaaagcacctacctggaccccctgccccggctcgtccacccgcggacgggccggcttcacacccgcttcaaccagacggccacggccacgggaaggctttccagctccgaccccaacctgcagaacatccccgtgcgcacccccttggggcagcgcatccgcaaggccttcgtggccgaggaggggtggctccttttggcggcggactactcccagatcgagcttcgggtcctggcccacctctcgggggacgagaacctgaagcgggtcttccgggaggggaaggacatccataccgaaaccgccgcctggatgttcggcttagaccccgctctagtggatccaaagatgcgccgggcggccaagacggtcaacttcggcgtcctctacgggatgtccgcccacaggctctcccaggagctcggcatagactacaaggaggcggaggcctttattgagcgctacttccagagcttccccaaggtgcgggcctggatagaaaggaccctggaggagggccggacgcggggctacgtggagaccctgttcggcaggaggcgctatgtgcccgacctggcctcccgggtccgctcggtgcgggaggcggcggctcggatggccttcaacatgcccgtgcagggcaccgccgccgacctgatgaagatcgccatggtcaagctcttccccaggctaaagcccctgggggcccacctcctcctccaggtgcacgacgagctggtcctggaggtgcccgaggaccgggccgaggaggccaaggccctggtcaaggaggtcatggagaacacctaccccttggacgtgcccctcgaggtggaggtgggcgtgggtcgggactggctggaggcgaagggggattgaagcggtcgac

SEQ ID NO: 3051 - DNA, 2605 bp, Artificial Sequence
  Description of Artificial Sequence: Synthetic DNA sequence of Thermus Rt41A DNA Polymerase E776R
atgaaatacctgctgccgaccgctgctgctggtctgctgctcctcgctgcccagccggcgatggccatggatatcggaattaattcggatccgaattccccactttttgacctggaggaaccccccaagcgggtgcttctggtggacggccaccacctggcctaccgcaccttctacgccctgagcctcaccacctcccggggggagccggtgcagatggtctacggcttcgcccggagcctcctcaaggccttgaaggaggacgggcaggcggtggtcgtggtctttgacgccaaggccccctccttccgccacgaggcctacgaggcctacaaggcgggccgggcccccaccccggaggacttcccccgccagctcgccttggtcaagcggctggtggaccttctgggcctggtccgcctcgaggccccgggttacgaggcggacgacgtcctgggcaccctggccaagaaggccgaaagggaggggatggaggtgcgcatcctcacgggagaccgggacttcttccagctcctctccgagaaggtctcggtcctcctgccggacgggaccctggtcaccccaaaggacgtccaggagaagtacggggtgccgccggagcgctgggtggacttccgcgccctcacgggggaccgctcggacaacatccccggggtggcggggataggggagaagaccgcccttcgactcctcgcggagtgggggagcgtggagaacctcctgaagaacctggaccgggtgaagccggactcggtccggcgcaagatagaggcgcaccttgaggacctccgcctctccttggacctggcccgcatccgcaccgacctccccttggaggtggactttaaggccctgcgccgcaggacccccgacctggagggcctgagggcctttttggaggagctggagttcggaagcctccttcatgagttcggcctcctgggaggggagaagccccgggaggaggccccctggcccccgcccgaaggggccttcgtaggcttcctcctctcccgcaaggagcccatgtgggcggagcttctggccctggcggccgccgcagagggccgggtccaccgggcaacaagcccggttgaggccctggccgacctcaaggaggcccgggggttcctggccaaggacctggccgttttggccctgcgggagggggtggccctggaccccacggacgaccccctcctggtggcctacctcctggacccggccaacaccaaccccgagggggtggcccggcgctacgggggcgagttcacggaggacgcagcggagagggccctcctctccgagaggctcttccagaacctctttccccggctttccgagaagctcctctggctctaccaggaggtggagcggcccctctcccgggtcttggcccacatggaggcccggggggtgaggctggacgtcccccttctggaggccctctcctttgagctggagaaggagatggagcgcctggagggggaggtcttccgcttggccggccaccccttcaacctcaactcccgcgaccagctggaaagggtcctctttgacgagctgggccttaccccggtgggtcggacggagaagacgggcaagcgctccaccgcccagggggccctggaggccctccggggggcccaccccatcgtggagctcatcctccagtaccgggagctttccaagctcaaaagcacctacctggaccccctgccccggctcgtccacccgcggacgggccggcttcacacccgcttcaaccagacggccacggccacgggaaggctttccagctccgaccccaacctgcagaacatccccgtgcgcacccccttggggcagcgcatccgcaaggccttcgtggccgaggaggggtggctccttttggcggcggactactcccagatcgagcttcgggtcctggcccacctctcgggggacgagaacctgaagcgggtcttccgggaggggaaggacatccataccgaaaccgccgcctggatgttcggcttagaccccgctctagtggatccaaagatgcgccgggcggccaagacggtcaacttcggcgtcctctacgggatgtccgcccacaggctctcccaggagctcggcatagactacaaggaggcggaggcctttattgagcgctacttccagagcttccccaaggtgcgggcctggatagaaaggaccctggaggagggccggacgcggggctacgtggagaccctgttcggcaggaggcgctatgtgcccgacctggcctcccgggtccgctcggtgcgggaggcggcgcgacggatggccttcaacatgcccgtgcagggcaccgccgccgacctgatgaagatcgccatggtcaagctcttccccaggctaaagcccctgggggcccacctcctcctccaggtgcacgacgagctggtcctggaggtgcccgaggaccgggccgaggaggccaaggccctggtcaaggaggtcatggagaacacctaccccttggacgtgcccctcgaggtggaggtgggcgtgggtcgggactggctggaggcgaagggggattgaagcggtcgac

SEQ ID NO: 3052 - DNA, 2605 bp, Artificial Sequence
  Description of Artificial Sequence: Synthetic DNA sequence of Thermus Rt41A DNA Polymerase E776C
atgaaatacctgctgccgaccgctgctgctggtctgctgctcctcgctgcccagccggcgatggccatggatatcggaattaattcggatccgaattccccactttttgacctggaggaaccccccaagcgggtgcttctggtggacggccaccacctggcctaccgcaccttctacgccctgagcctcaccacctcccggggggagccggtgcagatggtctacggcttcgcccggagcctcctcaaggccttgaaggaggacgggcaggcggtggtcgtggtctttgacgccaaggccccctccttccgccacgaggcctacgaggcctacaaggcgggccgggcccccaccccggaggacttcccccgccagctcgccttggtcaagcggctggtggaccttctgggcctggtccgcctcgaggccccgggttacgaggcggacgacgtcctgggcaccctggccaagaaggccgaaagggaggggatggaggtgcgcatcctcacgggagaccgggacttcttccagctcctctccgagaaggtctcggtcctcctgccggacgggaccctggtcaccccaaaggacgtccaggagaagtacggggtgccgccggagcgctgggtggacttccgcgccctcacgggggaccgctcggacaacatccccggggtggcggggataggggagaagaccgcccttcgactcctcgcggagtgggggagcgtggagaacctcctgaagaacctggaccgggtgaagccggactcggtccggcgcaagatagaggcgcaccttgaggacctccgcctctccttggacctggcccgcatccgcaccgacctccccttggaggtggactttaaggccctgcgccgcaggacccccgacctggagggcctgagggcctttttggaggagctggagttcggaagcctccttcatgagttcggcctcctgggaggggagaagccccgggaggaggccccctggcccccgcccgaaggggccttcgtaggcttcctcctctcccgcaaggagcccatgtgggcggagcttctggccctggcggccgccgcagagggccgggtccaccgggcaacaagcccggttgaggccctggccgacctcaaggaggcccgggggttcctggccaaggacctggccgttttggccctgcgggagggggtggccctggaccccacggacgaccccctcctggtggcctacctcctggacccggccaacaccaaccccgagggggtggcccggcgctacgggggcgagttcacggaggacgcagcggagagggccctcctctccgagaggctcttccagaacctctttccccggctttccgagaagctcctctggctctaccaggaggtggagcggcccctctcccgggtcttggcccacatggaggcccggggggtgaggctggacgtcccccttctggaggccctctcctttgagctggagaaggagatggagcgcctggagggggaggtcttccgcttggccggccaccccttcaacctcaactcccgcgaccagctggaaagggtcctctttgacgagctgggccttaccccggtgggtcggacggagaagacgggcaagcgctccaccgcccagggggccctggaggccctccggggggcccaccccatcgtggagctcatcctccagtaccgggagctttccaagctcaaaagcacctacctggaccccctgccccggctcgtccacccgcggacgggccggcttcacacccgcttcaaccagacggccacggccacgggaaggctttccagctccgaccccaacctgcagaacatccccgtgcgcacccccttggggcagcgcatccgcaaggccttcgtggccgaggaggggtggctccttttggcggcggactactcccagatcgagcttcgggtcctggcccacctctcgggggacgagaacctgaagcgggtcttccgggaggggaaggacatccataccgaaaccgccgcctggatgttcggcttagaccccgctctagtggatccaaagatgcgccgggcggccaagacggtcaacttcggcgtcctctacgggatgtccgcccacaggctctcccaggagctcggcatagactacaaggaggcggaggcctttattgagcgctacttccagagcttccccaaggtgcgggcctggatagaaaggaccctggaggagggccggacgcggggctacgtggagaccctgttcggcaggaggcgctatgtgcccgacctggcctcccgggtccgctcggtgcgggaggcggcgtgtcggatggccttcaacatgcccgtgcagggcaccgccgccgacctgatgaagatcgccatggtcaagctcttccccaggctaaagcccctgggggcccacctcctcctccaggtgcacgacgagctggtcctggaggtgcccgaggaccgggccgaggaggccaaggccctggtcaaggaggtcatggagaacacctaccccttggacgtgcccctcgaggtggaggtgggcgtgggtcgggactggctggaggcgaagggggattgaagcggtcgac

SEQ ID NO: 3053 - DNA, 2605 bp, Artificial Sequence
  Description of Artificial Sequence: Synthetic DNA sequence of Thermus Rt41A DNA Polymerase E776G
atgaaatacctgctgccgaccgctgctgctggtctgctgctcctcgctgcccagccggcgatggccatggatatcggaattaattcggatccgaattccccactttttgacctggaggaaccccccaagcgggtgcttctggtggacggccaccacctggcctaccgcaccttctacgccctgagcctcaccacctcccggggggagccggtgcagatggtctacggcttcgcccggagcctcctcaaggccttgaaggaggacgggcaggcggtggtcgtggtctttgacgccaaggccccctccttccgccacgaggcctacgaggcctacaaggcgggccgggcccccaccccggaggacttcccccgccagctcgccttggtcaagcggctggtggaccttctgggcctggtccgcctcgaggccccgggttacgaggcggacgacgtcctgggcaccctggccaagaaggccgaaagggaggggatggaggtgcgcatcctcacgggagaccgggacttcttccagctcctctccgagaaggtctcggtcctcctgccggacgggaccctggtcaccccaaaggacgtccaggagaagtacggggtgccgccggagcgctgggtggacttccgcgccctcacgggggaccgctcggacaacatccccggggtggcggggataggggagaagaccgcccttcgactcctcgcggagtgggggagcgtggagaacctcctgaagaacctggaccgggtgaagccggactcggtccggcgcaagatagaggcgcaccttgaggacctccgcctctccttggacctggcccgcatccgcaccgacctccccttggaggtggactttaaggccctgcgccgcaggacccccgacctggagggcctgagggcctttttggaggagctggagttcggaagcctccttcatgagttcggcctcctgggaggggagaagccccgggaggaggccccctggcccccgcccgaaggggccttcgtaggcttcctcctctcccgcaaggagcccatgtgggcggagcttctggccctggcggccgccgcagagggccgggtccaccgggcaacaagcccggttgaggccctggccgacctcaaggaggcccgggggttcctggccaaggacctggccgttttggccctgcgggagggggtggccctggaccccacggacgaccccctcctggtggcctacctcctggacccggccaacaccaaccccgagggggtggcccggcgctacgggggcgagttcacggaggacgcagcggagagggccctcctctccgagaggctcttccagaacctctttccccggctttccgagaagctcctctggctctaccaggaggtggagcggcccctctcccgggtcttggcccacatggaggcccggggggtgaggctggacgtcccccttctggaggccctctcctttgagctggagaaggagatggagcgcctggagggggaggtcttccgcttggccggccaccccttcaacctcaactcccgcgaccagctggaaagggtcctctttgacgagctgggccttaccccggtgggtcggacggagaagacgggcaagcgctccaccgcccagggggccctggaggccctccggggggcccaccccatcgtggagctcatcctccagtaccgggagctttccaagctcaaaagcacctacctggaccccctgccccggctcgtccacccgcggacgggccggcttcacacccgcttcaaccagacggccacggccacgggaaggctttccagctccgaccccaacctgcagaacatccccgtgcgcacccccttggggcagcgcatccgcaaggccttcgtggccgaggaggggtggctccttttggcggcggactactcccagatcgagcttcgggtcctggcccacctctcgggggacgagaacctgaagcgggtcttccgggaggggaaggacatccataccgaaaccgccgcctggatgttcggcttagaccccgctctagtggatccaaagatgcgccgggcggccaagacggtcaacttcggcgtcctctacgggatgtccgcccacaggctctcccaggagctcggcatagactacaaggaggcggaggcctttattgagcgctacttccagagcttccccaaggtgcgggcctggatagaaaggaccctggaggagggccggacgcggggctacgtggagaccctgttcggcaggaggcgctatgtgcccgacctggcctcccgggtccgctcggtgcgggaggcggcgggtcggatggccttcaacatgcccgtgcagggcaccgccgccgacctgatgaagatcgccatggtcaagctcttccccaggctaaagcccctgggggcccacctcctcctccaggtgcacgacgagctggtcctggaggtgcccgaggaccgggccgaggaggccaaggccctggtcaaggaggtcatggagaacacctaccccttggacgtgcccctcgaggtggaggtgggcgtgggtcgggactggctggaggcgaagggggattgaagcggtcgac

SEQ ID NO: 3054 - DNA, 2605 bp, Artificial Sequence
  Description of Artificial Sequence: Synthetic DNA sequence of Thermus Rt41A DNA Polymerase E776Q
atgaaatacctgctgccgaccgctgctgctggtctgctgctcctcgctgcccagccggcgatggccatggatatcggaattaattcggatccgaattccccactttttgacctggaggaaccccccaagcgggtgcttctggtggacggccaccacctggcctaccgcaccttctacgccctgagcctcaccacctcccggggggagccggtgcagatggtctacggcttcgcccggagcctcctcaaggccttgaaggaggacgggcaggcggtggtcgtggtctttgacgccaaggccccctccttccgccacgaggcctacgaggcctacaaggcgggccgggcccccaccccggaggacttcccccgccagctcgccttggtcaagcggctggtggaccttctgggcctggtccgcctcgaggccccgggttacgaggcggacgacgtcctgggcaccctggccaagaaggccgaaagggaggggatggaggtgcgcatcctcacgggagaccgggacttcttccagctcctctccgagaaggtctcggtcctcctgccggacgggaccctggtcaccccaaaggacgtccaggagaagtacggggtgccgccggagcgctgggtggacttccgcgccctcacgggggaccgctcggacaacatccccggggtggcggggataggggagaagaccgcccttcgactcctcgcggagtgggggagcgtggagaacctcctgaagaacctggaccgggtgaagccggactcggtccggcgcaagatagaggcgcaccttgaggacctccgcctctccttggacctggcccgcatccgcaccgacctccccttggaggtggactttaaggccctgcgccgcaggacccccgacctggagggcctgagggcctttttggaggagctggagttcggaagcctccttcatgagttcggcctcctgggaggggagaagccccgggaggaggccccctggcccccgcccgaaggggccttcgtaggcttcctcctctcccgcaaggagcccatgtgggcggagcttctggccctggcggccgccgcagagggccgggtccaccgggcaacaagcccggttgaggccctggccgacctcaaggaggcccgggggttcctggccaaggacctggccgttttggccctgcgggagggggtggccctggaccccacggacgaccccctcctggtggcctacctcctggacccggccaacaccaaccccgagggggtggcccggcgctacgggggcgagttcacggaggacgcagcggagagggccctcctctccgagaggctcttccagaacctctttccccggctttccgagaagctcctctggctctaccaggaggtggagcggcccctctcccgggtcttggcccacatggaggcccggggggtgaggctggacgtcccccttctggaggccctctcctttgagctggagaaggagatggagcgcctggagggggaggtcttccgcttggccggccaccccttcaacctcaactcccgcgaccagctggaaagggtcctctttgacgagctgggccttaccccggtgggtcggacggagaagacgggcaagcgctccaccgcccagggggccctggaggccctccggggggcccaccccatcgtggagctcatcctccagtaccgggagctttccaagctcaaaagcacctacctggaccccctgccccggctcgtccacccgcggacgggccggcttcacacccgcttcaaccagacggccacggccacgggaaggctttccagctccgaccccaacctgcagaacatccccgtgcgcacccccttggggcagcgcatccgcaaggccttcgtggccgaggaggggtggctccttttggcggcggactactcccagatcgagcttcgggtcctggcccacctctcgggggacgagaacctgaagcgggtcttccgggaggggaaggacatccataccgaaaccgccgcctggatgttcggcttagaccccgctctagtggatccaaagatgcgccgggcggccaagacggtcaacttcggcgtcctctacgggatgtccgcccacaggctctcccaggagctcggcatagactacaaggaggcggaggcctttattgagcgctacttccagagcttccccaaggtgcgggcctggatagaaaggaccctggaggagggccggacgcggggctacgtggagaccctgttcggcaggaggcgctatgtgcccgacctggcctcccgggtccgctcggtgcgggaggcggcgcaacggatggccttcaacatgcccgtgcagggcaccgccgccgacctgatgaagatcgccatggtcaagctcttccccaggctaaagcccctgggggcccacctcctcctccaggtgcacgacgagctggtcctggaggtgcccgaggaccgggccgaggaggccaaggccctggtcaaggaggtcatggagaacacctaccccttggacgtgcccctcgaggtggaggtgggcgtgggtcgggactggctggaggcgaagggggattgaagcggtcgac

SEQ ID NO: 3055 - DNA, 2605 bp, Artificial Sequence
  Description of Artificial Sequence: Synthetic DNA sequence of Thermus Rt41A DNA Polymerase E776H
atgaaatacctgctgccgaccgctgctgctggtctgctgctcctcgctgcccagccggcgatggccatggatatcggaattaattcggatccgaattccccactttttgacctggaggaaccccccaagcgggtgcttctggtggacggccaccacctggcctaccgcaccttctacgccctgagcctcaccacctcccggggggagccggtgcagatggtctacggcttcgcccggagcctcctcaaggccttgaaggaggacgggcaggcggtggtcgtggtctttgacgccaaggccccctccttccgccacgaggcctacgaggcctacaaggcgggccgggcccccaccccggaggacttcccccgccagctcgccttggtcaagcggctggtggaccttctgggcctggtccgcctcgaggccccgggttacgaggcggacgacgtcctgggcaccctggccaagaaggccgaaagggaggggatggaggtgcgcatcctcacgggagaccgggacttcttccagctcctctccgagaaggtctcggtcctcctgccggacgggaccctggtcaccccaaaggacgtccaggagaagtacggggtgccgccggagcgctgggtggacttccgcgccctcacgggggaccgctcggacaacatccccggggtggcggggataggggagaagaccgcccttcgactcctcgcggagtgggggagcgtggagaacctcctgaagaacctggaccgggtgaagccggactcggtccggcgcaagatagaggcgcaccttgaggacctccgcctctccttggacctggcccgcatccgcaccgacctccccttggaggtggactttaaggccctgcgccgcaggacccccgacctggagggcctgagggcctttttggaggagctggagttcggaagcctccttcatgagttcggcctcctgggaggggagaagccccgggaggaggccccctggcccccgcccgaaggggccttcgtaggcttcctcctctcccgcaaggagcccatgtgggcggagcttctggccctggcggccgccgcagagggccgggtccaccgggcaacaagcccggttgaggccctggccgacctcaaggaggcccgggggttcctggccaaggacctggccgttttggccctgcgggagggggtggccctggaccccacggacgaccccctcctggtggcctacctcctggacccggccaacaccaaccccgagggggtggcccggcgctacgggggcgagttcacggaggacgcagcggagagggccctcctctccgagaggctcttccagaacctctttccccggctttccgagaagctcctctggctctaccaggaggtggagcggcccctctcccgggtcttggcccacatggaggcccggggggtgaggctggacgtcccccttctggaggccctctcctttgagctggagaaggagatggagcgcctggagggggaggtcttccgcttggccggccaccccttcaacctcaactcccgcgaccagctggaaagggtcctctttgacgagctgggccttaccccggtgggtcggacggagaagacgggcaagcgctccaccgcccagggggccctggaggccctccggggggcccaccccatcgtggagctcatcctccagtaccgggagctttccaagctcaaaagcacctacctggaccccctgccccggctcgtccacccgcggacgggccggcttcacacccgcttcaaccagacggccacggccacgggaaggctttccagctccgaccccaacctgcagaacatccccgtgcgcacccccttggggcagcgcatccgcaaggccttcgtggccgaggaggggtggctccttttggcggcggactactcccagatcgagcttcgggtcctggcccacctctcgggggacgagaacctgaagcgggtcttccgggaggggaaggacatccataccgaaaccgccgcctggatgttcggcttagaccccgctctagtggatccaaagatgcgccgggcggccaagacggtcaacttcggcgtcctctacgggatgtccgcccacaggctctcccaggagctcggcatagactacaaggaggcggaggcctttattgagcgctacttccagagcttccccaaggtgcgggcctggatagaaaggaccctggaggagggccggacgcggggctacgtggagaccctgttcggcaggaggcgctatgtgcccgacctggcctcccgggtccgctcggtgcgggaggcggcgcatcggatggccttcaacatgcccgtgcagggcaccgccgccgacctgatgaagatcgccatggtcaagctcttccccaggctaaagcccctgggggcccacctcctcctccaggtgcacgacgagctggtcctggaggtgcccgaggaccgggccgaggaggccaaggccctggtcaaggaggtcatggagaacacctaccccttggacgtgcccctcgaggtggaggtgggcgtgggtcgggactggctggaggcgaagggggattgaagcggtcgac

SEQ ID NO: 3056 - DNA, 2605 bp, Artificial Sequence
  Description of Artificial Sequence: Synthetic DNA sequence of Thermus Rt41A DNA Polymerase E776I
atgaaatacctgctgccgaccgctgctgctggtctgctgctcctcgctgcccagccggcgatggccatggatatcggaattaattcggatccgaattccccactttttgacctggaggaaccccccaagcgggtgcttctggtggacggccaccacctggcctaccgcaccttctacgccctgagcctcaccacctcccggggggagccggtgcagatggtctacggcttcgcccggagcctcctcaaggccttgaaggaggacgggcaggcggtggtcgtggtctttgacgccaaggccccctccttccgccacgaggcctacgaggcctacaaggcgggccgggcccccaccccggaggacttcccccgccagctcgccttggtcaagcggctggtggaccttctgggcctggtccgcctcgaggccccgggttacgaggcggacgacgtcctgggcaccctggccaagaaggccgaaagggaggggatggaggtgcgcatcctcacgggagaccgggacttcttccagctcctctccgagaaggtctcggtcctcctgccggacgggaccctggtcaccccaaaggacgtccaggagaagtacggggtgccgccggagcgctgggtggacttccgcgccctcacgggggaccgctcggacaacatccccggggtggcggggataggggagaagaccgcccttcgactcctcgcggagtgggggagcgtggagaacctcctgaagaacctggaccgggtgaagccggactcggtccggcgcaagatagaggcgcaccttgaggacctccgcctctccttggacctggcccgcatccgcaccgacctccccttggaggtggactttaaggccctgcgccgcaggacccccgacctggagggcctgagggcctttttggaggagctggagttcggaagcctccttcatgagttcggcctcctgggaggggagaagccccgggaggaggccccctggcccccgcccgaaggggccttcgtaggcttcctcctctcccgcaaggagcccatgtgggcggagcttctggccctggcggccgccgcagagggccgggtccaccgggcaacaagcccggttgaggccctggccgacctcaaggaggcccgggggttcctggccaaggacctggccgttttggccctgcgggagggggtggccctggaccccacggacgaccccctcctggtggcctacctcctggacccggccaacaccaaccccgagggggtggcccggcgctacgggggcgagttcacggaggacgcagcggagagggccctcctctccgagaggctcttccagaacctctttccccggctttccgagaagctcctctggctctaccaggaggtggagcggcccctctcccgggtcttggcccacatggaggcccggggggtgaggctggacgtcccccttctggaggccctctcctttgagctggagaaggagatggagcgcctggagggggaggtcttccgcttggccggccaccccttcaacctcaactcccgcgaccagctggaaagggtcctctttgacgagctgggccttaccccggtgggtcggacggagaagacgggcaagcgctccaccgcccagggggccctggaggccctccggggggcccaccccatcgtggagctcatcctccagtaccgggagctttccaagctcaaaagcacctacctggaccccctgccccggctcgtccacccgcggacgggccggcttcacacccgcttcaaccagacggccacggccacgggaaggctttccagctccgaccccaacctgcagaacatccccgtgcgcacccccttggggcagcgcatccgcaaggccttcgtggccgaggaggggtggctccttttggcggcggactactcccagatcgagcttcgggtcctggcccacctctcgggggacgagaacctgaagcgggtcttccgggaggggaaggacatccataccgaaaccgccgcctggatgttcggcttagaccccgctctagtggatccaaagatgcgccgggcggccaagacggtcaacttcggcgtcctctacgggatgtccgcccacaggctctcccaggagctcggcatagactacaaggaggcggaggcctttattgagcgctacttccagagcttccccaaggtgcgggcctggatagaaaggaccctggaggagggccggacgcggggctacgtggagaccctgttcggcaggaggcgctatgtgcccgacctggcctcccgggtccgctcggtgcgggaggcggcgattcggatggccttcaacatgcccgtgcagggcaccgccgccgacctgatgaagatcgccatggtcaagctcttccccaggctaaagcccctgggggcccacctcctcctccaggtgcacgacgagctggtcctggaggtgcccgaggaccgggccgaggaggccaaggccctggtcaaggaggtcatggagaacacctaccccttggacgtgcccctcgaggtggaggtgggcgtgggtcgggactggctggaggcgaagggggattgaagcggtcgac

SEQ ID NO: 3057 - DNA, 2605 bp, Artificial Sequence
  Description of Artificial Sequence: Synthetic DNA sequence of Thermus Rt41A DNA Polymerase E776L
atgaaatacctgctgccgaccgctgctgctggtctgctgctcctcgctgcccagccggcgatggccatggatatcggaattaattcggatccgaattccccactttttgacctggaggaaccccccaagcgggtgcttctggtggacggccaccacctggcctaccgcaccttctacgccctgagcctcaccacctcccggggggagccggtgcagatggtctacggcttcgcccggagcctcctcaaggccttgaaggaggacgggcaggcggtggtcgtggtctttgacgccaaggccccctccttccgccacgaggcctacgaggcctacaaggcgggccgggcccccaccccggaggacttcccccgccagctcgccttggtcaagcggctggtggaccttctgggcctggtccgcctcgaggccccgggttacgaggcggacgacgtcctgggcaccctggccaagaaggccgaaagggaggggatggaggtgcgcatcctcacgggagaccgggacttcttccagctcctctccgagaaggtctcggtcctcctgccggacgggaccctggtcaccccaaaggacgtccaggagaagtacggggtgccgccggagcgctgggtggacttccgcgccctcacgggggaccgctcggacaacatccccggggtggcggggataggggagaagaccgcccttcgactcctcgcggagtgggggagcgtggagaacctcctgaagaacctggaccgggtgaagccggactcggtccggcgcaagatagaggcgcaccttgaggacctccgcctctccttggacctggcccgcatccgcaccgacctccccttggaggtggactttaaggccctgcgccgcaggacccccgacctggagggcctgagggcctttttggaggagctggagttcggaagcctccttcatgagttcggcctcctgggaggggagaagccccgggaggaggccccctggcccccgcccgaaggggccttcgtaggcttcctcctctcccgcaaggagcccatgtgggcggagcttctggccctggcggccgccgcagagggccgggtccaccgggcaacaagcccggttgaggccctggccgacctcaaggaggcccgggggttcctggccaaggacctggccgttttggccctgcgggagggggtggccctggaccccacggacgaccccctcctggtggcctacctcctggacccggccaacaccaaccccgagggggtggcccggcgctacgggggcgagttcacggaggacgcagcggagagggccctcctctccgagaggctcttccagaacctctttccccggctttccgagaagctcctctggctctaccaggaggtggagcggcccctctcccgggtcttggcccacatggaggcccggggggtgaggctggacgtcccccttctggaggccctctcctttgagctggagaaggagatggagcgcctggagggggaggtcttccgcttggccggccaccccttcaacctcaactcccgcgaccagctggaaagggtcctctttgacgagctgggccttaccccggtgggtcggacggagaagacgggcaagcgctccaccgcccagggggccctggaggccctccggggggcccaccccatcgtggagctcatcctccagtaccgggagctttccaagctcaaaagcacctacctggaccccctgccccggctcgtccacccgcggacgggccggcttcacacccgcttcaaccagacggccacggccacgggaaggctttccagctccgaccccaacctgcagaacatccccgtgcgcacccccttggggcagcgcatccgcaaggccttcgtggccgaggaggggtggctccttttggcggcggactactcccagatcgagcttcgggtcctggcccacctctcgggggacgagaacctgaagcgggtcttccgggaggggaaggacatccataccgaaaccgccgcctggatgttcggcttagaccccgctctagtggatccaaagatgcgccgggcggccaagacggtcaacttcggcgtcctctacgggatgtccgcccacaggctctcccaggagctcggcatagactacaaggaggcggaggcctttattgagcgctacttccagagcttccccaaggtgcgggcctggatagaaaggaccctggaggagggccggacgcggggctacgtggagaccctgttcggcaggaggcgctatgtgcccgacctggcctcccgggtccgctcggtgcgggaggcggcgttacggatggccttcaacatgcccgtgcagggcaccgccgccgacctgatgaagatcgccatggtcaagctcttccccaggctaaagcccctgggggcccacctcctcctccaggtgcacgacgagctggtcctggaggtgcccgaggaccgggccgaggaggccaaggccctggtcaaggaggtcatggagaacacctaccccttggacgtgcccctcgaggtggaggtgggcgtgggtcgggactggctggaggcgaagggggattgaagcggtcgac

SEQ ID NO: 3058 - DNA, 2605 bp, Artificial Sequence
  Description of Artificial Sequence: Synthetic DNA sequence of Thermus Rt41A DNA Polymerase E776K
atgaaatacctgctgccgaccgctgctgctggtctgctgctcctcgctgcccagccggcgatggccatggatatcggaattaattcggatccgaattccccactttttgacctggaggaaccccccaagcgggtgcttctggtggacggccaccacctggcctaccgcaccttctacgccctgagcctcaccacctcccggggggagccggtgcagatggtctacggcttcgcccggagcctcctcaaggccttgaaggaggacgggcaggcggtggtcgtggtctttgacgccaaggccccctccttccgccacgaggcctacgaggcctacaaggcgggccgggcccccaccccggaggacttcccccgccagctcgccttggtcaagcggctggtggaccttctgggcctggtccgcctcgaggccccgggttacgaggcggacgacgtcctgggcaccctggccaagaaggccgaaagggaggggatggaggtgcgcatcctcacgggagaccgggacttcttccagctcctctccgagaaggtctcggtcctcctgccggacgggaccctggtcaccccaaaggacgtccaggagaagtacggggtgccgccggagcgctgggtggacttccgcgccctcacgggggaccgctcggacaacatccccggggtggcggggataggggagaagaccgcccttcgactcctcgcggagtgggggagcgtggagaacctcctgaagaacctggaccgggtgaagccggactcggtccggcgcaagatagaggcgcaccttgaggacctccgcctctccttggacctggcccgcatccgcaccgacctccccttggaggtggactttaaggccctgcgccgcaggacccccgacctggagggcctgagggcctttttggaggagctggagttcggaagcctccttcatgagttcggcctcctgggaggggagaagccccgggaggaggccccctggcccccgcccgaaggggccttcgtaggcttcctcctctcccgcaaggagcccatgtgggcggagcttctggccctggcggccgccgcagagggccgggtccaccgggcaacaagcccggttgaggccctggccgacctcaaggaggcccgggggttcctggccaaggacctggccgttttggccctgcgggagggggtggccctggaccccacggacgaccccctcctggtggcctacctcctggacccggccaacaccaaccccgagggggtggcccggcgctacgggggcgagttcacggaggacgcagcggagagggccctcctctccgagaggctcttccagaacctctttccccggctttccgagaagctcctctggctctaccaggaggtggagcggcccctctcccgggtcttggcccacatggaggcccggggggtgaggctggacgtcccccttctggaggccctctcctttgagctggagaaggagatggagcgcctggagggggaggtcttccgcttggccggccaccccttcaacctcaactcccgcgaccagctggaaagggtcctctttgacgagctgggccttaccccggtgggtcggacggagaagacgggcaagcgctccaccgcccagggggccctggaggccctccggggggcccaccccatcgtggagctcatcctccagtaccgggagctttccaagctcaaaagcacctacctggaccccctgccccggctcgtccacccgcggacgggccggcttcacacccgcttcaaccagacggccacggccacgggaaggctttccagctccgaccccaacctgcagaacatccccgtgcgcacccccttggggcagcgcatccgcaaggccttcgtggccgaggaggggtggctccttttggcggcggactactcccagatcgagcttcgggtcctggcccacctctcgggggacgagaacctgaagcgggtcttccgggaggggaaggacatccataccgaaaccgccgcctggatgttcggcttagaccccgctctagtggatccaaagatgcgccgggcggccaagacggtcaacttcggcgtcctctacgggatgtccgcccacaggctctcccaggagctcggcatagactacaaggaggcggaggcctttattgagcgctacttccagagcttccccaaggtgcgggcctggatagaaaggaccctggaggagggccggacgcggggctacgtggagaccctgttcggcaggaggcgctatgtgcccgacctggcctcccgggtccgctcggtgcgggaggcggcgaaacggatggccttcaacatgcccgtgcagggcaccgccgccgacctgatgaagatcgccatggtcaagctcttccccaggctaaagcccctgggggcccacctcctcctccaggtgcacgacgagctggtcctggaggtgcccgaggaccgggccgaggaggccaaggccctggtcaaggaggtcatggagaacacctaccccttggacgtgcccctcgaggtggaggtgggcgtgggtcgggactggctggaggcgaagggggattgaagcggtcgac

SEQ ID NO: 3059 - DNA, 2605 bp, Artificial Sequence
  Description of Artificial Sequence: Synthetic DNA sequence of Thermus Rt41A DNA Polymerase E776D
atgaaatacctgctgccgaccgctgctgctggtctgctgctcctcgctgcccagccggcgatggccatggatatcggaattaattcggatccgaattccccactttttgacctggaggaaccccccaagcgggtgcttctggtggacggccaccacctggcctaccgcaccttctacgccctgagcctcaccacctcccggggggagccggtgcagatggtctacggcttcgcccggagcctcctcaaggccttgaaggaggacgggcaggcggtggtcgtggtctttgacgccaaggccccctccttccgccacgaggcctacgaggcctacaaggcgggccgggcccccaccccggaggacttcccccgccagctcgccttggtcaagcggctggtggaccttctgggcctggtccgcctcgaggccccgggttacgaggcggacgacgtcctgggcaccctggccaagaaggccgaaagggaggggatggaggtgcgcatcctcacgggagaccgggacttcttccagctcctctccgagaaggtctcggtcctcctgccggacgggaccctggtcaccccaaaggacgtccaggagaagtacggggtgccgccggagcgctgggtggacttccgcgccctcacgggggaccgctcggacaacatccccggggtggcggggataggggagaagaccgcccttcgactcctcgcggagtgggggagcgtggagaacctcctgaagaacctggaccgggtgaagccggactcggtccggcgcaagatagaggcgcaccttgaggacctccgcctctccttggacctggcccgcatccgcaccgacctccccttggaggtggactttaaggccctgcgccgcaggacccccgacctggagggcctgagggcctttttggaggagctggagttcggaagcctccttcatgagttcggcctcctgggaggggagaagccccgggaggaggccccctggcccccgcccgaaggggccttcgtaggcttcctcctctcccgcaaggagcccatgtgggcggagcttctggccctggcggccgccgcagagggccgggtccaccgggcaacaagcccggttgaggccctggccgacctcaaggaggcccgggggttcctggccaaggacctggccgttttggccctgcgggagggggtggccctggaccccacggacgaccccctcctggtggcctacctcctggacccggccaacaccaaccccgagggggtggcccggcgctacgggggcgagttcacggaggacgcagcggagagggccctcctctccgagaggctcttccagaacctctttccccggctttccgagaagctcctctggctctaccaggaggtggagcggcccctctcccgggtcttggcccacatggaggcccggggggtgaggctggacgtcccccttctggaggccctctcctttgagctggagaaggagatggagcgcctggagggggaggtcttccgcttggccggccaccccttcaacctcaactcccgcgaccagctggaaagggtcctctttgacgagctgggccttaccccggtgggtcggacggagaagacgggcaagcgctccaccgcccagggggccctggaggccctccggggggcccaccccatcgtggagctcatcctccagtaccgggagctttccaagctcaaaagcacctacctggaccccctgccccggctcgtccacccgcggacgggccggcttcacacccgcttcaaccagacggccacggccacgggaaggctttccagctccgaccccaacctgcagaacatccccgtgcgcacccccttggggcagcgcatccgcaaggccttcgtggccgaggaggggtggctccttttggcggcggactactcccagatcgagcttcgggtcctggcccacctctcgggggacgagaacctgaagcgggtcttccgggaggggaaggacatccataccgaaaccgccgcctggatgttcggcttagaccccgctctagtggatccaaagatgcgccgggcggccaagacggtcaacttcggcgtcctctacgggatgtccgcccacaggctctcccaggagctcggcatagactacaaggaggcggaggcctttattgagcgctacttccagagcttccccaaggtgcgggcctggatagaaaggaccctggaggagggccggacgcggggctacgtggagaccctgttcggcaggaggcgctatgtgcccgacctggcctcccgggtccgctcggtgcgggaggcggcggatcggatggccttcaacatgcccgtgcagggcaccgccgccgacctgatgaagatcgccatggtcaagctcttccccaggctaaagcccctgggggcccacctcctcctccaggtgcacgacgagctggtcctggaggtgcccgaggaccgggccgaggaggccaaggccctggtcaaggaggtcatggagaacacctaccccttggacgtgcccctcgaggtggaggtgggcgtgggtcgggactggctggaggcgaagggggattgaagcggtcgac

SEQ ID NO: 3060 - DNA, 2605 bp, Artificial Sequence
  Description of Artificial Sequence: Synthetic DNA sequence of Thermus Rt41A DNA Polymerase E776F
atgaaatacctgctgccgaccgctgctgctggtctgctgctcctcgctgcccagccggcgatggccatggatatcggaattaattcggatccgaattccccactttttgacctggaggaaccccccaagcgggtgcttctggtggacggccaccacctggcctaccgcaccttctacgccctgagcctcaccacctcccggggggagccggtgcagatggtctacggcttcgcccggagcctcctcaaggccttgaaggaggacgggcaggcggtggtcgtggtctttgacgccaaggccccctccttccgccacgaggcctacgaggcctacaaggcgggccgggcccccaccccggaggacttcccccgccagctcgccttggtcaagcggctggtggaccttctgggcctggtccgcctcgaggccccgggttacgaggcggacgacgtcctgggcaccctggccaagaaggccgaaagggaggggatggaggtgcgcatcctcacgggagaccgggacttcttccagctcctctccgagaaggtctcggtcctcctgccggacgggaccctggtcaccccaaaggacgtccaggagaagtacggggtgccgccggagcgctgggtggacttccgcgccctcacgggggaccgctcggacaacatccccggggtggcggggataggggagaagaccgcccttcgactcctcgcggagtgggggagcgtggagaacctcctgaagaacctggaccgggtgaagccggactcggtccggcgcaagatagaggcgcaccttgaggacctccgcctctccttggacctggcccgcatccgcaccgacctccccttggaggtggactttaaggccctgcgccgcaggacccccgacctggagggcctgagggcctttttggaggagctggagttcggaagcctccttcatgagttcggcctcctgggaggggagaagccccgggaggaggccccctggcccccgcccgaaggggccttcgtaggcttcctcctctcccgcaaggagcccatgtgggcggagcttctggccctggcggccgccgcagagggccgggtccaccgggcaacaagcccggttgaggccctggccgacctcaaggaggcccgggggttcctggccaaggacctggccgttttggccctgcgggagggggtggccctggaccccacggacgaccccctcctggtggcctacctcctggacccggccaacaccaaccccgagggggtggcccggcgctacgggggcgagttcacggaggacgcagcggagagggccctcctctccgagaggctcttccagaacctctttccccggctttccgagaagctcctctggctctaccaggaggtggagcggcccctctcccgggtcttggcccacatggaggcccggggggtgaggctggacgtcccccttctggaggccctctcctttgagctggagaaggagatggagcgcctggagggggaggtcttccgcttggccggccaccccttcaacctcaactcccgcgaccagctggaaagggtcctctttgacgagctgggccttaccccggtgggtcggacggagaagacgggcaagcgctccaccgcccagggggccctggaggccctccggggggcccaccccatcgtggagctcatcctccagtaccgggagctttccaagctcaaaagcacctacctggaccccctgccccggctcgtccacccgcggacgggccggcttcacacccgcttcaaccagacggccacggccacgggaaggctttccagctccgaccccaacctgcagaacatccccgtgcgcacccccttggggcagcgcatccgcaaggccttcgtggccgaggaggggtggctccttttggcggcggactactcccagatcgagcttcgggtcctggcccacctctcgggggacgagaacctgaagcgggtcttccgggaggggaaggacatccataccgaaaccgccgcctggatgttcggcttagaccccgctctagtggatccaaagatgcgccgggcggccaagacggtcaacttcggcgtcctctacgggatgtccgcccacaggctctcccaggagctcggcatagactacaaggaggcggaggcctttattgagcgctacttccagagcttccccaaggtgcgggcctggatagaaaggaccctggaggagggccggacgcggggctacgtggagaccctgttcggcaggaggcgctatgtgcccgacctggcctcccgggtccgctcggtgcgggaggcggcgtttcggatggccttcaacatgcccgtgcagggcaccgccgccgacctgatgaagatcgccatggtcaagctcttccccaggctaaagcccctgggggcccacctcctcctccaggtgcacgacgagctggtcctggaggtgcccgaggaccgggccgaggaggccaaggccctggtcaaggaggtcatggagaacacctaccccttggacgtgcccctcgaggtggaggtgggcgtgggtcgggactggctggaggcgaagggggattgaagcggtcgac

SEQ ID NO: 3061 - DNA, 2605 bp, Artificial Sequence
  Description of Artificial Sequence: Synthetic DNA sequence of Thermus Rt41A DNA Polymerase E776S
atgaaatacctgctgccgaccgctgctgctggtctgctgctcctcgctgcccagccggcgatggccatggatatcggaattaattcggatccgaattccccactttttgacctggaggaaccccccaagcgggtgcttctggtggacggccaccacctggcctaccgcaccttctacgccctgagcctcaccacctcccggggggagccggtgcagatggtctacggcttcgcccggagcctcctcaaggccttgaaggaggacgggcaggcggtggtcgtggtctttgacgccaaggccccctccttccgccacgaggcctacgaggcctacaaggcgggccgggcccccaccccggaggacttcccccgccagctcgccttggtcaagcggctggtggaccttctgggcctggtccgcctcgaggccccgggttacgaggcggacgacgtcctgggcaccctggccaagaaggccgaaagggaggggatggaggtgcgcatcctcacgggagaccgggacttcttccagctcctctccgagaaggtctcggtcctcctgccggacgggaccctggtcaccccaaaggacgtccaggagaagtacggggtgccgccggagcgctgggtggacttccgcgccctcacgggggaccgctcggacaacatccccggggtggcggggataggggagaagaccgcccttcgactcctcgcggagtgggggagcgtggagaacctcctgaagaacctggaccgggtgaagccggactcggtccggcgcaagatagaggcgcaccttgaggacctccgcctctccttggacctggcccgcatccgcaccgacctccccttggaggtggactttaaggccctgcgccgcaggacccccgacctggagggcctgagggcctttttggaggagctggagttcggaagcctccttcatgagttcggcctcctgggaggggagaagccccgggaggaggccccctggcccccgcccgaaggggccttcgtaggcttcctcctctcccgcaaggagcccatgtgggcggagcttctggccctggcggccgccgcagagggccgggtccaccgggcaacaagcccggttgaggccctggccgacctcaaggaggcccgggggttcctggccaaggacctggccgttttggccctgcgggagggggtggccctggaccccacggacgaccccctcctggtggcctacctcctggacccggccaacaccaaccccgagggggtggcccggcgctacgggggcgagttcacggaggacgcagcggagagggccctcctctccgagaggctcttccagaacctctttccccggctttccgagaagctcctctggctctaccaggaggtggagcggcccctctcccgggtcttggcccacatggaggcccggggggtgaggctggacgtcccccttctggaggccctctcctttgagctggagaaggagatggagcgcctggagggggaggtcttccgcttggccggccaccccttcaacctcaactcccgcgaccagctggaaagggtcctctttgacgagctgggccttaccccggtgggtcggacggagaagacgggcaagcgctccaccgcccagggggccctggaggccctccggggggcccaccccatcgtggagctcatcctccagtaccgggagctttccaagctcaaaagcacctacctggaccccctgccccggctcgtccacccgcggacgggccggcttcacacccgcttcaaccagacggccacggccacgggaaggctttccagctccgaccccaacctgcagaacatccccgtgcgcacccccttggggcagcgcatccgcaaggccttcgtggccgaggaggggtggctccttttggcggcggactactcccagatcgagcttcgggtcctggcccacctctcgggggacgagaacctgaagcgggtcttccgggaggggaaggacatccataccgaaaccgccgcctggatgttcggcttagaccccgctctagtggatccaaagatgcgccgggcggccaagacggtcaacttcggcgtcctctacgggatgtccgcccacaggctctcccaggagctcggcatagactacaaggaggcggaggcctttattgagcgctacttccagagcttccccaaggtgcgggcctggatagaaaggaccctggaggagggccggacgcggggctacgtggagaccctgttcggcaggaggcgctatgtgcccgacctggcctcccgggtccgctcggtgcgggaggcggcgtctcggatggccttcaacatgcccgtgcagggcaccgccgccgacctgatgaagatcgccatggtcaagctcttccccaggctaaagcccctgggggcccacctcctcctccaggtgcacgacgagctggtcctggaggtgcccgaggaccgggccgaggaggccaaggccctggtcaaggaggtcatggagaacacctaccccttggacgtgcccctcgaggtggaggtgggcgtgggtcgggactggctggaggcgaagggggattgaagcggtcgac

SEQ ID NO: 3062 - DNA, 2605 bp, Artificial Sequence
  Description of Artificial Sequence: Synthetic DNA sequence of Thermus Rt41A DNA Polymerase E776Y
atgaaatacctgctgccgaccgctgctgctggtctgctgctcctcgctgcccagccggcgatggccatggatatcggaattaattcggatccgaattccccactttttgacctggaggaaccccccaagcgggtgcttctggtggacggccaccacctggcctaccgcaccttctacgccctgagcctcaccacctcccggggggagccggtgcagatggtctacggcttcgcccggagcctcctcaaggccttgaaggaggacgggcaggcggtggtcgtggtctttgacgccaaggccccctccttccgccacgaggcctacgaggcctacaaggcgggccgggcccccaccccggaggacttcccccgccagctcgccttggtcaagcggctggtggaccttctgggcctggtccgcctcgaggccccgggttacgaggcggacgacgtcctgggcaccctggccaagaaggccgaaagggaggggatggaggtgcgcatcctcacgggagaccgggacttcttccagctcctctccgagaaggtctcggtcctcctgccggacgggaccctggtcaccccaaaggacgtccaggagaagtacggggtgccgccggagcgctgggtggacttccgcgccctcacgggggaccgctcggacaacatccccggggtggcggggataggggagaagaccgcccttcgactcctcgcggagtgggggagcgtggagaacctcctgaagaacctggaccgggtgaagccggactcggtccggcgcaagatagaggcgcaccttgaggacctccgcctctccttggacctggcccgcatccgcaccgacctccccttggaggtggactttaaggccctgcgccgcaggacccccgacctggagggcctgagggcctttttggaggagctggagttcggaagcctccttcatgagttcggcctcctgggaggggagaagccccgggaggaggccccctggcccccgcccgaaggggccttcgtaggcttcctcctctcccgcaaggagcccatgtgggcggagcttctggccctggcggccgccgcagagggccgggtccaccgggcaacaagcccggttgaggccctggccgacctcaaggaggcccgggggttcctggccaaggacctggccgttttggccctgcgggagggggtggccctggaccccacggacgaccccctcctggtggcctacctcctggacccggccaacaccaaccccgagggggtggcccggcgctacgggggcgagttcacggaggacgcagcggagagggccctcctctccgagaggctcttccagaacctctttccccggctttccgagaagctcctctggctctaccaggaggtggagcggcccctctcccgggtcttggcccacatggaggcccggggggtgaggctggacgtcccccttctggaggccctctcctttgagctggagaaggagatggagcgcctggagggggaggtcttccgcttggccggccaccccttcaacctcaactcccgcgaccagctggaaagggtcctctttgacgagctgggccttaccccggtgggtcggacggagaagacgggcaagcgctccaccgcccagggggccctggaggccctccggggggcccaccccatcgtggagctcatcctccagtaccgggagctttccaagctcaaaagcacctacctggaccccctgccccggctcgtccacccgcggacgggccggcttcacacccgcttcaaccagacggccacggccacgggaaggctttccagctccgaccccaacctgcagaacatccccgtgcgcacccccttggggcagcgcatccgcaaggccttcgtggccgaggaggggtggctccttttggcggcggactactcccagatcgagcttcgggtcctggcccacctctcgggggacgagaacctgaagcgggtcttccgggaggggaaggacatccataccgaaaccgccgcctggatgttcggcttagaccccgctctagtggatccaaagatgcgccgggcggccaagacggtcaacttcggcgtcctctacgggatgtccgcccacaggctctcccaggagctcggcatagactacaaggaggcggaggcctttattgagcgctacttccagagcttccccaaggtgcgggcctggatagaaaggaccctggaggagggccggacgcggggctacgtggagaccctgttcggcaggaggcgctatgtgcccgacctggcctcccgggtccgctcggtgcgggaggcggcgtatcggatggccttcaacatgcccgtgcagggcaccgccgccgacctgatgaagatcgccatggtcaagctcttccccaggctaaagcccctgggggcccacctcctcctccaggtgcacgacgagctggtcctggaggtgcccgaggaccgggccgaggaggccaaggccctggtcaaggaggtcatggagaacacctaccccttggacgtgcccctcgaggtggaggtgggcgtgggtcgggactggctggaggcgaagggggattgaagcggtcgac

SEQ ID NO: 3063 - DNA, 2605 bp, Artificial Sequence
  Description of Artificial Sequence: Synthetic DNA sequence of Thermus Rt41A DNA Polymerase E776W
atgaaatacctgctgccgaccgctgctgctggtctgctgctcctcgctgcccagccggcgatggccatggatatcggaattaattcggatccgaattccccactttttgacctggaggaaccccccaagcgggtgcttctggtggacggccaccacctggcctaccgcaccttctacgccctgagcctcaccacctcccggggggagccggtgcagatggtctacggcttcgcccggagcctcctcaaggccttgaaggaggacgggcaggcggtggtcgtggtctttgacgccaaggccccctccttccgccacgaggcctacgaggcctacaaggcgggccgggcccccaccccggaggacttcccccgccagctcgccttggtcaagcggctggtggaccttctgggcctggtccgcctcgaggccccgggttacgaggcggacgacgtcctgggcaccctggccaagaaggccgaaagggaggggatggaggtgcgcatcctcacgggagaccgggacttcttccagctcctctccgagaaggtctcggtcctcctgccggacgggaccctggtcaccccaaaggacgtccaggagaagtacggggtgccgccggagcgctgggtggacttccgcgccctcacgggggaccgctcggacaacatccccggggtggcggggataggggagaagaccgcccttcgactcctcgcggagtgggggagcgtggagaacctcctgaagaacctggaccgggtgaagccggactcggtccggcgcaagatagaggcgcaccttgaggacctccgcctctccttggacctggcccgcatccgcaccgacctccccttggaggtggactttaaggccctgcgccgcaggacccccgacctggagggcctgagggcctttttggaggagctggagttcggaagcctccttcatgagttcggcctcctgggaggggagaagccccgggaggaggccccctggcccccgcccgaaggggccttcgtaggcttcctcctctcccgcaaggagcccatgtgggcggagcttctggccctggcggccgccgcagagggccgggtccaccgggcaacaagcccggttgaggccctggccgacctcaaggaggcccgggggttcctggccaaggacctggccgttttggccctgcgggagggggtggccctggaccccacggacgaccccctcctggtggcctacctcctggacccggccaacaccaaccccgagggggtggcccggcgctacgggggcgagttcacggaggacgcagcggagagggccctcctctccgagaggctcttccagaacctctttccccggctttccgagaagctcctctggctctaccaggaggtggagcggcccctctcccgggtcttggcccacatggaggcccggggggtgaggctggacgtcccccttctggaggccctctcctttgagctggagaaggagatggagcgcctggagggggaggtcttccgcttggccggccaccccttcaacctcaactcccgcgaccagctggaaagggtcctctttgacgagctgggccttaccccggtgggtcggacggagaagacgggcaagcgctccaccgcccagggggccctggaggccctccggggggcccaccccatcgtggagctcatcctccagtaccgggagctttccaagctcaaaagcacctacctggaccccctgccccggctcgtccacccgcggacgggccggcttcacacccgcttcaaccagacggccacggccacgggaaggctttccagctccgaccccaacctgcagaacatccccgtgcgcacccccttggggcagcgcatccgcaaggccttcgtggccgaggaggggtggctccttttggcggcggactactcccagatcgagcttcgggtcctggcccacctctcgggggacgagaacctgaagcgggtcttccgggaggggaaggacatccataccgaaaccgccgcctggatgttcggcttagaccccgctctagtggatccaaagatgcgccgggcggccaagacggtcaacttcggcgtcctctacgggatgtccgcccacaggctctcccaggagctcggcatagactacaaggaggcggaggcctttattgagcgctacttccagagcttccccaaggtgcgggcctggatagaaaggaccctggaggagggccggacgcggggctacgtggagaccctgttcggcaggaggcgctatgtgcccgacctggcctcccgggtccgctcggtgcgggaggcggcgtggcggatggccttcaacatgcccgtgcagggcaccgccgccgacctgatgaagatcgccatggtcaagctcttccccaggctaaagcccctgggggcccacctcctcctccaggtgcacgacgagctggtcctggaggtgcccgaggaccgggccgaggaggccaaggccctggtcaaggaggtcatggagaacacctaccccttggacgtgcccctcgaggtggaggtgggcgtgggtcgggactggctggaggcgaagggggattgaagcggtcgac

SEQ ID NO: 3064 - DNA, 2605 bp, Artificial Sequence
  Description of Artificial Sequence: Synthetic DNA sequence of Thermus Rt41A DNA Polymerase E776P
atgaaatacctgctgccgaccgctgctgctggtctgctgctcctcgctgcccagccggcgatggccatggatatcggaattaattcggatccgaattccccactttttgacctggaggaaccccccaagcgggtgcttctggtggacggccaccacctggcctaccgcaccttctacgccctgagcctcaccacctcccggggggagccggtgcagatggtctacggcttcgcccggagcctcctcaaggccttgaaggaggacgggcaggcggtggtcgtggtctttgacgccaaggccccctccttccgccacgaggcctacgaggcctacaaggcgggccgggcccccaccccggaggacttcccccgccagctcgccttggtcaagcggctggtggaccttctgggcctggtccgcctcgaggccccgggttacgaggcggacgacgtcctgggcaccctggccaagaaggccgaaagggaggggatggaggtgcgcatcctcacgggagaccgggacttcttccagctcctctccgagaaggtctcggtcctcctgccggacgggaccctggtcaccccaaaggacgtccaggagaagtacggggtgccgccggagcgctgggtggacttccgcgccctcacgggggaccgctcggacaacatccccggggtggcggggataggggagaagaccgcccttcgactcctcgcggagtgggggagcgtggagaacctcctgaagaacctggaccgggtgaagccggactcggtccggcgcaagatagaggcgcaccttgaggacctccgcctctccttggacctggcccgcatccgcaccgacctccccttggaggtggactttaaggccctgcgccgcaggacccccgacctggagggcctgagggcctttttggaggagctggagttcggaagcctccttcatgagttcggcctcctgggaggggagaagccccgggaggaggccccctggcccccgcccgaaggggccttcgtaggcttcctcctctcccgcaaggagcccatgtgggcggagcttctggccctggcggccgccgcagagggccgggtccaccgggcaacaagcccggttgaggccctggccgacctcaaggaggcccgggggttcctggccaaggacctggccgttttggccctgcgggagggggtggccctggaccccacggacgaccccctcctggtggcctacctcctggacccggccaacaccaaccccgagggggtggcccggcgctacgggggcgagttcacggaggacgcagcggagagggccctcctctccgagaggctcttccagaacctctttccccggctttccgagaagctcctctggctctaccaggaggtggagcggcccctctcccgggtcttggcccacatggaggcccggggggtgaggctggacgtcccccttctggaggccctctcctttgagctggagaaggagatggagcgcctggagggggaggtcttccgcttggccggccaccccttcaacctcaactcccgcgaccagctggaaagggtcctctttgacgagctgggccttaccccggtgggtcggacggagaagacgggcaagcgctccaccgcccagggggccctggaggccctccggggggcccaccccatcgtggagctcatcctccagtaccgggagctttccaagctcaaaagcacctacctggaccccctgccccggctcgtccacccgcggacgggccggcttcacacccgcttcaaccagacggccacggccacgggaaggctttccagctccgaccccaacctgcagaacatccccgtgcgcacccccttggggcagcgcatccgcaaggccttcgtggccgaggaggggtggctccttttggcggcggactactcccagatcgagcttcgggtcctggcccacctctcgggggacgagaacctgaagcgggtcttccgggaggggaaggacatccataccgaaaccgccgcctggatgttcggcttagaccccgctctagtggatccaaagatgcgccgggcggccaagacggtcaacttcggcgtcctctacgggatgtccgcccacaggctctcccaggagctcggcatagactacaaggaggcggaggcctttattgagcgctacttccagagcttccccaaggtgcgggcctggatagaaaggaccctggaggagggccggacgcggggctacgtggagaccctgttcggcaggaggcgctatgtgcccgacctggcctcccgggtccgctcggtgcgggaggcggcgcctcggatggccttcaacatgcccgtgcagggcaccgccgccgacctgatgaagatcgccatggtcaagctcttccccaggctaaagcccctgggggcccacctcctcctccaggtgcacgacgagctggtcctggaggtgcccgaggaccgggccgaggaggccaaggccctggtcaaggaggtcatggagaacacctaccccttggacgtgcccctcgaggtggaggtgggcgtgggtcgggactggctggaggcgaagggggattgaagcggtcgac

SEQ ID NO: 3065 - DNA, 2605 bp, Artificial Sequence
  Description of Artificial Sequence: Synthetic DNA sequence of Thermus Rt41A DNA Polymerase E776M
atgaaatacctgctgccgaccgctgctgctggtctgctgctcctcgctgcccagccggcgatggccatggatatcggaattaattcggatccgaattccccactttttgacctggaggaaccccccaagcgggtgcttctggtggacggccaccacctggcctaccgcaccttctacgccctgagcctcaccacctcccggggggagccggtgcagatggtctacggcttcgcccggagcctcctcaaggccttgaaggaggacgggcaggcggtggtcgtggtctttgacgccaaggccccctccttccgccacgaggcctacgaggcctacaaggcgggccgggcccccaccccggaggacttcccccgccagctcgccttggtcaagcggctggtggaccttctgggcctggtccgcctcgaggccccgggttacgaggcggacgacgtcctgggcaccctggccaagaaggccgaaagggaggggatggaggtgcgcatcctcacgggagaccgggacttcttccagctcctctccgagaaggtctcggtcctcctgccggacgggaccctggtcaccccaaaggacgtccaggagaagtacggggtgccgccggagcgctgggtggacttccgcgccctcacgggggaccgctcggacaacatccccggggtggcggggataggggagaagaccgcccttcgactcctcgcggagtgggggagcgtggagaacctcctgaagaacctggaccgggtgaagccggactcggtccggcgcaagatagaggcgcaccttgaggacctccgcctctccttggacctggcccgcatccgcaccgacctccccttggaggtggactttaaggccctgcgccgcaggacccccgacctggagggcctgagggcctttttggaggagctggagttcggaagcctccttcatgagttcggcctcctgggaggggagaagccccgggaggaggccccctggcccccgcccgaaggggccttcgtaggcttcctcctctcccgcaaggagcccatgtgggcggagcttctggccctggcggccgccgcagagggccgggtccaccgggcaacaagcccggttgaggccctggccgacctcaaggaggcccgggggttcctggccaaggacctggccgttttggccctgcgggagggggtggccctggaccccacggacgaccccctcctggtggcctacctcctggacccggccaacaccaaccccgagggggtggcccggcgctacgggggcgagttcacggaggacgcagcggagagggccctcctctccgagaggctcttccagaacctctttccccggctttccgagaagctcctctggctctaccaggaggtggagcggcccctctcccgggtcttggcccacatggaggcccggggggtgaggctggacgtcccccttctggaggccctctcctttgagctggagaaggagatggagcgcctggagggggaggtcttccgcttggccggccaccccttcaacctcaactcccgcgaccagctggaaagggtcctctttgacgagctgggccttaccccggtgggtcggacggagaagacgggcaagcgctccaccgcccagggggccctggaggccctccggggggcccaccccatcgtggagctcatcctccagtaccgggagctttccaagctcaaaagcacctacctggaccccctgccccggctcgtccacccgcggacgggccggcttcacacccgcttcaaccagacggccacggccacgggaaggctttccagctccgaccccaacctgcagaacatccccgtgcgcacccccttggggcagcgcatccgcaaggccttcgtggccgaggaggggtggctccttttggcggcggactactcccagatcgagcttcgggtcctggcccacctctcgggggacgagaacctgaagcgggtcttccgggaggggaaggacatccataccgaaaccgccgcctggatgttcggcttagaccccgctctagtggatccaaagatgcgccgggcggccaagacggtcaacttcggcgtcctctacgggatgtccgcccacaggctctcccaggagctcggcatagactacaaggaggcggaggcctttattgagcgctacttccagagcttccccaaggtgcgggcctggatagaaaggaccctggaggagggccggacgcggggctacgtggagaccctgttcggcaggaggcgctatgtgcccgacctggcctcccgggtccgctcggtgcgggaggcggcgatgcggatggccttcaacatgcccgtgcagggcaccgccgccgacctgatgaagatcgccatggtcaagctcttccccaggctaaagcccctgggggcccacctcctcctccaggtgcacgacgagctggtcctggaggtgcccgaggaccgggccgaggaggccaaggccctggtcaaggaggtcatggagaacacctaccccttggacgtgcccctcgaggtggaggtgggcgtgggtcgggactggctggaggcgaagggggattgaagcggtcgac

SEQ ID NO: 3066 - DNA, 2605 bp, Artificial Sequence
  Description of Artificial Sequence: Synthetic DNA sequence of Thermus Rt41A DNA Polymerase E776T
atgaaatacctgctgccgaccgctgctgctggtctgctgctcctcgctgcccagccggcgatggccatggatatcggaattaattcggatccgaattccccactttttgacctggaggaaccccccaagcgggtgcttctggtggacggccaccacctggcctaccgcaccttctacgccctgagcctcaccacctcccggggggagccggtgcagatggtctacggcttcgcccggagcctcctcaaggccttgaaggaggacgggcaggcggtggtcgtggtctttgacgccaaggccccctccttccgccacgaggcctacgaggcctacaaggcgggccgggcccccaccccggaggacttcccccgccagctcgccttggtcaagcggctggtggaccttctgggcctggtccgcctcgaggccccgggttacgaggcggacgacgtcctgggcaccctggccaagaaggccgaaagggaggggatggaggtgcgcatcctcacgggagaccgggacttcttccagctcctctccgagaaggtctcggtcctcctgccggacgggaccctggtcaccccaaaggacgtccaggagaagtacggggtgccgccggagcgctgggtggacttccgcgccctcacgggggaccgctcggacaacatccccggggtggcggggataggggagaagaccgcccttcgactcctcgcggagtgggggagcgtggagaacctcctgaagaacctggaccgggtgaagccggactcggtccggcgcaagatagaggcgcaccttgaggacctccgcctctccttggacctggcccgcatccgcaccgacctccccttggaggtggactttaaggccctgcgccgcaggacccccgacctggagggcctgagggcctttttggaggagctggagttcggaagcctccttcatgagttcggcctcctgggaggggagaagccccgggaggaggccccctggcccccgcccgaaggggccttcgtaggcttcctcctctcccgcaaggagcccatgtgggcggagcttctggccctggcggccgccgcagagggccgggtccaccgggcaacaagcccggttgaggccctggccgacctcaaggaggcccgggggttcctggccaaggacctggccgttttggccctgcgggagggggtggccctggaccccacggacgaccccctcctggtggcctacctcctggacccggccaacaccaaccccgagggggtggcccggcgctacgggggcgagttcacggaggacgcagcggagagggccctcctctccgagaggctcttccagaacctctttccccggctttccgagaagctcctctggctctaccaggaggtggagcggcccctctcccgggtcttggcccacatggaggcccggggggtgaggctggacgtcccccttctggaggccctctcctttgagctggagaaggagatggagcgcctggagggggaggtcttccgcttggccggccaccccttcaacctcaactcccgcgaccagctggaaagggtcctctttgacgagctgggccttaccccggtgggtcggacggagaagacgggcaagcgctccaccgcccagggggccctggaggccctccggggggcccaccccatcgtggagctcatcctccagtaccgggagctttccaagctcaaaagcacctacctggaccccctgccccggctcgtccacccgcggacgggccggcttcacacccgcttcaaccagacggccacggccacgggaaggctttccagctccgaccccaacctgcagaacatccccgtgcgcacccccttggggcagcgcatccgcaaggccttcgtggccgaggaggggtggctccttttggcggcggactactcccagatcgagcttcgggtcctggcccacctctcgggggacgagaacctgaagcgggtcttccgggaggggaaggacatccataccgaaaccgccgcctggatgttcggcttagaccccgctctagtggatccaaagatgcgccgggcggccaagacggtcaacttcggcgtcctctacgggatgtccgcccacaggctctcccaggagctcggcatagactacaaggaggcggaggcctttattgagcgctacttccagagcttccccaaggtgcgggcctggatagaaaggaccctggaggagggccggacgcggggctacgtggagaccctgttcggcaggaggcgctatgtgcccgacctggcctcccgggtccgctcggtgcgggaggcggcgactcggatggccttcaacatgcccgtgcagggcaccgccgccgacctgatgaagatcgccatggtcaagctcttccccaggctaaagcccctgggggcccacctcctcctccaggtgcacgacgagctggtcctggaggtgcccgaggaccgggccgaggaggccaaggccctggtcaaggaggtcatggagaacacctaccccttggacgtgcccctcgaggtggaggtgggcgtgggtcgggactggctggaggcgaagggggattgaagcggtcgac

SEQ ID NO: 3067 - DNA, 2605 bp, Artificial Sequence
  Description of Artificial Sequence: Synthetic DNA sequence of Thermus Rt41A DNA Polymerase E776N
atgaaatacctgctgccgaccgctgctgctggtctgctgctcctcgctgcccagccggcgatggccatggatatcggaattaattcggatccgaattccccactttttgacctggaggaaccccccaagcgggtgcttctggtggacggccaccacctggcctaccgcaccttctacgccctgagcctcaccacctcccggggggagccggtgcagatggtctacggcttcgcccggagcctcctcaaggccttgaaggaggacgggcaggcggtggtcgtggtctttgacgccaaggccccctccttccgccacgaggcctacgaggcctacaaggcgggccgggcccccaccccggaggacttcccccgccagctcgccttggtcaagcggctggtggaccttctgggcctggtccgcctcgaggccccgggttacgaggcggacgacgtcctgggcaccctggccaagaaggccgaaagggaggggatggaggtgcgcatcctcacgggagaccgggacttcttccagctcctctccgagaaggtctcggtcctcctgccggacgggaccctggtcaccccaaaggacgtccaggagaagtacggggtgccgccggagcgctgggtggacttccgcgccctcacgggggaccgctcggacaacatccccggggtggcggggataggggagaagaccgcccttcgactcctcgcggagtgggggagcgtggagaacctcctgaagaacctggaccgggtgaagccggactcggtccggcgcaagatagaggcgcaccttgaggacctccgcctctccttggacctggcccgcatccgcaccgacctccccttggaggtggactttaaggccctgcgccgcaggacccccgacctggagggcctgagggcctttttggaggagctggagttcggaagcctccttcatgagttcggcctcctgggaggggagaagccccgggaggaggccccctggcccccgcccgaaggggccttcgtaggcttcctcctctcccgcaaggagcccatgtgggcggagcttctggccctggcggccgccgcagagggccgggtccaccgggcaacaagcccggttgaggccctggccgacctcaaggaggcccgggggttcctggccaaggacctggccgttttggccctgcgggagggggtggccctggaccccacggacgaccccctcctggtggcctacctcctggacccggccaacaccaaccccgagggggtggcccggcgctacgggggcgagttcacggaggacgcagcggagagggccctcctctccgagaggctcttccagaacctctttccccggctttccgagaagctcctctggctctaccaggaggtggagcggcccctctcccgggtcttggcccacatggaggcccggggggtgaggctggacgtcccccttctggaggccctctcctttgagctggagaaggagatggagcgcctggagggggaggtcttccgcttggccggccaccccttcaacctcaactcccgcgaccagctggaaagggtcctctttgacgagctgggccttaccccggtgggtcggacggagaagacgggcaagcgctccaccgcccagggggccctggaggccctccggggggcccaccccatcgtggagctcatcctccagtaccgggagctttccaagctcaaaagcacctacctggaccccctgccccggctcgtccacccgcggacgggccggcttcacacccgcttcaaccagacggccacggccacgggaaggctttccagctccgaccccaacctgcagaacatccccgtgcgcacccccttggggcagcgcatccgcaaggccttcgtggccgaggaggggtggctccttttggcggcggactactcccagatcgagcttcgggtcctggcccacctctcgggggacgagaacctgaagcgggtcttccgggaggggaaggacatccataccgaaaccgccgcctggatgttcggcttagaccccgctctagtggatccaaagatgcgccgggcggccaagacggtcaacttcggcgtcctctacgggatgtccgcccacaggctctcccaggagctcggcatagactacaaggaggcggaggcctttattgagcgctacttccagagcttccccaaggtgcgggcctggatagaaaggaccctggaggagggccggacgcggggctacgtggagaccctgttcggcaggaggcgctatgtgcccgacctggcctcccgggtccgctcggtgcgggaggcggcgaatcggatggccttcaacatgcccgtgcagggcaccgccgccgacctgatgaagatcgccatggtcaagctcttccccaggctaaagcccctgggggcccacctcctcctccaggtgcacgacgagctggtcctggaggtgcccgaggaccgggccgaggaggccaaggccctggtcaaggaggtcatggagaacacctaccccttggacgtgcccctcgaggtggaggtgggcgtgggtcgggactggctggaggcgaagggggattgaagcggtcgac

SEQ ID NO: 3068 - DNA, 2605 bp, Artificial Sequence
  Description of Artificial Sequence: Synthetic DNA sequence of Thermus Rt41A DNA Polymerase E776V
atgaaatacctgctgccgaccgctgctgctggtctgctgctcctcgctgcccagccggcgatggccatggatatcggaattaattcggatccgaattccccactttttgacctggaggaaccccccaagcgggtgcttctggtggacggccaccacctggcctaccgcaccttctacgccctgagcctcaccacctcccggggggagccggtgcagatggtctacggcttcgcccggagcctcctcaaggccttgaaggaggacgggcaggcggtggtcgtggtctttgacgccaaggccccctccttccgccacgaggcctacgaggcctacaaggcgggccgggcccccaccccggaggacttcccccgccagctcgccttggtcaagcggctggtggaccttctgggcctggtccgcctcgaggccccgggttacgaggcggacgacgtcctgggcaccctggccaagaaggccgaaagggaggggatggaggtgcgcatcctcacgggagaccgggacttcttccagctcctctccgagaaggtctcggtcctcctgccggacgggaccctggtcaccccaaaggacgtccaggagaagtacggggtgccgccggagcgctgggtggacttccgcgccctcacgggggaccgctcggacaacatccccggggtggcggggataggggagaagaccgcccttcgactcctcgcggagtgggggagcgtggagaacctcctgaagaacctggaccgggtgaagccggactcggtccggcgcaagatagaggcgcaccttgaggacctccgcctctccttggacctggcccgcatccgcaccgacctccccttggaggtggactttaaggccctgcgccgcaggacccccgacctggagggcctgagggcctttttggaggagctggagttcggaagcctccttcatgagttcggcctcctgggaggggagaagccccgggaggaggccccctggcccccgcccgaaggggccttcgtaggcttcctcctctcccgcaaggagcccatgtgggcggagcttctggccctggcggccgccgcagagggccgggtccaccgggcaacaagcccggttgaggccctggccgacctcaaggaggcccgggggttcctggccaaggacctggccgttttggccctgcgggagggggtggccctggaccccacggacgaccccctcctggtggcctacctcctggacccggccaacaccaaccccgagggggtggcccggcgctacgggggcgagttcacggaggacgcagcggagagggccctcctctccgagaggctcttccagaacctctttccccggctttccgagaagctcctctggctctaccaggaggtggagcggcccctctcccgggtcttggcccacatggaggcccggggggtgaggctggacgtcccccttctggaggccctctcctttgagctggagaaggagatggagcgcctggagggggaggtcttccgcttggccggccaccccttcaacctcaactcccgcgaccagctggaaagggtcctctttgacgagctgggccttaccccggtgggtcggacggagaagacgggcaagcgctccaccgcccagggggccctggaggccctccggggggcccaccccatcgtggagctcatcctccagtaccgggagctttccaagctcaaaagcacctacctggaccccctgccccggctcgtccacccgcggacgggccggcttcacacccgcttcaaccagacggccacggccacgggaaggctttccagctccgaccccaacctgcagaacatccccgtgcgcacccccttggggcagcgcatccgcaaggccttcgtggccgaggaggggtggctccttttggcggcggactactcccagatcgagcttcgggtcctggcccacctctcgggggacgagaacctgaagcgggtcttccgggaggggaaggacatccataccgaaaccgccgcctggatgttcggcttagaccccgctctagtggatccaaagatgcgccgggcggccaagacggtcaacttcggcgtcctctacgggatgtccgcccacaggctctcccaggagctcggcatagactacaaggaggcggaggcctttattgagcgctacttccagagcttccccaaggtgcgggcctggatagaaaggaccctggaggagggccggacgcggggctacgtggagaccctgttcggcaggaggcgctatgtgcccgacctggcctcccgggtccgctcggtgcgggaggcggcggtccggatggccttcaacatgcccgtgcagggcaccgccgccgacctgatgaagatcgccatggtcaagctcttccccaggctaaagcccctgggggcccacctcctcctccaggtgcacgacgagctggtcctggaggtgcccgaggaccgggccgaggaggccaaggccctggtcaaggaggtcatggagaacacctaccccttggacgtgcccctcgaggtggaggtgggcgtgggtcgggactggctggaggcgaagggggattgaagcggtcgac

SEQ ID NO: 3069 - DNA, 2605 bp, Artificial Sequence
  Description of Artificial Sequence: Synthetic DNA sequence of Thermus Rt41A DNA Polymerase R777A
atgaaatacctgctgccgaccgctgctgctggtctgctgctcctcgctgcccagccggcgatggccatggatatcggaattaattcggatccgaattccccactttttgacctggaggaaccccccaagcgggtgcttctggtggacggccaccacctggcctaccgcaccttctacgccctgagcctcaccacctcccggggggagccggtgcagatggtctacggcttcgcccggagcctcctcaaggccttgaaggaggacgggcaggcggtggtcgtggtctttgacgccaaggccccctccttccgccacgaggcctacgaggcctacaaggcgggccgggcccccaccccggaggacttcccccgccagctcgccttggtcaagcggctggtggaccttctgggcctggtccgcctcgaggccccgggttacgaggcggacgacgtcctgggcaccctggccaagaaggccgaaagggaggggatggaggtgcgcatcctcacgggagaccgggacttcttccagctcctctccgagaaggtctcggtcctcctgccggacgggaccctggtcaccccaaaggacgtccaggagaagtacggggtgccgccggagcgctgggtggacttccgcgccctcacgggggaccgctcggacaacatccccggggtggcggggataggggagaagaccgcccttcgactcctcgcggagtgggggagcgtggagaacctcctgaagaacctggaccgggtgaagccggactcggtccggcgcaagatagaggcgcaccttgaggacctccgcctctccttggacctggcccgcatccgcaccgacctccccttggaggtggactttaaggccctgcgccgcaggacccccgacctggagggcctgagggcctttttggaggagctggagttcggaagcctccttcatgagttcggcctcctgggaggggagaagccccgggaggaggccccctggcccccgcccgaaggggccttcgtaggcttcctcctctcccgcaaggagcccatgtgggcggagcttctggccctggcggccgccgcagagggccgggtccaccgggcaacaagcccggttgaggccctggccgacctcaaggaggcccgggggttcctggccaaggacctggccgttttggccctgcgggagggggtggccctggaccccacggacgaccccctcctggtggcctacctcctggacccggccaacaccaaccccgagggggtggcccggcgctacgggggcgagttcacggaggacgcagcggagagggccctcctctccgagaggctcttccagaacctctttccccggctttccgagaagctcctctggctctaccaggaggtggagcggcccctctcccgggtcttggcccacatggaggcccggggggtgaggctggacgtcccccttctggaggccctctcctttgagctggagaaggagatggagcgcctggagggggaggtcttccgcttggccggccaccccttcaacctcaactcccgcgaccagctggaaagggtcctctttgacgagctgggccttaccccggtgggtcggacggagaagacgggcaagcgctccaccgcccagggggccctggaggccctccggggggcccaccccatcgtggagctcatcctccagtaccgggagctttccaagctcaaaagcacctacctggaccccctgccccggctcgtccacccgcggacgggccggcttcacacccgcttcaaccagacggccacggccacgggaaggctttccagctccgaccccaacctgcagaacatccccgtgcgcacccccttggggcagcgcatccgcaaggccttcgtggccgaggaggggtggctccttttggcggcggactactcccagatcgagcttcgggtcctggcccacctctcgggggacgagaacctgaagcgggtcttccgggaggggaaggacatccataccgaaaccgccgcctggatgttcggcttagaccccgctctagtggatccaaagatgcgccgggcggccaagacggtcaacttcggcgtcctctacgggatgtccgcccacaggctctcccaggagctcggcatagactacaaggaggcggaggcctttattgagcgctacttccagagcttccccaaggtgcgggcctggatagaaaggaccctggaggagggccggacgcggggctacgtggagaccctgttcggcaggaggcgctatgtgcccgacctggcctcccgggtccgctcggtgcgggaggcggcggaggctatggccttcaacatgcccgtgcagggcaccgccgccgacctgatgaagatcgccatggtcaagctcttccccaggctaaagcccctgggggcccacctcctcctccaggtgcacgacgagctggtcctggaggtgcccgaggaccgggccgaggaggccaaggccctggtcaaggaggtcatggagaacacctaccccttggacgtgcccctcgaggtggaggtgggcgtgggtcgggactggctggaggcgaagggggattgaagcggtcgac

SEQ ID NO: 3070 - DNA, 2605 bp, Artificial Sequence
  Description of Artificial Sequence: Synthetic DNA sequence of Thermus Rt41A DNA Polymerase R777C
atgaaatacctgctgccgaccgctgctgctggtctgctgctcctcgctgcccagccggcgatggccatggatatcggaattaattcggatccgaattccccactttttgacctggaggaaccccccaagcgggtgcttctggtggacggccaccacctggcctaccgcaccttctacgccctgagcctcaccacctcccggggggagccggtgcagatggtctacggcttcgcccggagcctcctcaaggccttgaaggaggacgggcaggcggtggtcgtggtctttgacgccaaggccccctccttccgccacgaggcctacgaggcctacaaggcgggccgggcccccaccccggaggacttcccccgccagctcgccttggtcaagcggctggtggaccttctgggcctggtccgcctcgaggccccgggttacgaggcggacgacgtcctgggcaccctggccaagaaggccgaaagggaggggatggaggtgcgcatcctcacgggagaccgggacttcttccagctcctctccgagaaggtctcggtcctcctgccggacgggaccctggtcaccccaaaggacgtccaggagaagtacggggtgccgccggagcgctgggtggacttccgcgccctcacgggggaccgctcggacaacatccccggggtggcggggataggggagaagaccgcccttcgactcctcgcggagtgggggagcgtggagaacctcctgaagaacctggaccgggtgaagccggactcggtccggcgcaagatagaggcgcaccttgaggacctccgcctctccttggacctggcccgcatccgcaccgacctccccttggaggtggactttaaggccctgcgccgcaggacccccgacctggagggcctgagggcctttttggaggagctggagttcggaagcctccttcatgagttcggcctcctgggaggggagaagccccgggaggaggccccctggcccccgcccgaaggggccttcgtaggcttcctcctctcccgcaaggagcccatgtgggcggagcttctggccctggcggccgccgcagagggccgggtccaccgggcaacaagcccggttgaggccctggccgacctcaaggaggcccgggggttcctggccaaggacctggccgttttggccctgcgggagggggtggccctggaccccacggacgaccccctcctggtggcctacctcctggacccggccaacaccaaccccgagggggtggcccggcgctacgggggcgagttcacggaggacgcagcggagagggccctcctctccgagaggctcttccagaacctctttccccggctttccgagaagctcctctggctctaccaggaggtggagcggcccctctcccgggtcttggcccacatggaggcccggggggtgaggctggacgtcccccttctggaggccctctcctttgagctggagaaggagatggagcgcctggagggggaggtcttccgcttggccggccaccccttcaacctcaactcccgcgaccagctggaaagggtcctctttgacgagctgggccttaccccggtgggtcggacggagaagacgggcaagcgctccaccgcccagggggccctggaggccctccggggggcccaccccatcgtggagctcatcctccagtaccgggagctttccaagctcaaaagcacctacctggaccccctgccccggctcgtccacccgcggacgggccggcttcacacccgcttcaaccagacggccacggccacgggaaggctttccagctccgaccccaacctgcagaacatccccgtgcgcacccccttggggcagcgcatccgcaaggccttcgtggccgaggaggggtggctccttttggcggcggactactcccagatcgagcttcgggtcctggcccacctctcgggggacgagaacctgaagcgggtcttccgggaggggaaggacatccataccgaaaccgccgcctggatgttcggcttagaccccgctctagtggatccaaagatgcgccgggcggccaagacggtcaacttcggcgtcctctacgggatgtccgcccacaggctctcccaggagctcggcatagactacaaggaggcggaggcctttattgagcgctacttccagagcttccccaaggtgcgggcctggatagaaaggaccctggaggagggccggacgcggggctacgtggagaccctgttcggcaggaggcgctatgtgcccgacctggcctcccgggtccgctcggtgcgggaggcggcggagtgtatggccttcaacatgcccgtgcagggcaccgccgccgacctgatgaagatcgccatggtcaagctcttccccaggctaaagcccctgggggcccacctcctcctccaggtgcacgacgagctggtcctggaggtgcccgaggaccgggccgaggaggccaaggccctggtcaaggaggtcatggagaacacctaccccttggacgtgcccctcgaggtggaggtgggcgtgggtcgggactggctggaggcgaagggggattgaagcggtcgac

SEQ ID NO: 3071 - DNA, 2605 bp, Artificial Sequence
  Description of Artificial Sequence: Synthetic DNA sequence of Thermus Rt41A DNA Polymerase R777G
atgaaatacctgctgccgaccgctgctgctggtctgctgctcctcgctgcccagccggcgatggccatggatatcggaattaattcggatccgaattccccactttttgacctggaggaaccccccaagcgggtgcttctggtggacggccaccacctggcctaccgcaccttctacgccctgagcctcaccacctcccggggggagccggtgcagatggtctacggcttcgcccggagcctcctcaaggccttgaaggaggacgggcaggcggtggtcgtggtctttgacgccaaggccccctccttccgccacgaggcctacgaggcctacaaggcgggccgggcccccaccccggaggacttcccccgccagctcgccttggtcaagcggctggtggaccttctgggcctggtccgcctcgaggccccgggttacgaggcggacgacgtcctgggcaccctggccaagaaggccgaaagggaggggatggaggtgcgcatcctcacgggagaccgggacttcttccagctcctctccgagaaggtctcggtcctcctgccggacgggaccctggtcaccccaaaggacgtccaggagaagtacggggtgccgccggagcgctgggtggacttccgcgccctcacgggggaccgctcggacaacatccccggggtggcggggataggggagaagaccgcccttcgactcctcgcggagtgggggagcgtggagaacctcctgaagaacctggaccgggtgaagccggactcggtccggcgcaagatagaggcgcaccttgaggacctccgcctctccttggacctggcccgcatccgcaccgacctccccttggaggtggactttaaggccctgcgccgcaggacccccgacctggagggcctgagggcctttttggaggagctggagttcggaagcctccttcatgagttcggcctcctgggaggggagaagccccgggaggaggccccctggcccccgcccgaaggggccttcgtaggcttcctcctctcccgcaaggagcccatgtgggcggagcttctggccctggcggccgccgcagagggccgggtccaccgggcaacaagcccggttgaggccctggccgacctcaaggaggcccgggggttcctggccaaggacctggccgttttggccctgcgggagggggtggccctggaccccacggacgaccccctcctggtggcctacctcctggacccggccaacaccaaccccgagggggtggcccggcgctacgggggcgagttcacggaggacgcagcggagagggccctcctctccgagaggctcttccagaacctctttccccggctttccgagaagctcctctggctctaccaggaggtggagcggcccctctcccgggtcttggcccacatggaggcccggggggtgaggctggacgtcccccttctggaggccctctcctttgagctggagaaggagatggagcgcctggagggggaggtcttccgcttggccggccaccccttcaacctcaactcccgcgaccagctggaaagggtcctctttgacgagctgggccttaccccggtgggtcggacggagaagacgggcaagcgctccaccgcccagggggccctggaggccctccggggggcccaccccatcgtggagctcatcctccagtaccgggagctttccaagctcaaaagcacctacctggaccccctgccccggctcgtccacccgcggacgggccggcttcacacccgcttcaaccagacggccacggccacgggaaggctttccagctccgaccccaacctgcagaacatccccgtgcgcacccccttggggcagcgcatccgcaaggccttcgtggccgaggaggggtggctccttttggcggcggactactcccagatcgagcttcgggtcctggcccacctctcgggggacgagaacctgaagcgggtcttccgggaggggaaggacatccataccgaaaccgccgcctggatgttcggcttagaccccgctctagtggatccaaagatgcgccgggcggccaagacggtcaacttcggcgtcctctacgggatgtccgcccacaggctctcccaggagctcggcatagactacaaggaggcggaggcctttattgagcgctacttccagagcttccccaaggtgcgggcctggatagaaaggaccctggaggagggccggacgcggggctacgtggagaccctgttcggcaggaggcgctatgtgcccgacctggcctcccgggtccgctcggtgcgggaggcggcggagggtatggccttcaacatgcccgtgcagggcaccgccgccgacctgatgaagatcgccatggtcaagctcttccccaggctaaagcccctgggggcccacctcctcctccaggtgcacgacgagctggtcctggaggtgcccgaggaccgggccgaggaggccaaggccctggtcaaggaggtcatggagaacacctaccccttggacgtgcccctcgaggtggaggtgggcgtgggtcgggactggctggaggcgaagggggattgaagcggtcgac

SEQ ID NO: 3072 - DNA, 2605 bp, Artificial Sequence
  Description of Artificial Sequence: Synthetic DNA sequence of Thermus Rt41A DNA Polymerase R777Q
atgaaatacctgctgccgaccgctgctgctggtctgctgctcctcgctgcccagccggcgatggccatggatatcggaattaattcggatccgaattccccactttttgacctggaggaaccccccaagcgggtgcttctggtggacggccaccacctggcctaccgcaccttctacgccctgagcctcaccacctcccggggggagccggtgcagatggtctacggcttcgcccggagcctcctcaaggccttgaaggaggacgggcaggcggtggtcgtggtctttgacgccaaggccccctccttccgccacgaggcctacgaggcctacaaggcgggccgggcccccaccccggaggacttcccccgccagctcgccttggtcaagcggctggtggaccttctgggcctggtccgcctcgaggccccgggttacgaggcggacgacgtcctgggcaccctggccaagaaggccgaaagggaggggatggaggtgcgcatcctcacgggagaccgggacttcttccagctcctctccgagaaggtctcggtcctcctgccggacgggaccctggtcaccccaaaggacgtccaggagaagtacggggtgccgccggagcgctgggtggacttccgcgccctcacgggggaccgctcggacaacatccccggggtggcggggataggggagaagaccgcccttcgactcctcgcggagtgggggagcgtggagaacctcctgaagaacctggaccgggtgaagccggactcggtccggcgcaagatagaggcgcaccttgaggacctccgcctctccttggacctggcccgcatccgcaccgacctccccttggaggtggactttaaggccctgcgccgcaggacccccgacctggagggcctgagggcctttttggaggagctggagttcggaagcctccttcatgagttcggcctcctgggaggggagaagccccgggaggaggccccctggcccccgcccgaaggggccttcgtaggcttcctcctctcccgcaaggagcccatgtgggcggagcttctggccctggcggccgccgcagagggccgggtccaccgggcaacaagcccggttgaggccctggccgacctcaaggaggcccgggggttcctggccaaggacctggccgttttggccctgcgggagggggtggccctggaccccacggacgaccccctcctggtggcctacctcctggacccggccaacaccaaccccgagggggtggcccggcgctacgggggcgagttcacggaggacgcagcggagagggccctcctctccgagaggctcttccagaacctctttccccggctttccgagaagctcctctggctctaccaggaggtggagcggcccctctcccgggtcttggcccacatggaggcccggggggtgaggctggacgtcccccttctggaggccctctcctttgagctggagaaggagatggagcgcctggagggggaggtcttccgcttggccggccaccccttcaacctcaactcccgcgaccagctggaaagggtcctctttgacgagctgggccttaccccggtgggtcggacggagaagacgggcaagcgctccaccgcccagggggccctggaggccctccggggggcccaccccatcgtggagctcatcctccagtaccgggagctttccaagctcaaaagcacctacctggaccccctgccccggctcgtccacccgcggacgggccggcttcacacccgcttcaaccagacggccacggccacgggaaggctttccagctccgaccccaacctgcagaacatccccgtgcgcacccccttggggcagcgcatccgcaaggccttcgtggccgaggaggggtggctccttttggcggcggactactcccagatcgagcttcgggtcctggcccacctctcgggggacgagaacctgaagcgggtcttccgggaggggaaggacatccataccgaaaccgccgcctggatgttcggcttagaccccgctctagtggatccaaagatgcgccgggcggccaagacggtcaacttcggcgtcctctacgggatgtccgcccacaggctctcccaggagctcggcatagactacaaggaggcggaggcctttattgagcgctacttccagagcttccccaaggtgcgggcctggatagaaaggaccctggaggagggccggacgcggggctacgtggagaccctgttcggcaggaggcgctatgtgcccgacctggcctcccgggtccgctcggtgcgggaggcggcggagcaaatggccttcaacatgcccgtgcagggcaccgccgccgacctgatgaagatcgccatggtcaagctcttccccaggctaaagcccctgggggcccacctcctcctccaggtgcacgacgagctggtcctggaggtgcccgaggaccgggccgaggaggccaaggccctggtcaaggaggtcatggagaacacctaccccttggacgtgcccctcgaggtggaggtgggcgtgggtcgggactggctggaggcgaagggggattgaagcggtcgac

SEQ ID NO: 3073 - DNA, 2605 bp, Artificial Sequence
  Description of Artificial Sequence: Synthetic DNA sequence of Thermus Rt41A DNA Polymerase R777H
atgaaatacctgctgccgaccgctgctgctggtctgctgctcctcgctgcccagccggcgatggccatggatatcggaattaattcggatccgaattccccactttttgacctggaggaaccccccaagcgggtgcttctggtggacggccaccacctggcctaccgcaccttctacgccctgagcctcaccacctcccggggggagccggtgcagatggtctacggcttcgcccggagcctcctcaaggccttgaaggaggacgggcaggcggtggtcgtggtctttgacgccaaggccccctccttccgccacgaggcctacgaggcctacaaggcgggccgggcccccaccccggaggacttcccccgccagctcgccttggtcaagcggctggtggaccttctgggcctggtccgcctcgaggccccgggttacgaggcggacgacgtcctgggcaccctggccaagaaggccgaaagggaggggatggaggtgcgcatcctcacgggagaccgggacttcttccagctcctctccgagaaggtctcggtcctcctgccggacgggaccctggtcaccccaaaggacgtccaggagaagtacggggtgccgccggagcgctgggtggacttccgcgccctcacgggggaccgctcggacaacatccccggggtggcggggataggggagaagaccgcccttcgactcctcgcggagtgggggagcgtggagaacctcctgaagaacctggaccgggtgaagccggactcggtccggcgcaagatagaggcgcaccttgaggacctccgcctctccttggacctggcccgcatccgcaccgacctccccttggaggtggactttaaggccctgcgccgcaggacccccgacctggagggcctgagggcctttttggaggagctggagttcggaagcctccttcatgagttcggcctcctgggaggggagaagccccgggaggaggccccctggcccccgcccgaaggggccttcgtaggcttcctcctctcccgcaaggagcccatgtgggcggagcttctggccctggcggccgccgcagagggccgggtccaccgggcaacaagcccggttgaggccctggccgacctcaaggaggcccgggggttcctggccaaggacctggccgttttggccctgcgggagggggtggccctggaccccacggacgaccccctcctggtggcctacctcctggacccggccaacaccaaccccgagggggtggcccggcgctacgggggcgagttcacggaggacgcagcggagagggccctcctctccgagaggctcttccagaacctctttccccggctttccgagaagctcctctggctctaccaggaggtggagcggcccctctcccgggtcttggcccacatggaggcccggggggtgaggctggacgtcccccttctggaggccctctcctttgagctggagaaggagatggagcgcctggagggggaggtcttccgcttggccggccaccccttcaacctcaactcccgcgaccagctggaaagggtcctctttgacgagctgggccttaccccggtgggtcggacggagaagacgggcaagcgctccaccgcccagggggccctggaggccctccggggggcccaccccatcgtggagctcatcctccagtaccgggagctttccaagctcaaaagcacctacctggaccccctgccccggctcgtccacccgcggacgggccggcttcacacccgcttcaaccagacggccacggccacgggaaggctttccagctccgaccccaacctgcagaacatccccgtgcgcacccccttggggcagcgcatccgcaaggccttcgtggccgaggaggggtggctccttttggcggcggactactcccagatcgagcttcgggtcctggcccacctctcgggggacgagaacctgaagcgggtcttccgggaggggaaggacatccataccgaaaccgccgcctggatgttcggcttagaccccgctctagtggatccaaagatgcgccgggcggccaagacggtcaacttcggcgtcctctacgggatgtccgcccacaggctctcccaggagctcggcatagactacaaggaggcggaggcctttattgagcgctacttccagagcttccccaaggtgcgggcctggatagaaaggaccctggaggagggccggacgcggggctacgtggagaccctgttcggcaggaggcgctatgtgcccgacctggcctcccgggtccgctcggtgcgggaggcggcggagcatatggccttcaacatgcccgtgcagggcaccgccgccgacctgatgaagatcgccatggtcaagctcttccccaggctaaagcccctgggggcccacctcctcctccaggtgcacgacgagctggtcctggaggtgcccgaggaccgggccgaggaggccaaggccctggtcaaggaggtcatggagaacacctaccccttggacgtgcccctcgaggtggaggtgggcgtgggtcgggactggctggaggcgaagggggattgaagcggtcgac

SEQ ID NO: 3074 - DNA, 2605 bp, Artificial Sequence
  Description of Artificial Sequence: Synthetic DNA sequence of Thermus Rt41A DNA Polymerase R777I
atgaaatacctgctgccgaccgctgctgctggtctgctgctcctcgctgcccagccggcgatggccatggatatcggaattaattcggatccgaattccccactttttgacctggaggaaccccccaagcgggtgcttctggtggacggccaccacctggcctaccgcaccttctacgccctgagcctcaccacctcccggggggagccggtgcagatggtctacggcttcgcccggagcctcctcaaggccttgaaggaggacgggcaggcggtggtcgtggtctttgacgccaaggccccctccttccgccacgaggcctacgaggcctacaaggcgggccgggcccccaccccggaggacttcccccgccagctcgccttggtcaagcggctggtggaccttctgggcctggtccgcctcgaggccccgggttacgaggcggacgacgtcctgggcaccctggccaagaaggccgaaagggaggggatggaggtgcgcatcctcacgggagaccgggacttcttccagctcctctccgagaaggtctcggtcctcctgccggacgggaccctggtcaccccaaaggacgtccaggagaagtacggggtgccgccggagcgctgggtggacttccgcgccctcacgggggaccgctcggacaacatccccggggtggcggggataggggagaagaccgcccttcgactcctcgcggagtgggggagcgtggagaacctcctgaagaacctggaccgggtgaagccggactcggtccggcgcaagatagaggcgcaccttgaggacctccgcctctccttggacctggcccgcatccgcaccgacctccccttggaggtggactttaaggccctgcgccgcaggacccccgacctggagggcctgagggcctttttggaggagctggagttcggaagcctccttcatgagttcggcctcctgggaggggagaagccccgggaggaggccccctggcccccgcccgaaggggccttcgtaggcttcctcctctcccgcaaggagcccatgtgggcggagcttctggccctggcggccgccgcagagggccgggtccaccgggcaacaagcccggttgaggccctggccgacctcaaggaggcccgggggttcctggccaaggacctggccgttttggccctgcgggagggggtggccctggaccccacggacgaccccctcctggtggcctacctcctggacccggccaacaccaaccccgagggggtggcccggcgctacgggggcgagttcacggaggacgcagcggagagggccctcctctccgagaggctcttccagaacctctttccccggctttccgagaagctcctctggctctaccaggaggtggagcggcccctctcccgggtcttggcccacatggaggcccggggggtgaggctggacgtcccccttctggaggccctctcctttgagctggagaaggagatggagcgcctggagggggaggtcttccgcttggccggccaccccttcaacctcaactcccgcgaccagctggaaagggtcctctttgacgagctgggccttaccccggtgggtcggacggagaagacgggcaagcgctccaccgcccagggggccctggaggccctccggggggcccaccccatcgtggagctcatcctccagtaccgggagctttccaagctcaaaagcacctacctggaccccctgccccggctcgtccacccgcggacgggccggcttcacacccgcttcaaccagacggccacggccacgggaaggctttccagctccgaccccaacctgcagaacatccccgtgcgcacccccttggggcagcgcatccgcaaggccttcgtggccgaggaggggtggctccttttggcggcggactactcccagatcgagcttcgggtcctggcccacctctcgggggacgagaacctgaagcgggtcttccgggaggggaaggacatccataccgaaaccgccgcctggatgttcggcttagaccccgctctagtggatccaaagatgcgccgggcggccaagacggtcaacttcggcgtcctctacgggatgtccgcccacaggctctcccaggagctcggcatagactacaaggaggcggaggcctttattgagcgctacttccagagcttccccaaggtgcgggcctggatagaaaggaccctggaggagggccggacgcggggctacgtggagaccctgttcggcaggaggcgctatgtgcccgacctggcctcccgggtccgctcggtgcgggaggcggcggagattatggccttcaacatgcccgtgcagggcaccgccgccgacctgatgaagatcgccatggtcaagctcttccccaggctaaagcccctgggggcccacctcctcctccaggtgcacgacgagctggtcctggaggtgcccgaggaccgggccgaggaggccaaggccctggtcaaggaggtcatggagaacacctaccccttggacgtgcccctcgaggtggaggtgggcgtgggtcgggactggctggaggcgaagggggattgaagcggtcgac

SEQ ID NO: 3075 - DNA, 2605 bp, Artificial Sequence
  Description of Artificial Sequence: Synthetic DNA sequence of Thermus Rt41A DNA Polymerase R777L
atgaaatacctgctgccgaccgctgctgctggtctgctgctcctcgctgcccagccggcgatggccatggatatcggaattaattcggatccgaattccccactttttgacctggaggaaccccccaagcgggtgcttctggtggacggccaccacctggcctaccgcaccttctacgccctgagcctcaccacctcccggggggagccggtgcagatggtctacggcttcgcccggagcctcctcaaggccttgaaggaggacgggcaggcggtggtcgtggtctttgacgccaaggccccctccttccgccacgaggcctacgaggcctacaaggcgggccgggcccccaccccggaggacttcccccgccagctcgccttggtcaagcggctggtggaccttctgggcctggtccgcctcgaggccccgggttacgaggcggacgacgtcctgggcaccctggccaagaaggccgaaagggaggggatggaggtgcgcatcctcacgggagaccgggacttcttccagctcctctccgagaaggtctcggtcctcctgccggacgggaccctggtcaccccaaaggacgtccaggagaagtacggggtgccgccggagcgctgggtggacttccgcgccctcacgggggaccgctcggacaacatccccggggtggcggggataggggagaagaccgcccttcgactcctcgcggagtgggggagcgtggagaacctcctgaagaacctggaccgggtgaagccggactcggtccggcgcaagatagaggcgcaccttgaggacctccgcctctccttggacctggcccgcatccgcaccgacctccccttggaggtggactttaaggccctgcgccgcaggacccccgacctggagggcctgagggcctttttggaggagctggagttcggaagcctccttcatgagttcggcctcctgggaggggagaagccccgggaggaggccccctggcccccgcccgaaggggccttcgtaggcttcctcctctcccgcaaggagcccatgtgggcggagcttctggccctggcggccgccgcagagggccgggtccaccgggcaacaagcccggttgaggccctggccgacctcaaggaggcccgggggttcctggccaaggacctggccgttttggccctgcgggagggggtggccctggaccccacggacgaccccctcctggtggcctacctcctggacccggccaacaccaaccccgagggggtggcccggcgctacgggggcgagttcacggaggacgcagcggagagggccctcctctccgagaggctcttccagaacctctttccccggctttccgagaagctcctctggctctaccaggaggtggagcggcccctctcccgggtcttggcccacatggaggcccggggggtgaggctggacgtcccccttctggaggccctctcctttgagctggagaaggagatggagcgcctggagggggaggtcttccgcttggccggccaccccttcaacctcaactcccgcgaccagctggaaagggtcctctttgacgagctgggccttaccccggtgggtcggacggagaagacgggcaagcgctccaccgcccagggggccctggaggccctccggggggcccaccccatcgtggagctcatcctccagtaccgggagctttccaagctcaaaagcacctacctggaccccctgccccggctcgtccacccgcggacgggccggcttcacacccgcttcaaccagacggccacggccacgggaaggctttccagctccgaccccaacctgcagaacatccccgtgcgcacccccttggggcagcgcatccgcaaggccttcgtggccgaggaggggtggctccttttggcggcggactactcccagatcgagcttcgggtcctggcccacctctcgggggacgagaacctgaagcgggtcttccgggaggggaaggacatccataccgaaaccgccgcctggatgttcggcttagaccccgctctagtggatccaaagatgcgccgggcggccaagacggtcaacttcggcgtcctctacgggatgtccgcccacaggctctcccaggagctcggcatagactacaaggaggcggaggcctttattgagcgctacttccagagcttccccaaggtgcgggcctggatagaaaggaccctggaggagggccggacgcggggctacgtggagaccctgttcggcaggaggcgctatgtgcccgacctggcctcccgggtccgctcggtgcgggaggcggcggagttaatggccttcaacatgcccgtgcagggcaccgccgccgacctgatgaagatcgccatggtcaagctcttccccaggctaaagcccctgggggcccacctcctcctccaggtgcacgacgagctggtcctggaggtgcccgaggaccgggccgaggaggccaaggccctggtcaaggaggtcatggagaacacctaccccttggacgtgcccctcgaggtggaggtgggcgtgggtcgggactggctggaggcgaagggggattgaagcggtcgac

SEQ ID NO: 3076 - DNA, 2605 bp, Artificial Sequence
  Description of Artificial Sequence: Synthetic DNA sequence of Thermus Rt41A DNA Polymerase R777K
atgaaatacctgctgccgaccgctgctgctggtctgctgctcctcgctgcccagccggcgatggccatggatatcggaattaattcggatccgaattccccactttttgacctggaggaaccccccaagcgggtgcttctggtggacggccaccacctggcctaccgcaccttctacgccctgagcctcaccacctcccggggggagccggtgcagatggtctacggcttcgcccggagcctcctcaaggccttgaaggaggacgggcaggcggtggtcgtggtctttgacgccaaggccccctccttccgccacgaggcctacgaggcctacaaggcgggccgggcccccaccccggaggacttcccccgccagctcgccttggtcaagcggctggtggaccttctgggcctggtccgcctcgaggccccgggttacgaggcggacgacgtcctgggcaccctggccaagaaggccgaaagggaggggatggaggtgcgcatcctcacgggagaccgggacttcttccagctcctctccgagaaggtctcggtcctcctgccggacgggaccctggtcaccccaaaggacgtccaggagaagtacggggtgccgccggagcgctgggtggacttccgcgccctcacgggggaccgctcggacaacatccccggggtggcggggataggggagaagaccgcccttcgactcctcgcggagtgggggagcgtggagaacctcctgaagaacctggaccgggtgaagccggactcggtccggcgcaagatagaggcgcaccttgaggacctccgcctctccttggacctggcccgcatccgcaccgacctccccttggaggtggactttaaggccctgcgccgcaggacccccgacctggagggcctgagggcctttttggaggagctggagttcggaagcctccttcatgagttcggcctcctgggaggggagaagccccgggaggaggccccctggcccccgcccgaaggggccttcgtaggcttcctcctctcccgcaaggagcccatgtgggcggagcttctggccctggcggccgccgcagagggccgggtccaccgggcaacaagcccggttgaggccctggccgacctcaaggaggcccgggggttcctggccaaggacctggccgttttggccctgcgggagggggtggccctggaccccacggacgaccccctcctggtggcctacctcctggacccggccaacaccaaccccgagggggtggcccggcgctacgggggcgagttcacggaggacgcagcggagagggccctcctctccgagaggctcttccagaacctctttccccggctttccgagaagctcctctggctctaccaggaggtggagcggcccctctcccgggtcttggcccacatggaggcccggggggtgaggctggacgtcccccttctggaggccctctcctttgagctggagaaggagatggagcgcctggagggggaggtcttccgcttggccggccaccccttcaacctcaactcccgcgaccagctggaaagggtcctctttgacgagctgggccttaccccggtgggtcggacggagaagacgggcaagcgctccaccgcccagggggccctggaggccctccggggggcccaccccatcgtggagctcatcctccagtaccgggagctttccaagctcaaaagcacctacctggaccccctgccccggctcgtccacccgcggacgggccggcttcacacccgcttcaaccagacggccacggccacgggaaggctttccagctccgaccccaacctgcagaacatccccgtgcgcacccccttggggcagcgcatccgcaaggccttcgtggccgaggaggggtggctccttttggcggcggactactcccagatcgagcttcgggtcctggcccacctctcgggggacgagaacctgaagcgggtcttccgggaggggaaggacatccataccgaaaccgccgcctggatgttcggcttagaccccgctctagtggatccaaagatgcgccgggcggccaagacggtcaacttcggcgtcctctacgggatgtccgcccacaggctctcccaggagctcggcatagactacaaggaggcggaggcctttattgagcgctacttccagagcttccccaaggtgcgggcctggatagaaaggaccctggaggagggccggacgcggggctacgtggagaccctgttcggcaggaggcgctatgtgcccgacctggcctcccgggtccgctcggtgcgggaggcggcggagaaaatggccttcaacatgcccgtgcagggcaccgccgccgacctgatgaagatcgccatggtcaagctcttccccaggctaaagcccctgggggcccacctcctcctccaggtgcacgacgagctggtcctggaggtgcccgaggaccgggccgaggaggccaaggccctggtcaaggaggtcatggagaacacctaccccttggacgtgcccctcgaggtggaggtgggcgtgggtcgggactggctggaggcgaagggggattgaagcggtcgac

SEQ ID NO: 3077 - DNA, 2605 bp, Artificial Sequence
  Description of Artificial Sequence: Synthetic DNA sequence of Thermus Rt41A DNA Polymerase R777E
atgaaatacctgctgccgaccgctgctgctggtctgctgctcctcgctgcccagccggcgatggccatggatatcggaattaattcggatccgaattccccactttttgacctggaggaaccccccaagcgggtgcttctggtggacggccaccacctggcctaccgcaccttctacgccctgagcctcaccacctcccggggggagccggtgcagatggtctacggcttcgcccggagcctcctcaaggccttgaaggaggacgggcaggcggtggtcgtggtctttgacgccaaggccccctccttccgccacgaggcctacgaggcctacaaggcgggccgggcccccaccccggaggacttcccccgccagctcgccttggtcaagcggctggtggaccttctgggcctggtccgcctcgaggccccgggttacgaggcggacgacgtcctgggcaccctggccaagaaggccgaaagggaggggatggaggtgcgcatcctcacgggagaccgggacttcttccagctcctctccgagaaggtctcggtcctcctgccggacgggaccctggtcaccccaaaggacgtccaggagaagtacggggtgccgccggagcgctgggtggacttccgcgccctcacgggggaccgctcggacaacatccccggggtggcggggataggggagaagaccgcccttcgactcctcgcggagtgggggagcgtggagaacctcctgaagaacctggaccgggtgaagccggactcggtccggcgcaagatagaggcgcaccttgaggacctccgcctctccttggacctggcccgcatccgcaccgacctccccttggaggtggactttaaggccctgcgccgcaggacccccgacctggagggcctgagggcctttttggaggagctggagttcggaagcctccttcatgagttcggcctcctgggaggggagaagccccgggaggaggccccctggcccccgcccgaaggggccttcgtaggcttcctcctctcccgcaaggagcccatgtgggcggagcttctggccctggcggccgccgcagagggccgggtccaccgggcaacaagcccggttgaggccctggccgacctcaaggaggcccgggggttcctggccaaggacctggccgttttggccctgcgggagggggtggccctggaccccacggacgaccccctcctggtggcctacctcctggacccggccaacaccaaccccgagggggtggcccggcgctacgggggcgagttcacggaggacgcagcggagagggccctcctctccgagaggctcttccagaacctctttccccggctttccgagaagctcctctggctctaccaggaggtggagcggcccctctcccgggtcttggcccacatggaggcccggggggtgaggctggacgtcccccttctggaggccctctcctttgagctggagaaggagatggagcgcctggagggggaggtcttccgcttggccggccaccccttcaacctcaactcccgcgaccagctggaaagggtcctctttgacgagctgggccttaccccggtgggtcggacggagaagacgggcaagcgctccaccgcccagggggccctggaggccctccggggggcccaccccatcgtggagctcatcctccagtaccgggagctttccaagctcaaaagcacctacctggaccccctgccccggctcgtccacccgcggacgggccggcttcacacccgcttcaaccagacggccacggccacgggaaggctttccagctccgaccccaacctgcagaacatccccgtgcgcacccccttggggcagcgcatccgcaaggccttcgtggccgaggaggggtggctccttttggcggcggactactcccagatcgagcttcgggtcctggcccacctctcgggggacgagaacctgaagcgggtcttccgggaggggaaggacatccataccgaaaccgccgcctggatgttcggcttagaccccgctctagtggatccaaagatgcgccgggcggccaagacggtcaacttcggcgtcctctacgggatgtccgcccacaggctctcccaggagctcggcatagactacaaggaggcggaggcctttattgagcgctacttccagagcttccccaaggtgcgggcctggatagaaaggaccctggaggagggccggacgcggggctacgtggagaccctgttcggcaggaggcgctatgtgcccgacctggcctcccgggtccgctcggtgcgggaggcggcggaggaaatggccttcaacatgcccgtgcagggcaccgccgccgacctgatgaagatcgccatggtcaagctcttccccaggctaaagcccctgggggcccacctcctcctccaggtgcacgacgagctggtcctggaggtgcccgaggaccgggccgaggaggccaaggccctggtcaaggaggtcatggagaacacctaccccttggacgtgcccctcgaggtggaggtgggcgtgggtcgggactggctggaggcgaagggggattgaagcggtcgac

SEQ ID NO: 3078 - DNA, 2605 bp, Artificial Sequence
  Description of Artificial Sequence: Synthetic DNA sequence of Thermus Rt41A DNA Polymerase R777D
atgaaatacctgctgccgaccgctgctgctggtctgctgctcctcgctgcccagccggcgatggccatggatatcggaattaattcggatccgaattccccactttttgacctggaggaaccccccaagcgggtgcttctggtggacggccaccacctggcctaccgcaccttctacgccctgagcctcaccacctcccggggggagccggtgcagatggtctacggcttcgcccggagcctcctcaaggccttgaaggaggacgggcaggcggtggtcgtggtctttgacgccaaggccccctccttccgccacgaggcctacgaggcctacaaggcgggccgggcccccaccccggaggacttcccccgccagctcgccttggtcaagcggctggtggaccttctgggcctggtccgcctcgaggccccgggttacgaggcggacgacgtcctgggcaccctggccaagaaggccgaaagggaggggatggaggtgcgcatcctcacgggagaccgggacttcttccagctcctctccgagaaggtctcggtcctcctgccggacgggaccctggtcaccccaaaggacgtccaggagaagtacggggtgccgccggagcgctgggtggacttccgcgccctcacgggggaccgctcggacaacatccccggggtggcggggataggggagaagaccgcccttcgactcctcgcggagtgggggagcgtggagaacctcctgaagaacctggaccgggtgaagccggactcggtccggcgcaagatagaggcgcaccttgaggacctccgcctctccttggacctggcccgcatccgcaccgacctccccttggaggtggactttaaggccctgcgccgcaggacccccgacctggagggcctgagggcctttttggaggagctggagttcggaagcctccttcatgagttcggcctcctgggaggggagaagccccgggaggaggccccctggcccccgcccgaaggggccttcgtaggcttcctcctctcccgcaaggagcccatgtgggcggagcttctggccctggcggccgccgcagagggccgggtccaccgggcaacaagcccggttgaggccctggccgacctcaaggaggcccgggggttcctggccaaggacctggccgttttggccctgcgggagggggtggccctggaccccacggacgaccccctcctggtggcctacctcctggacccggccaacaccaaccccgagggggtggcccggcgctacgggggcgagttcacggaggacgcagcggagagggccctcctctccgagaggctcttccagaacctctttccccggctttccgagaagctcctctggctctaccaggaggtggagcggcccctctcccgggtcttggcccacatggaggcccggggggtgaggctggacgtcccccttctggaggccctctcctttgagctggagaaggagatggagcgcctggagggggaggtcttccgcttggccggccaccccttcaacctcaactcccgcgaccagctggaaagggtcctctttgacgagctgggccttaccccggtgggtcggacggagaagacgggcaagcgctccaccgcccagggggccctggaggccctccggggggcccaccccatcgtggagctcatcctccagtaccgggagctttccaagctcaaaagcacctacctggaccccctgccccggctcgtccacccgcggacgggccggcttcacacccgcttcaaccagacggccacggccacgggaaggctttccagctccgaccccaacctgcagaacatccccgtgcgcacccccttggggcagcgcatccgcaaggccttcgtggccgaggaggggtggctccttttggcggcggactactcccagatcgagcttcgggtcctggcccacctctcgggggacgagaacctgaagcgggtcttccgggaggggaaggacatccataccgaaaccgccgcctggatgttcggcttagaccccgctctagtggatccaaagatgcgccgggcggccaagacggtcaacttcggcgtcctctacgggatgtccgcccacaggctctcccaggagctcggcatagactacaaggaggcggaggcctttattgagcgctacttccagagcttccccaaggtgcgggcctggatagaaaggaccctggaggagggccggacgcggggctacgtggagaccctgttcggcaggaggcgctatgtgcccgacctggcctcccgggtccgctcggtgcgggaggcggcggaggatatggccttcaacatgcccgtgcagggcaccgccgccgacctgatgaagatcgccatggtcaagctcttccccaggctaaagcccctgggggcccacctcctcctccaggtgcacgacgagctggtcctggaggtgcccgaggaccgggccgaggaggccaaggccctggtcaaggaggtcatggagaacacctaccccttggacgtgcccctcgaggtggaggtgggcgtgggtcgggactggctggaggcgaagggggattgaagcggtcgac

SEQ ID NO: 3079 - DNA, 2605 bp, Artificial Sequence
  Description of Artificial Sequence: Synthetic DNA sequence of Thermus Rt41A DNA Polymerase R777F
atgaaatacctgctgccgaccgctgctgctggtctgctgctcctcgctgcccagccggcgatggccatggatatcggaattaattcggatccgaattccccactttttgacctggaggaaccccccaagcgggtgcttctggtggacggccaccacctggcctaccgcaccttctacgccctgagcctcaccacctcccggggggagccggtgcagatggtctacggcttcgcccggagcctcctcaaggccttgaaggaggacgggcaggcggtggtcgtggtctttgacgccaaggccccctccttccgccacgaggcctacgaggcctacaaggcgggccgggcccccaccccggaggacttcccccgccagctcgccttggtcaagcggctggtggaccttctgggcctggtccgcctcgaggccccgggttacgaggcggacgacgtcctgggcaccctggccaagaaggccgaaagggaggggatggaggtgcgcatcctcacgggagaccgggacttcttccagctcctctccgagaaggtctcggtcctcctgccggacgggaccctggtcaccccaaaggacgtccaggagaagtacggggtgccgccggagcgctgggtggacttccgcgccctcacgggggaccgctcggacaacatccccggggtggcggggataggggagaagaccgcccttcgactcctcgcggagtgggggagcgtggagaacctcctgaagaacctggaccgggtgaagccggactcggtccggcgcaagatagaggcgcaccttgaggacctccgcctctccttggacctggcccgcatccgcaccgacctccccttggaggtggactttaaggccctgcgccgcaggacccccgacctggagggcctgagggcctttttggaggagctggagttcggaagcctccttcatgagttcggcctcctgggaggggagaagccccgggaggaggccccctggcccccgcccgaaggggccttcgtaggcttcctcctctcccgcaaggagcccatgtgggcggagcttctggccctggcggccgccgcagagggccgggtccaccgggcaacaagcccggttgaggccctggccgacctcaaggaggcccgggggttcctggccaaggacctggccgttttggccctgcgggagggggtggccctggaccccacggacgaccccctcctggtggcctacctcctggacccggccaacaccaaccccgagggggtggcccggcgctacgggggcgagttcacggaggacgcagcggagagggccctcctctccgagaggctcttccagaacctctttccccggctttccgagaagctcctctggctctaccaggaggtggagcggcccctctcccgggtcttggcccacatggaggcccggggggtgaggctggacgtcccccttctggaggccctctcctttgagctggagaaggagatggagcgcctggagggggaggtcttccgcttggccggccaccccttcaacctcaactcccgcgaccagctggaaagggtcctctttgacgagctgggccttaccccggtgggtcggacggagaagacgggcaagcgctccaccgcccagggggccctggaggccctccggggggcccaccccatcgtggagctcatcctccagtaccgggagctttccaagctcaaaagcacctacctggaccccctgccccggctcgtccacccgcggacgggccggcttcacacccgcttcaaccagacggccacggccacgggaaggctttccagctccgaccccaacctgcagaacatccccgtgcgcacccccttggggcagcgcatccgcaaggccttcgtggccgaggaggggtggctccttttggcggcggactactcccagatcgagcttcgggtcctggcccacctctcgggggacgagaacctgaagcgggtcttccgggaggggaaggacatccataccgaaaccgccgcctggatgttcggcttagaccccgctctagtggatccaaagatgcgccgggcggccaagacggtcaacttcggcgtcctctacgggatgtccgcccacaggctctcccaggagctcggcatagactacaaggaggcggaggcctttattgagcgctacttccagagcttccccaaggtgcgggcctggatagaaaggaccctggaggagggccggacgcggggctacgtggagaccctgttcggcaggaggcgctatgtgcccgacctggcctcccgggtccgctcggtgcgggaggcggcggagtttatggccttcaacatgcccgtgcagggcaccgccgccgacctgatgaagatcgccatggtcaagctcttccccaggctaaagcccctgggggcccacctcctcctccaggtgcacgacgagctggtcctggaggtgcccgaggaccgggccgaggaggccaaggccctggtcaaggaggtcatggagaacacctaccccttggacgtgcccctcgaggtggaggtgggcgtgggtcgggactggctggaggcgaagggggattgaagcggtcgac

SEQ ID NO: 3080 - DNA, 2605 bp, Artificial Sequence
  Description of Artificial Sequence: Synthetic DNA sequence of Thermus Rt41A DNA Polymerase R777S
atgaaatacctgctgccgaccgctgctgctggtctgctgctcctcgctgcccagccggcgatggccatggatatcggaattaattcggatccgaattccccactttttgacctggaggaaccccccaagcgggtgcttctggtggacggccaccacctggcctaccgcaccttctacgccctgagcctcaccacctcccggggggagccggtgcagatggtctacggcttcgcccggagcctcctcaaggccttgaaggaggacgggcaggcggtggtcgtggtctttgacgccaaggccccctccttccgccacgaggcctacgaggcctacaaggcgggccgggcccccaccccggaggacttcccccgccagctcgccttggtcaagcggctggtggaccttctgggcctggtccgcctcgaggccccgggttacgaggcggacgacgtcctgggcaccctggccaagaaggccgaaagggaggggatggaggtgcgcatcctcacgggagaccgggacttcttccagctcctctccgagaaggtctcggtcctcctgccggacgggaccctggtcaccccaaaggacgtccaggagaagtacggggtgccgccggagcgctgggtggacttccgcgccctcacgggggaccgctcggacaacatccccggggtggcggggataggggagaagaccgcccttcgactcctcgcggagtgggggagcgtggagaacctcctgaagaacctggaccgggtgaagccggactcggtccggcgcaagatagaggcgcaccttgaggacctccgcctctccttggacctggcccgcatccgcaccgacctccccttggaggtggactttaaggccctgcgccgcaggacccccgacctggagggcctgagggcctttttggaggagctggagttcggaagcctccttcatgagttcggcctcctgggaggggagaagccccgggaggaggccccctggcccccgcccgaaggggccttcgtaggcttcctcctctcccgcaaggagcccatgtgggcggagcttctggccctggcggccgccgcagagggccgggtccaccgggcaacaagcccggttgaggccctggccgacctcaaggaggcccgggggttcctggccaaggacctggccgttttggccctgcgggagggggtggccctggaccccacggacgaccccctcctggtggcctacctcctggacccggccaacaccaaccccgagggggtggcccggcgctacgggggcgagttcacggaggacgcagcggagagggccctcctctccgagaggctcttccagaacctctttccccggctttccgagaagctcctctggctctaccaggaggtggagcggcccctctcccgggtcttggcccacatggaggcccggggggtgaggctggacgtcccccttctggaggccctctcctttgagctggagaaggagatggagcgcctggagggggaggtcttccgcttggccggccaccccttcaacctcaactcccgcgaccagctggaaagggtcctctttgacgagctgggccttaccccggtgggtcggacggagaagacgggcaagcgctccaccgcccagggggccctggaggccctccggggggcccaccccatcgtggagctcatcctccagtaccgggagctttccaagctcaaaagcacctacctggaccccctgccccggctcgtccacccgcggacgggccggcttcacacccgcttcaaccagacggccacggccacgggaaggctttccagctccgaccccaacctgcagaacatccccgtgcgcacccccttggggcagcgcatccgcaaggccttcgtggccgaggaggggtggctccttttggcggcggactactcccagatcgagcttcgggtcctggcccacctctcgggggacgagaacctgaagcgggtcttccgggaggggaaggacatccataccgaaaccgccgcctggatgttcggcttagaccccgctctagtggatccaaagatgcgccgggcggccaagacggtcaacttcggcgtcctctacgggatgtccgcccacaggctctcccaggagctcggcatagactacaaggaggcggaggcctttattgagcgctacttccagagcttccccaaggtgcgggcctggatagaaaggaccctggaggagggccggacgcggggctacgtggagaccctgttcggcaggaggcgctatgtgcccgacctggcctcccgggtccgctcggtgcgggaggcggcggagtctatggccttcaacatgcccgtgcagggcaccgccgccgacctgatgaagatcgccatggtcaagctcttccccaggctaaagcccctgggggcccacctcctcctccaggtgcacgacgagctggtcctggaggtgcccgaggaccgggccgaggaggccaaggccctggtcaaggaggtcatggagaacacctaccccttggacgtgcccctcgaggtggaggtgggcgtgggtcgggactggctggaggcgaagggggattgaagcggtcgac

SEQ ID NO: 3081 - DNA, 2605 bp, Artificial Sequence
  Description of Artificial Sequence: Synthetic DNA sequence of Thermus Rt41A DNA Polymerase R777Y
atgaaatacctgctgccgaccgctgctgctggtctgctgctcctcgctgcccagccggcgatggccatggatatcggaattaattcggatccgaattccccactttttgacctggaggaaccccccaagcgggtgcttctggtggacggccaccacctggcctaccgcaccttctacgccctgagcctcaccacctcccggggggagccggtgcagatggtctacggcttcgcccggagcctcctcaaggccttgaaggaggacgggcaggcggtggtcgtggtctttgacgccaaggccccctccttccgccacgaggcctacgaggcctacaaggcgggccgggcccccaccccggaggacttcccccgccagctcgccttggtcaagcggctggtggaccttctgggcctggtccgcctcgaggccccgggttacgaggcggacgacgtcctgggcaccctggccaagaaggccgaaagggaggggatggaggtgcgcatcctcacgggagaccgggacttcttccagctcctctccgagaaggtctcggtcctcctgccggacgggaccctggtcaccccaaaggacgtccaggagaagtacggggtgccgccggagcgctgggtggacttccgcgccctcacgggggaccgctcggacaacatccccggggtggcggggataggggagaagaccgcccttcgactcctcgcggagtgggggagcgtggagaacctcctgaagaacctggaccgggtgaagccggactcggtccggcgcaagatagaggcgcaccttgaggacctccgcctctccttggacctggcccgcatccgcaccgacctccccttggaggtggactttaaggccctgcgccgcaggacccccgacctggagggcctgagggcctttttggaggagctggagttcggaagcctccttcatgagttcggcctcctgggaggggagaagccccgggaggaggccccctggcccccgcccgaaggggccttcgtaggcttcctcctctcccgcaaggagcccatgtgggcggagcttctggccctggcggccgccgcagagggccgggtccaccgggcaacaagcccggttgaggccctggccgacctcaaggaggcccgggggttcctggccaaggacctggccgttttggccctgcgggagggggtggccctggaccccacggacgaccccctcctggtggcctacctcctggacccggccaacaccaaccccgagggggtggcccggcgctacgggggcgagttcacggaggacgcagcggagagggccctcctctccgagaggctcttccagaacctctttccccggctttccgagaagctcctctggctctaccaggaggtggagcggcccctctcccgggtcttggcccacatggaggcccggggggtgaggctggacgtcccccttctggaggccctctcctttgagctggagaaggagatggagcgcctggagggggaggtcttccgcttggccggccaccccttcaacctcaactcccgcgaccagctggaaagggtcctctttgacgagctgggccttaccccggtgggtcggacggagaagacgggcaagcgctccaccgcccagggggccctggaggccctccggggggcccaccccatcgtggagctcatcctccagtaccgggagctttccaagctcaaaagcacctacctggaccccctgccccggctcgtccacccgcggacgggccggcttcacacccgcttcaaccagacggccacggccacgggaaggctttccagctccgaccccaacctgcagaacatccccgtgcgcacccccttggggcagcgcatccgcaaggccttcgtggccgaggaggggtggctccttttggcggcggactactcccagatcgagcttcgggtcctggcccacctctcgggggacgagaacctgaagcgggtcttccgggaggggaaggacatccataccgaaaccgccgcctggatgttcggcttagaccccgctctagtggatccaaagatgcgccgggcggccaagacggtcaacttcggcgtcctctacgggatgtccgcccacaggctctcccaggagctcggcatagactacaaggaggcggaggcctttattgagcgctacttccagagcttccccaaggtgcgggcctggatagaaaggaccctggaggagggccggacgcggggctacgtggagaccctgttcggcaggaggcgctatgtgcccgacctggcctcccgggtccgctcggtgcgggaggcggcggagtatatggccttcaacatgcccgtgcagggcaccgccgccgacctgatgaagatcgccatggtcaagctcttccccaggctaaagcccctgggggcccacctcctcctccaggtgcacgacgagctggtcctggaggtgcccgaggaccgggccgaggaggccaaggccctggtcaaggaggtcatggagaacacctaccccttggacgtgcccctcgaggtggaggtgggcgtgggtcgggactggctggaggcgaagggggattgaagcggtcgac

SEQ ID NO: 3082 - DNA, 2605 bp, Artificial Sequence
  Description of Artificial Sequence: Synthetic DNA sequence of Thermus Rt41A DNA Polymerase R777W
atgaaatacctgctgccgaccgctgctgctggtctgctgctcctcgctgcccagccggcgatggccatggatatcggaattaattcggatccgaattccccactttttgacctggaggaaccccccaagcgggtgcttctggtggacggccaccacctggcctaccgcaccttctacgccctgagcctcaccacctcccggggggagccggtgcagatggtctacggcttcgcccggagcctcctcaaggccttgaaggaggacgggcaggcggtggtcgtggtctttgacgccaaggccccctccttccgccacgaggcctacgaggcctacaaggcgggccgggcccccaccccggaggacttcccccgccagctcgccttggtcaagcggctggtggaccttctgggcctggtccgcctcgaggccccgggttacgaggcggacgacgtcctgggcaccctggccaagaaggccgaaagggaggggatggaggtgcgcatcctcacgggagaccgggacttcttccagctcctctccgagaaggtctcggtcctcctgccggacgggaccctggtcaccccaaaggacgtccaggagaagtacggggtgccgccggagcgctgggtggacttccgcgccctcacgggggaccgctcggacaacatccccggggtggcggggataggggagaagaccgcccttcgactcctcgcggagtgggggagcgtggagaacctcctgaagaacctggaccgggtgaagccggactcggtccggcgcaagatagaggcgcaccttgaggacctccgcctctccttggacctggcccgcatccgcaccgacctccccttggaggtggactttaaggccctgcgccgcaggacccccgacctggagggcctgagggcctttttggaggagctggagttcggaagcctccttcatgagttcggcctcctgggaggggagaagccccgggaggaggccccctggcccccgcccgaaggggccttcgtaggcttcctcctctcccgcaaggagcccatgtgggcggagcttctggccctggcggccgccgcagagggccgggtccaccgggcaacaagcccggttgaggccctggccgacctcaaggaggcccgggggttcctggccaaggacctggccgttttggccctgcgggagggggtggccctggaccccacggacgaccccctcctggtggcctacctcctggacccggccaacaccaaccccgagggggtggcccggcgctacgggggcgagttcacggaggacgcagcggagagggccctcctctccgagaggctcttccagaacctctttccccggctttccgagaagctcctctggctctaccaggaggtggagcggcccctctcccgggtcttggcccacatggaggcccggggggtgaggctggacgtcccccttctggaggccctctcctttgagctggagaaggagatggagcgcctggagggggaggtcttccgcttggccggccaccccttcaacctcaactcccgcgaccagctggaaagggtcctctttgacgagctgggccttaccccggtgggtcggacggagaagacgggcaagcgctccaccgcccagggggccctggaggccctccggggggcccaccccatcgtggagctcatcctccagtaccgggagctttccaagctcaaaagcacctacctggaccccctgccccggctcgtccacccgcggacgggccggcttcacacccgcttcaaccagacggccacggccacgggaaggctttccagctccgaccccaacctgcagaacatccccgtgcgcacccccttggggcagcgcatccgcaaggccttcgtggccgaggaggggtggctccttttggcggcggactactcccagatcgagcttcgggtcctggcccacctctcgggggacgagaacctgaagcgggtcttccgggaggggaaggacatccataccgaaaccgccgcctggatgttcggcttagaccccgctctagtggatccaaagatgcgccgggcggccaagacggtcaacttcggcgtcctctacgggatgtccgcccacaggctctcccaggagctcggcatagactacaaggaggcggaggcctttattgagcgctacttccagagcttccccaaggtgcgggcctggatagaaaggaccctggaggagggccggacgcggggctacgtggagaccctgttcggcaggaggcgctatgtgcccgacctggcctcccgggtccgctcggtgcgggaggcggcggagtggatggccttcaacatgcccgtgcagggcaccgccgccgacctgatgaagatcgccatggtcaagctcttccccaggctaaagcccctgggggcccacctcctcctccaggtgcacgacgagctggtcctggaggtgcccgaggaccgggccgaggaggccaaggccctggtcaaggaggtcatggagaacacctaccccttggacgtgcccctcgaggtggaggtgggcgtgggtcgggactggctggaggcgaagggggattgaagcggtcgac

SEQ ID NO: 3083 - DNA, 2605 bp, Artificial Sequence
  Description of Artificial Sequence: Synthetic DNA sequence of Thermus Rt41A DNA Polymerase R777P
atgaaatacctgctgccgaccgctgctgctggtctgctgctcctcgctgcccagccggcgatggccatggatatcggaattaattcggatccgaattccccactttttgacctggaggaaccccccaagcgggtgcttctggtggacggccaccacctggcctaccgcaccttctacgccctgagcctcaccacctcccggggggagccggtgcagatggtctacggcttcgcccggagcctcctcaaggccttgaaggaggacgggcaggcggtggtcgtggtctttgacgccaaggccccctccttccgccacgaggcctacgaggcctacaaggcgggccgggcccccaccccggaggacttcccccgccagctcgccttggtcaagcggctggtggaccttctgggcctggtccgcctcgaggccccgggttacgaggcggacgacgtcctgggcaccctggccaagaaggccgaaagggaggggatggaggtgcgcatcctcacgggagaccgggacttcttccagctcctctccgagaaggtctcggtcctcctgccggacgggaccctggtcaccccaaaggacgtccaggagaagtacggggtgccgccggagcgctgggtggacttccgcgccctcacgggggaccgctcggacaacatccccggggtggcggggataggggagaagaccgcccttcgactcctcgcggagtgggggagcgtggagaacctcctgaagaacctggaccgggtgaagccggactcggtccggcgcaagatagaggcgcaccttgaggacctccgcctctccttggacctggcccgcatccgcaccgacctccccttggaggtggactttaaggccctgcgccgcaggacccccgacctggagggcctgagggcctttttggaggagctggagttcggaagcctccttcatgagttcggcctcctgggaggggagaagccccgggaggaggccccctggcccccgcccgaaggggccttcgtaggcttcctcctctcccgcaaggagcccatgtgggcggagcttctggccctggcggccgccgcagagggccgggtccaccgggcaacaagcccggttgaggccctggccgacctcaaggaggcccgggggttcctggccaaggacctggccgttttggccctgcgggagggggtggccctggaccccacggacgaccccctcctggtggcctacctcctggacccggccaacaccaaccccgagggggtggcccggcgctacgggggcgagttcacggaggacgcagcggagagggccctcctctccgagaggctcttccagaacctctttccccggctttccgagaagctcctctggctctaccaggaggtggagcggcccctctcccgggtcttggcccacatggaggcccggggggtgaggctggacgtcccccttctggaggccctctcctttgagctggagaaggagatggagcgcctggagggggaggtcttccgcttggccggccaccccttcaacctcaactcccgcgaccagctggaaagggtcctctttgacgagctgggccttaccccggtgggtcggacggagaagacgggcaagcgctccaccgcccagggggccctggaggccctccggggggcccaccccatcgtggagctcatcctccagtaccgggagctttccaagctcaaaagcacctacctggaccccctgccccggctcgtccacccgcggacgggccggcttcacacccgcttcaaccagacggccacggccacgggaaggctttccagctccgaccccaacctgcagaacatccccgtgcgcacccccttggggcagcgcatccgcaaggccttcgtggccgaggaggggtggctccttttggcggcggactactcccagatcgagcttcgggtcctggcccacctctcgggggacgagaacctgaagcgggtcttccgggaggggaaggacatccataccgaaaccgccgcctggatgttcggcttagaccccgctctagtggatccaaagatgcgccgggcggccaagacggtcaacttcggcgtcctctacgggatgtccgcccacaggctctcccaggagctcggcatagactacaaggaggcggaggcctttattgagcgctacttccagagcttccccaaggtgcgggcctggatagaaaggaccctggaggagggccggacgcggggctacgtggagaccctgttcggcaggaggcgctatgtgcccgacctggcctcccgggtccgctcggtgcgggaggcggcggagcctatggccttcaacatgcccgtgcagggcaccgccgccgacctgatgaagatcgccatggtcaagctcttccccaggctaaagcccctgggggcccacctcctcctccaggtgcacgacgagctggtcctggaggtgcccgaggaccgggccgaggaggccaaggccctggtcaaggaggtcatggagaacacctaccccttggacgtgcccctcgaggtggaggtgggcgtgggtcgggactggctggaggcgaagggggattgaagcggtcgac

SEQ ID NO: 3084 - DNA, 2605 bp, Artificial Sequence
  Description of Artificial Sequence: Synthetic DNA sequence of Thermus Rt41A DNA Polymerase R777M
atgaaatacctgctgccgaccgctgctgctggtctgctgctcctcgctgcccagccggcgatggccatggatatcggaattaattcggatccgaattccccactttttgacctggaggaaccccccaagcgggtgcttctggtggacggccaccacctggcctaccgcaccttctacgccctgagcctcaccacctcccggggggagccggtgcagatggtctacggcttcgcccggagcctcctcaaggccttgaaggaggacgggcaggcggtggtcgtggtctttgacgccaaggccccctccttccgccacgaggcctacgaggcctacaaggcgggccgggcccccaccccggaggacttcccccgccagctcgccttggtcaagcggctggtggaccttctgggcctggtccgcctcgaggccccgggttacgaggcggacgacgtcctgggcaccctggccaagaaggccgaaagggaggggatggaggtgcgcatcctcacgggagaccgggacttcttccagctcctctccgagaaggtctcggtcctcctgccggacgggaccctggtcaccccaaaggacgtccaggagaagtacggggtgccgccggagcgctgggtggacttccgcgccctcacgggggaccgctcggacaacatccccggggtggcggggataggggagaagaccgcccttcgactcctcgcggagtgggggagcgtggagaacctcctgaagaacctggaccgggtgaagccggactcggtccggcgcaagatagaggcgcaccttgaggacctccgcctctccttggacctggcccgcatccgcaccgacctccccttggaggtggactttaaggccctgcgccgcaggacccccgacctggagggcctgagggcctttttggaggagctggagttcggaagcctccttcatgagttcggcctcctgggaggggagaagccccgggaggaggccccctggcccccgcccgaaggggccttcgtaggcttcctcctctcccgcaaggagcccatgtgggcggagcttctggccctggcggccgccgcagagggccgggtccaccgggcaacaagcccggttgaggccctggccgacctcaaggaggcccgggggttcctggccaaggacctggccgttttggccctgcgggagggggtggccctggaccccacggacgaccccctcctggtggcctacctcctggacccggccaacaccaaccccgagggggtggcccggcgctacgggggcgagttcacggaggacgcagcggagagggccctcctctccgagaggctcttccagaacctctttccccggctttccgagaagctcctctggctctaccaggaggtggagcggcccctctcccgggtcttggcccacatggaggcccggggggtgaggctggacgtcccccttctggaggccctctcctttgagctggagaaggagatggagcgcctggagggggaggtcttccgcttggccggccaccccttcaacctcaactcccgcgaccagctggaaagggtcctctttgacgagctgggccttaccccggtgggtcggacggagaagacgggcaagcgctccaccgcccagggggccctggaggccctccggggggcccaccccatcgtggagctcatcctccagtaccgggagctttccaagctcaaaagcacctacctggaccccctgccccggctcgtccacccgcggacgggccggcttcacacccgcttcaaccagacggccacggccacgggaaggctttccagctccgaccccaacctgcagaacatccccgtgcgcacccccttggggcagcgcatccgcaaggccttcgtggccgaggaggggtggctccttttggcggcggactactcccagatcgagcttcgggtcctggcccacctctcgggggacgagaacctgaagcgggtcttccgggaggggaaggacatccataccgaaaccgccgcctggatgttcggcttagaccccgctctagtggatccaaagatgcgccgggcggccaagacggtcaacttcggcgtcctctacgggatgtccgcccacaggctctcccaggagctcggcatagactacaaggaggcggaggcctttattgagcgctacttccagagcttccccaaggtgcgggcctggatagaaaggaccctggaggagggccggacgcggggctacgtggagaccctgttcggcaggaggcgctatgtgcccgacctggcctcccgggtccgctcggtgcgggaggcggcggagatgatggccttcaacatgcccgtgcagggcaccgccgccgacctgatgaagatcgccatggtcaagctcttccccaggctaaagcccctgggggcccacctcctcctccaggtgcacgacgagctggtcctggaggtgcccgaggaccgggccgaggaggccaaggccctggtcaaggaggtcatggagaacacctaccccttggacgtgcccctcgaggtggaggtgggcgtgggtcgggactggctggaggcgaagggggattgaagcggtcgac

SEQ ID NO: 3085 - DNA, 2605 bp, Artificial Sequence
  Description of Artificial Sequence: Synthetic DNA sequence of Thermus Rt41A DNA Polymerase R777T
atgaaatacctgctgccgaccgctgctgctggtctgctgctcctcgctgcccagccggcgatggccatggatatcggaattaattcggatccgaattccccactttttgacctggaggaaccccccaagcgggtgcttctggtggacggccaccacctggcctaccgcaccttctacgccctgagcctcaccacctcccggggggagccggtgcagatggtctacggcttcgcccggagcctcctcaaggccttgaaggaggacgggcaggcggtggtcgtggtctttgacgccaaggccccctccttccgccacgaggcctacgaggcctacaaggcgggccgggcccccaccccggaggacttcccccgccagctcgccttggtcaagcggctggtggaccttctgggcctggtccgcctcgaggccccgggttacgaggcggacgacgtcctgggcaccctggccaagaaggccgaaagggaggggatggaggtgcgcatcctcacgggagaccgggacttcttccagctcctctccgagaaggtctcggtcctcctgccggacgggaccctggtcaccccaaaggacgtccaggagaagtacggggtgccgccggagcgctgggtggacttccgcgccctcacgggggaccgctcggacaacatccccggggtggcggggataggggagaagaccgcccttcgactcctcgcggagtgggggagcgtggagaacctcctgaagaacctggaccgggtgaagccggactcggtccggcgcaagatagaggcgcaccttgaggacctccgcctctccttggacctggcccgcatccgcaccgacctccccttggaggtggactttaaggccctgcgccgcaggacccccgacctggagggcctgagggcctttttggaggagctggagttcggaagcctccttcatgagttcggcctcctgggaggggagaagccccgggaggaggccccctggcccccgcccgaaggggccttcgtaggcttcctcctctcccgcaaggagcccatgtgggcggagcttctggccctggcggccgccgcagagggccgggtccaccgggcaacaagcccggttgaggccctggccgacctcaaggaggcccgggggttcctggccaaggacctggccgttttggccctgcgggagggggtggccctggaccccacggacgaccccctcctggtggcctacctcctggacccggccaacaccaaccccgagggggtggcccggcgctacgggggcgagttcacggaggacgcagcggagagggccctcctctccgagaggctcttccagaacctctttccccggctttccgagaagctcctctggctctaccaggaggtggagcggcccctctcccgggtcttggcccacatggaggcccggggggtgaggctggacgtcccccttctggaggccctctcctttgagctggagaaggagatggagcgcctggagggggaggtcttccgcttggccggccaccccttcaacctcaactcccgcgaccagctggaaagggtcctctttgacgagctgggccttaccccggtgggtcggacggagaagacgggcaagcgctccaccgcccagggggccctggaggccctccggggggcccaccccatcgtggagctcatcctccagtaccgggagctttccaagctcaaaagcacctacctggaccccctgccccggctcgtccacccgcggacgggccggcttcacacccgcttcaaccagacggccacggccacgggaaggctttccagctccgaccccaacctgcagaacatccccgtgcgcacccccttggggcagcgcatccgcaaggccttcgtggccgaggaggggtggctccttttggcggcggactactcccagatcgagcttcgggtcctggcccacctctcgggggacgagaacctgaagcgggtcttccgggaggggaaggacatccataccgaaaccgccgcctggatgttcggcttagaccccgctctagtggatccaaagatgcgccgggcggccaagacggtcaacttcggcgtcctctacgggatgtccgcccacaggctctcccaggagctcggcatagactacaaggaggcggaggcctttattgagcgctacttccagagcttccccaaggtgcgggcctggatagaaaggaccctggaggagggccggacgcggggctacgtggagaccctgttcggcaggaggcgctatgtgcccgacctggcctcccgggtccgctcggtgcgggaggcggcggagactatggccttcaacatgcccgtgcagggcaccgccgccgacctgatgaagatcgccatggtcaagctcttccccaggctaaagcccctgggggcccacctcctcctccaggtgcacgacgagctggtcctggaggtgcccgaggaccgggccgaggaggccaaggccctggtcaaggaggtcatggagaacacctaccccttggacgtgcccctcgaggtggaggtgggcgtgggtcgggactggctggaggcgaagggggattgaagcggtcgac

SEQ ID NO: 3086 - DNA, 2605 bp, Artificial Sequence
  Description of Artificial Sequence: Synthetic DNA sequence of Thermus Rt41A DNA Polymerase R777N
atgaaatacctgctgccgaccgctgctgctggtctgctgctcctcgctgcccagccggcgatggccatggatatcggaattaattcggatccgaattccccactttttgacctggaggaaccccccaagcgggtgcttctggtggacggccaccacctggcctaccgcaccttctacgccctgagcctcaccacctcccggggggagccggtgcagatggtctacggcttcgcccggagcctcctcaaggccttgaaggaggacgggcaggcggtggtcgtggtctttgacgccaaggccccctccttccgccacgaggcctacgaggcctacaaggcgggccgggcccccaccccggaggacttcccccgccagctcgccttggtcaagcggctggtggaccttctgggcctggtccgcctcgaggccccgggttacgaggcggacgacgtcctgggcaccctggccaagaaggccgaaagggaggggatggaggtgcgcatcctcacgggagaccgggacttcttccagctcctctccgagaaggtctcggtcctcctgccggacgggaccctggtcaccccaaaggacgtccaggagaagtacggggtgccgccggagcgctgggtggacttccgcgccctcacgggggaccgctcggacaacatccccggggtggcggggataggggagaagaccgcccttcgactcctcgcggagtgggggagcgtggagaacctcctgaagaacctggaccgggtgaagccggactcggtccggcgcaagatagaggcgcaccttgaggacctccgcctctccttggacctggcccgcatccgcaccgacctccccttggaggtggactttaaggccctgcgccgcaggacccccgacctggagggcctgagggcctttttggaggagctggagttcggaagcctccttcatgagttcggcctcctgggaggggagaagccccgggaggaggccccctggcccccgcccgaaggggccttcgtaggcttcctcctctcccgcaaggagcccatgtgggcggagcttctggccctggcggccgccgcagagggccgggtccaccgggcaacaagcccggttgaggccctggccgacctcaaggaggcccgggggttcctggccaaggacctggccgttttggccctgcgggagggggtggccctggaccccacggacgaccccctcctggtggcctacctcctggacccggccaacaccaaccccgagggggtggcccggcgctacgggggcgagttcacggaggacgcagcggagagggccctcctctccgagaggctcttccagaacctctttccccggctttccgagaagctcctctggctctaccaggaggtggagcggcccctctcccgggtcttggcccacatggaggcccggggggtgaggctggacgtcccccttctggaggccctctcctttgagctggagaaggagatggagcgcctggagggggaggtcttccgcttggccggccaccccttcaacctcaactcccgcgaccagctggaaagggtcctctttgacgagctgggccttaccccggtgggtcggacggagaagacgggcaagcgctccaccgcccagggggccctggaggccctccggggggcccaccccatcgtggagctcatcctccagtaccgggagctttccaagctcaaaagcacctacctggaccccctgccccggctcgtccacccgcggacgggccggcttcacacccgcttcaaccagacggccacggccacgggaaggctttccagctccgaccccaacctgcagaacatccccgtgcgcacccccttggggcagcgcatccgcaaggccttcgtggccgaggaggggtggctccttttggcggcggactactcccagatcgagcttcgggtcctggcccacctctcgggggacgagaacctgaagcgggtcttccgggaggggaaggacatccataccgaaaccgccgcctggatgttcggcttagaccccgctctagtggatccaaagatgcgccgggcggccaagacggtcaacttcggcgtcctctacgggatgtccgcccacaggctctcccaggagctcggcatagactacaaggaggcggaggcctttattgagcgctacttccagagcttccccaaggtgcgggcctggatagaaaggaccctggaggagggccggacgcggggctacgtggagaccctgttcggcaggaggcgctatgtgcccgacctggcctcccgggtccgctcggtgcgggaggcggcggagaatatggccttcaacatgcccgtgcagggcaccgccgccgacctgatgaagatcgccatggtcaagctcttccccaggctaaagcccctgggggcccacctcctcctccaggtgcacgacgagctggtcctggaggtgcccgaggaccgggccgaggaggccaaggccctggtcaaggaggtcatggagaacacctaccccttggacgtgcccctcgaggtggaggtgggcgtgggtcgggactggctggaggcgaagggggattgaagcggtcgac

SEQ ID NO: 3087 - DNA, 2605 bp, Artificial Sequence
  Description of Artificial Sequence: Synthetic DNA sequence of Thermus Rt41A DNA Polymerase R777V
atgaaatacctgctgccgaccgctgctgctggtctgctgctcctcgctgcccagccggcgatggccatggatatcggaattaattcggatccgaattccccactttttgacctggaggaaccccccaagcgggtgcttctggtggacggccaccacctggcctaccgcaccttctacgccctgagcctcaccacctcccggggggagccggtgcagatggtctacggcttcgcccggagcctcctcaaggccttgaaggaggacgggcaggcggtggtcgtggtctttgacgccaaggccccctccttccgccacgaggcctacgaggcctacaaggcgggccgggcccccaccccggaggacttcccccgccagctcgccttggtcaagcggctggtggaccttctgggcctggtccgcctcgaggccccgggttacgaggcggacgacgtcctgggcaccctggccaagaaggccgaaagggaggggatggaggtgcgcatcctcacgggagaccgggacttcttccagctcctctccgagaaggtctcggtcctcctgccggacgggaccctggtcaccccaaaggacgtccaggagaagtacggggtgccgccggagcgctgggtggacttccgcgccctcacgggggaccgctcggacaacatccccggggtggcggggataggggagaagaccgcccttcgactcctcgcggagtgggggagcgtggagaacctcctgaagaacctggaccgggtgaagccggactcggtccggcgcaagatagaggcgcaccttgaggacctccgcctctccttggacctggcccgcatccgcaccgacctccccttggaggtggactttaaggccctgcgccgcaggacccccgacctggagggcctgagggcctttttggaggagctggagttcggaagcctccttcatgagttcggcctcctgggaggggagaagccccgggaggaggccccctggcccccgcccgaaggggccttcgtaggcttcctcctctcccgcaaggagcccatgtgggcggagcttctggccctggcggccgccgcagagggccgggtccaccgggcaacaagcccggttgaggccctggccgacctcaaggaggcccgggggttcctggccaaggacctggccgttttggccctgcgggagggggtggccctggaccccacggacgaccccctcctggtggcctacctcctggacccggccaacaccaaccccgagggggtggcccggcgctacgggggcgagttcacggaggacgcagcggagagggccctcctctccgagaggctcttccagaacctctttccccggctttccgagaagctcctctggctctaccaggaggtggagcggcccctctcccgggtcttggcccacatggaggcccggggggtgaggctggacgtcccccttctggaggccctctcctttgagctggagaaggagatggagcgcctggagggggaggtcttccgcttggccggccaccccttcaacctcaactcccgcgaccagctggaaagggtcctctttgacgagctgggccttaccccggtgggtcggacggagaagacgggcaagcgctccaccgcccagggggccctggaggccctccggggggcccaccccatcgtggagctcatcctccagtaccgggagctttccaagctcaaaagcacctacctggaccccctgccccggctcgtccacccgcggacgggccggcttcacacccgcttcaaccagacggccacggccacgggaaggctttccagctccgaccccaacctgcagaacatccccgtgcgcacccccttggggcagcgcatccgcaaggccttcgtggccgaggaggggtggctccttttggcggcggactactcccagatcgagcttcgggtcctggcccacctctcgggggacgagaacctgaagcgggtcttccgggaggggaaggacatccataccgaaaccgccgcctggatgttcggcttagaccccgctctagtggatccaaagatgcgccgggcggccaagacggtcaacttcggcgtcctctacgggatgtccgcccacaggctctcccaggagctcggcatagactacaaggaggcggaggcctttattgagcgctacttccagagcttccccaaggtgcgggcctggatagaaaggaccctggaggagggccggacgcggggctacgtggagaccctgttcggcaggaggcgctatgtgcccgacctggcctcccgggtccgctcggtgcgggaggcggcggaggtcatggccttcaacatgcccgtgcagggcaccgccgccgacctgatgaagatcgccatggtcaagctcttccccaggctaaagcccctgggggcccacctcctcctccaggtgcacgacgagctggtcctggaggtgcccgaggaccgggccgaggaggccaaggccctggtcaaggaggtcatggagaacacctaccccttggacgtgcccctcgaggtggaggtgggcgtgggtcgggactggctggaggcgaagggggattgaagcggtcgac

SEQ ID NO: 3088 - DNA, 2605 bp, Artificial Sequence
  Description of Artificial Sequence: Synthetic DNA sequence of Thermus Rt41A DNA Polymerase E568A
atgaaatacctgctgccgaccgctgctgctggtctgctgctcctcgctgcccagccggcgatggccatggatatcggaattaattcggatccgaattccccactttttgacctggaggaaccccccaagcgggtgcttctggtggacggccaccacctggcctaccgcaccttctacgccctgagcctcaccacctcccggggggagccggtgcagatggtctacggcttcgcccggagcctcctcaaggccttgaaggaggacgggcaggcggtggtcgtggtctttgacgccaaggccccctccttccgccacgaggcctacgaggcctacaaggcgggccgggcccccaccccggaggacttcccccgccagctcgccttggtcaagcggctggtggaccttctgggcctggtccgcctcgaggccccgggttacgaggcggacgacgtcctgggcaccctggccaagaaggccgaaagggaggggatggaggtgcgcatcctcacgggagaccgggacttcttccagctcctctccgagaaggtctcggtcctcctgccggacgggaccctggtcaccccaaaggacgtccaggagaagtacggggtgccgccggagcgctgggtggacttccgcgccctcacgggggaccgctcggacaacatccccggggtggcggggataggggagaagaccgcccttcgactcctcgcggagtgggggagcgtggagaacctcctgaagaacctggaccgggtgaagccggactcggtccggcgcaagatagaggcgcaccttgaggacctccgcctctccttggacctggcccgcatccgcaccgacctccccttggaggtggactttaaggccctgcgccgcaggacccccgacctggagggcctgagggcctttttggaggagctggagttcggaagcctccttcatgagttcggcctcctgggaggggagaagccccgggaggaggccccctggcccccgcccgaaggggccttcgtaggcttcctcctctcccgcaaggagcccatgtgggcggagcttctggccctggcggccgccgcagagggccgggtccaccgggcaacaagcccggttgaggccctggccgacctcaaggaggcccgggggttcctggccaaggacctggccgttttggccctgcgggagggggtggccctggaccccacggacgaccccctcctggtggcctacctcctggacccggccaacaccaaccccgagggggtggcccggcgctacgggggcgagttcacggaggacgcagcggagagggccctcctctccgagaggctcttccagaacctctttccccggctttccgagaagctcctctggctctaccaggaggtggagcggcccctctcccgggtcttggcccacatggaggcccggggggtgaggctggacgtcccccttctggaggccctctcctttgagctggagaaggagatggagcgcctggagggggaggtcttccgcttggccggccaccccttcaacctcaactcccgcgaccagctggaaagggtcctctttgacgagctgggccttaccccggtgggtcggacggagaagacgggcaagcgctccaccgcccagggggccctggaggccctccggggggcccaccccatcgtggagctcatcctccagtaccgggctctttccaagctcaaaagcacctacctggaccccctgccccggctcgtccacccgcggacgggccggcttcacacccgcttcaaccagacggccacggccacgggaaggctttccagctccgaccccaacctgcagaacatccccgtgcgcacccccttggggcagcgcatccgcaaggccttcgtggccgaggaggggtggctccttttggcggcggactactcccagatcgagcttcgggtcctggcccacctctcgggggacgagaacctgaagcgggtcttccgggaggggaaggacatccataccgaaaccgccgcctggatgttcggcttagaccccgctctagtggatccaaagatgcgccgggcggccaagacggtcaacttcggcgtcctctacgggatgtccgcccacaggctctcccaggagctcggcatagactacaaggaggcggaggcctttattgagcgctacttccagagcttccccaaggtgcgggcctggatagaaaggaccctggaggagggccggacgcggggctacgtggagaccctgttcggcaggaggcgctatgtgcccgacctggcctcccgggtccgctcggtgcgggaggcggcggagcggatggccttcaacatgcccgtgcagggcaccgccgccgacctgatgaagatcgccatggtcaagctcttccccaggctaaagcccctgggggcccacctcctcctccaggtgcacgacgagctggtcctggaggtgcccgaggaccgggccgaggaggccaaggccctggtcaaggaggtcatggagaacacctaccccttggacgtgcccctcgaggtggaggtgggcgtgggtcgggactggctggaggcgaagggggattgaagcggtcgac

SEQ ID NO: 3089 - DNA, 2605 bp, Artificial Sequence
  Description of Artificial Sequence: Synthetic DNA sequence of Thermus Rt41A DNA Polymerase E568R
atgaaatacctgctgccgaccgctgctgctggtctgctgctcctcgctgcccagccggcgatggccatggatatcggaattaattcggatccgaattccccactttttgacctggaggaaccccccaagcgggtgcttctggtggacggccaccacctggcctaccgcaccttctacgccctgagcctcaccacctcccggggggagccggtgcagatggtctacggcttcgcccggagcctcctcaaggccttgaaggaggacgggcaggcggtggtcgtggtctttgacgccaaggccccctccttccgccacgaggcctacgaggcctacaaggcgggccgggcccccaccccggaggacttcccccgccagctcgccttggtcaagcggctggtggaccttctgggcctggtccgcctcgaggccccgggttacgaggcggacgacgtcctgggcaccctggccaagaaggccgaaagggaggggatggaggtgcgcatcctcacgggagaccgggacttcttccagctcctctccgagaaggtctcggtcctcctgccggacgggaccctggtcaccccaaaggacgtccaggagaagtacggggtgccgccggagcgctgggtggacttccgcgccctcacgggggaccgctcggacaacatccccggggtggcggggataggggagaagaccgcccttcgactcctcgcggagtgggggagcgtggagaacctcctgaagaacctggaccgggtgaagccggactcggtccggcgcaagatagaggcgcaccttgaggacctccgcctctccttggacctggcccgcatccgcaccgacctccccttggaggtggactttaaggccctgcgccgcaggacccccgacctggagggcctgagggcctttttggaggagctggagttcggaagcctccttcatgagttcggcctcctgggaggggagaagccccgggaggaggccccctggcccccgcccgaaggggccttcgtaggcttcctcctctcccgcaaggagcccatgtgggcggagcttctggccctggcggccgccgcagagggccgggtccaccgggcaacaagcccggttgaggccctggccgacctcaaggaggcccgggggttcctggccaaggacctggccgttttggccctgcgggagggggtggccctggaccccacggacgaccccctcctggtggcctacctcctggacccggccaacaccaaccccgagggggtggcccggcgctacgggggcgagttcacggaggacgcagcggagagggccctcctctccgagaggctcttccagaacctctttccccggctttccgagaagctcctctggctctaccaggaggtggagcggcccctctcccgggtcttggcccacatggaggcccggggggtgaggctggacgtcccccttctggaggccctctcctttgagctggagaaggagatggagcgcctggagggggaggtcttccgcttggccggccaccccttcaacctcaactcccgcgaccagctggaaagggtcctctttgacgagctgggccttaccccggtgggtcggacggagaagacgggcaagcgctccaccgcccagggggccctggaggccctccggggggcccaccccatcgtggagctcatcctccagtaccggcgactttccaagctcaaaagcacctacctggaccccctgccccggctcgtccacccgcggacgggccggcttcacacccgcttcaaccagacggccacggccacgggaaggctttccagctccgaccccaacctgcagaacatccccgtgcgcacccccttggggcagcgcatccgcaaggccttcgtggccgaggaggggtggctccttttggcggcggactactcccagatcgagcttcgggtcctggcccacctctcgggggacgagaacctgaagcgggtcttccgggaggggaaggacatccataccgaaaccgccgcctggatgttcggcttagaccccgctctagtggatccaaagatgcgccgggcggccaagacggtcaacttcggcgtcctctacgggatgtccgcccacaggctctcccaggagctcggcatagactacaaggaggcggaggcctttattgagcgctacttccagagcttccccaaggtgcgggcctggatagaaaggaccctggaggagggccggacgcggggctacgtggagaccctgttcggcaggaggcgctatgtgcccgacctggcctcccgggtccgctcggtgcgggaggcggcggagcggatggccttcaacatgcccgtgcagggcaccgccgccgacctgatgaagatcgccatggtcaagctcttccccaggctaaagcccctgggggcccacctcctcctccaggtgcacgacgagctggtcctggaggtgcccgaggaccgggccgaggaggccaaggccctggtcaaggaggtcatggagaacacctaccccttggacgtgcccctcgaggtggaggtgggcgtgggtcgggactggctggaggcgaagggggattgaagcggtcgac

SEQ ID NO: 3090 - DNA, 2605 bp, Artificial Sequence
  Description of Artificial Sequence: Synthetic DNA sequence of Thermus Rt41A DNA Polymerase E568C
atgaaatacctgctgccgaccgctgctgctggtctgctgctcctcgctgcccagccggcgatggccatggatatcggaattaattcggatccgaattccccactttttgacctggaggaaccccccaagcgggtgcttctggtggacggccaccacctggcctaccgcaccttctacgccctgagcctcaccacctcccggggggagccggtgcagatggtctacggcttcgcccggagcctcctcaaggccttgaaggaggacgggcaggcggtggtcgtggtctttgacgccaaggccccctccttccgccacgaggcctacgaggcctacaaggcgggccgggcccccaccccggaggacttcccccgccagctcgccttggtcaagcggctggtggaccttctgggcctggtccgcctcgaggccccgggttacgaggcggacgacgtcctgggcaccctggccaagaaggccgaaagggaggggatggaggtgcgcatcctcacgggagaccgggacttcttccagctcctctccgagaaggtctcggtcctcctgccggacgggaccctggtcaccccaaaggacgtccaggagaagtacggggtgccgccggagcgctgggtggacttccgcgccctcacgggggaccgctcggacaacatccccggggtggcggggataggggagaagaccgcccttcgactcctcgcggagtgggggagcgtggagaacctcctgaagaacctggaccgggtgaagccggactcggtccggcgcaagatagaggcgcaccttgaggacctccgcctctccttggacctggcccgcatccgcaccgacctccccttggaggtggactttaaggccctgcgccgcaggacccccgacctggagggcctgagggcctttttggaggagctggagttcggaagcctccttcatgagttcggcctcctgggaggggagaagccccgggaggaggccccctggcccccgcccgaaggggccttcgtaggcttcctcctctcccgcaaggagcccatgtgggcggagcttctggccctggcggccgccgcagagggccgggtccaccgggcaacaagcccggttgaggccctggccgacctcaaggaggcccgggggttcctggccaaggacctggccgttttggccctgcgggagggggtggccctggaccccacggacgaccccctcctggtggcctacctcctggacccggccaacaccaaccccgagggggtggcccggcgctacgggggcgagttcacggaggacgcagcggagagggccctcctctccgagaggctcttccagaacctctttccccggctttccgagaagctcctctggctctaccaggaggtggagcggcccctctcccgggtcttggcccacatggaggcccggggggtgaggctggacgtcccccttctggaggccctctcctttgagctggagaaggagatggagcgcctggagggggaggtcttccgcttggccggccaccccttcaacctcaactcccgcgaccagctggaaagggtcctctttgacgagctgggccttaccccggtgggtcggacggagaagacgggcaagcgctccaccgcccagggggccctggaggccctccggggggcccaccccatcgtggagctcatcctccagtaccggtgtctttccaagctcaaaagcacctacctggaccccctgccccggctcgtccacccgcggacgggccggcttcacacccgcttcaaccagacggccacggccacgggaaggctttccagctccgaccccaacctgcagaacatccccgtgcgcacccccttggggcagcgcatccgcaaggccttcgtggccgaggaggggtggctccttttggcggcggactactcccagatcgagcttcgggtcctggcccacctctcgggggacgagaacctgaagcgggtcttccgggaggggaaggacatccataccgaaaccgccgcctggatgttcggcttagaccccgctctagtggatccaaagatgcgccgggcggccaagacggtcaacttcggcgtcctctacgggatgtccgcccacaggctctcccaggagctcggcatagactacaaggaggcggaggcctttattgagcgctacttccagagcttccccaaggtgcgggcctggatagaaaggaccctggaggagggccggacgcggggctacgtggagaccctgttcggcaggaggcgctatgtgcccgacctggcctcccgggtccgctcggtgcgggaggcggcggagcggatggccttcaacatgcccgtgcagggcaccgccgccgacctgatgaagatcgccatggtcaagctcttccccaggctaaagcccctgggggcccacctcctcctccaggtgcacgacgagctggtcctggaggtgcccgaggaccgggccgaggaggccaaggccctggtcaaggaggtcatggagaacacctaccccttggacgtgcccctcgaggtggaggtgggcgtgggtcgggactggctggaggcgaagggggattgaagcggtcgac

SEQ ID NO: 3091 - DNA, 2605 bp, Artificial Sequence
  Description of Artificial Sequence: Synthetic DNA sequence of Thermus Rt41A DNA Polymerase E568G
atgaaatacctgctgccgaccgctgctgctggtctgctgctcctcgctgcccagccggcgatggccatggatatcggaattaattcggatccgaattccccactttttgacctggaggaaccccccaagcgggtgcttctggtggacggccaccacctggcctaccgcaccttctacgccctgagcctcaccacctcccggggggagccggtgcagatggtctacggcttcgcccggagcctcctcaaggccttgaaggaggacgggcaggcggtggtcgtggtctttgacgccaaggccccctccttccgccacgaggcctacgaggcctacaaggcgggccgggcccccaccccggaggacttcccccgccagctcgccttggtcaagcggctggtggaccttctgggcctggtccgcctcgaggccccgggttacgaggcggacgacgtcctgggcaccctggccaagaaggccgaaagggaggggatggaggtgcgcatcctcacgggagaccgggacttcttccagctcctctccgagaaggtctcggtcctcctgccggacgggaccctggtcaccccaaaggacgtccaggagaagtacggggtgccgccggagcgctgggtggacttccgcgccctcacgggggaccgctcggacaacatccccggggtggcggggataggggagaagaccgcccttcgactcctcgcggagtgggggagcgtggagaacctcctgaagaacctggaccgggtgaagccggactcggtccggcgcaagatagaggcgcaccttgaggacctccgcctctccttggacctggcccgcatccgcaccgacctccccttggaggtggactttaaggccctgcgccgcaggacccccgacctggagggcctgagggcctttttggaggagctggagttcggaagcctccttcatgagttcggcctcctgggaggggagaagccccgggaggaggccccctggcccccgcccgaaggggccttcgtaggcttcctcctctcccgcaaggagcccatgtgggcggagcttctggccctggcggccgccgcagagggccgggtccaccgggcaacaagcccggttgaggccctggccgacctcaaggaggcccgggggttcctggccaaggacctggccgttttggccctgcgggagggggtggccctggaccccacggacgaccccctcctggtggcctacctcctggacccggccaacaccaaccccgagggggtggcccggcgctacgggggcgagttcacggaggacgcagcggagagggccctcctctccgagaggctcttccagaacctctttccccggctttccgagaagctcctctggctctaccaggaggtggagcggcccctctcccgggtcttggcccacatggaggcccggggggtgaggctggacgtcccccttctggaggccctctcctttgagctggagaaggagatggagcgcctggagggggaggtcttccgcttggccggccaccccttcaacctcaactcccgcgaccagctggaaagggtcctctttgacgagctgggccttaccccggtgggtcggacggagaagacgggcaagcgctccaccgcccagggggccctggaggccctccggggggcccaccccatcgtggagctcatcctccagtaccggggtctttccaagctcaaaagcacctacctggaccccctgccccggctcgtccacccgcggacgggccggcttcacacccgcttcaaccagacggccacggccacgggaaggctttccagctccgaccccaacctgcagaacatccccgtgcgcacccccttggggcagcgcatccgcaaggccttcgtggccgaggaggggtggctccttttggcggcggactactcccagatcgagcttcgggtcctggcccacctctcgggggacgagaacctgaagcgggtcttccgggaggggaaggacatccataccgaaaccgccgcctggatgttcggcttagaccccgctctagtggatccaaagatgcgccgggcggccaagacggtcaacttcggcgtcctctacgggatgtccgcccacaggctctcccaggagctcggcatagactacaaggaggcggaggcctttattgagcgctacttccagagcttccccaaggtgcgggcctggatagaaaggaccctggaggagggccggacgcggggctacgtggagaccctgttcggcaggaggcgctatgtgcccgacctggcctcccgggtccgctcggtgcgggaggcggcggagcggatggccttcaacatgcccgtgcagggcaccgccgccgacctgatgaagatcgccatggtcaagctcttccccaggctaaagcccctgggggcccacctcctcctccaggtgcacgacgagctggtcctggaggtgcccgaggaccgggccgaggaggccaaggccctggtcaaggaggtcatggagaacacctaccccttggacgtgcccctcgaggtggaggtgggcgtgggtcgggactggctggaggcgaagggggattgaagcggtcgac

SEQ ID NO: 3092 - DNA, 2605 bp, Artificial Sequence
  Description of Artificial Sequence: Synthetic DNA sequence of Thermus Rt41A DNA Polymerase E568Q
atgaaatacctgctgccgaccgctgctgctggtctgctgctcctcgctgcccagccggcgatggccatggatatcggaattaattcggatccgaattccccactttttgacctggaggaaccccccaagcgggtgcttctggtggacggccaccacctggcctaccgcaccttctacgccctgagcctcaccacctcccggggggagccggtgcagatggtctacggcttcgcccggagcctcctcaaggccttgaaggaggacgggcaggcggtggtcgtggtctttgacgccaaggccccctccttccgccacgaggcctacgaggcctacaaggcgggccgggcccccaccccggaggacttcccccgccagctcgccttggtcaagcggctggtggaccttctgggcctggtccgcctcgaggccccgggttacgaggcggacgacgtcctgggcaccctggccaagaaggccgaaagggaggggatggaggtgcgcatcctcacgggagaccgggacttcttccagctcctctccgagaaggtctcggtcctcctgccggacgggaccctggtcaccccaaaggacgtccaggagaagtacggggtgccgccggagcgctgggtggacttccgcgccctcacgggggaccgctcggacaacatccccggggtggcggggataggggagaagaccgcccttcgactcctcgcggagtgggggagcgtggagaacctcctgaagaacctggaccgggtgaagccggactcggtccggcgcaagatagaggcgcaccttgaggacctccgcctctccttggacctggcccgcatccgcaccgacctccccttggaggtggactttaaggccctgcgccgcaggacccccgacctggagggcctgagggcctttttggaggagctggagttcggaagcctccttcatgagttcggcctcctgggaggggagaagccccgggaggaggccccctggcccccgcccgaaggggccttcgtaggcttcctcctctcccgcaaggagcccatgtgggcggagcttctggccctggcggccgccgcagagggccgggtccaccgggcaacaagcccggttgaggccctggccgacctcaaggaggcccgggggttcctggccaaggacctggccgttttggccctgcgggagggggtggccctggaccccacggacgaccccctcctggtggcctacctcctggacccggccaacaccaaccccgagggggtggcccggcgctacgggggcgagttcacggaggacgcagcggagagggccctcctctccgagaggctcttccagaacctctttccccggctttccgagaagctcctctggctctaccaggaggtggagcggcccctctcccgggtcttggcccacatggaggcccggggggtgaggctggacgtcccccttctggaggccctctcctttgagctggagaaggagatggagcgcctggagggggaggtcttccgcttggccggccaccccttcaacctcaactcccgcgaccagctggaaagggtcctctttgacgagctgggccttaccccggtgggtcggacggagaagacgggcaagcgctccaccgcccagggggccctggaggccctccggggggcccaccccatcgtggagctcatcctccagtaccggcaactttccaagctcaaaagcacctacctggaccccctgccccggctcgtccacccgcggacgggccggcttcacacccgcttcaaccagacggccacggccacgggaaggctttccagctccgaccccaacctgcagaacatccccgtgcgcacccccttggggcagcgcatccgcaaggccttcgtggccgaggaggggtggctccttttggcggcggactactcccagatcgagcttcgggtcctggcccacctctcgggggacgagaacctgaagcgggtcttccgggaggggaaggacatccataccgaaaccgccgcctggatgttcggcttagaccccgctctagtggatccaaagatgcgccgggcggccaagacggtcaacttcggcgtcctctacgggatgtccgcccacaggctctcccaggagctcggcatagactacaaggaggcggaggcctttattgagcgctacttccagagcttccccaaggtgcgggcctggatagaaaggaccctggaggagggccggacgcggggctacgtggagaccctgttcggcaggaggcgctatgtgcccgacctggcctcccgggtccgctcggtgcgggaggcggcggagcggatggccttcaacatgcccgtgcagggcaccgccgccgacctgatgaagatcgccatggtcaagctcttccccaggctaaagcccctgggggcccacctcctcctccaggtgcacgacgagctggtcctggaggtgcccgaggaccgggccgaggaggccaaggccctggtcaaggaggtcatggagaacacctaccccttggacgtgcccctcgaggtggaggtgggcgtgggtcgggactggctggaggcgaagggggattgaagcggtcgac

SEQ ID NO: 3093 - DNA, 2605 bp, Artificial Sequence
  Description of Artificial Sequence: Synthetic DNA sequence of Thermus Rt41A DNA Polymerase E568H
atgaaatacctgctgccgaccgctgctgctggtctgctgctcctcgctgcccagccggcgatggccatggatatcggaattaattcggatccgaattccccactttttgacctggaggaaccccccaagcgggtgcttctggtggacggccaccacctggcctaccgcaccttctacgccctgagcctcaccacctcccggggggagccggtgcagatggtctacggcttcgcccggagcctcctcaaggccttgaaggaggacgggcaggcggtggtcgtggtctttgacgccaaggccccctccttccgccacgaggcctacgaggcctacaaggcgggccgggcccccaccccggaggacttcccccgccagctcgccttggtcaagcggctggtggaccttctgggcctggtccgcctcgaggccccgggttacgaggcggacgacgtcctgggcaccctggccaagaaggccgaaagggaggggatggaggtgcgcatcctcacgggagaccgggacttcttccagctcctctccgagaaggtctcggtcctcctgccggacgggaccctggtcaccccaaaggacgtccaggagaagtacggggtgccgccggagcgctgggtggacttccgcgccctcacgggggaccgctcggacaacatccccggggtggcggggataggggagaagaccgcccttcgactcctcgcggagtgggggagcgtggagaacctcctgaagaacctggaccgggtgaagccggactcggtccggcgcaagatagaggcgcaccttgaggacctccgcctctccttggacctggcccgcatccgcaccgacctccccttggaggtggactttaaggccctgcgccgcaggacccccgacctggagggcctgagggcctttttggaggagctggagttcggaagcctccttcatgagttcggcctcctgggaggggagaagccccgggaggaggccccctggcccccgcccgaaggggccttcgtaggcttcctcctctcccgcaaggagcccatgtgggcggagcttctggccctggcggccgccgcagagggccgggtccaccgggcaacaagcccggttgaggccctggccgacctcaaggaggcccgggggttcctggccaaggacctggccgttttggccctgcgggagggggtggccctggaccccacggacgaccccctcctggtggcctacctcctggacccggccaacaccaaccccgagggggtggcccggcgctacgggggcgagttcacggaggacgcagcggagagggccctcctctccgagaggctcttccagaacctctttccccggctttccgagaagctcctctggctctaccaggaggtggagcggcccctctcccgggtcttggcccacatggaggcccggggggtgaggctggacgtcccccttctggaggccctctcctttgagctggagaaggagatggagcgcctggagggggaggtcttccgcttggccggccaccccttcaacctcaactcccgcgaccagctggaaagggtcctctttgacgagctgggccttaccccggtgggtcggacggagaagacgggcaagcgctccaccgcccagggggccctggaggccctccggggggcccaccccatcgtggagctcatcctccagtaccggcatctttccaagctcaaaagcacctacctggaccccctgccccggctcgtccacccgcggacgggccggcttcacacccgcttcaaccagacggccacggccacgggaaggctttccagctccgaccccaacctgcagaacatccccgtgcgcacccccttggggcagcgcatccgcaaggccttcgtggccgaggaggggtggctccttttggcggcggactactcccagatcgagcttcgggtcctggcccacctctcgggggacgagaacctgaagcgggtcttccgggaggggaaggacatccataccgaaaccgccgcctggatgttcggcttagaccccgctctagtggatccaaagatgcgccgggcggccaagacggtcaacttcggcgtcctctacgggatgtccgcccacaggctctcccaggagctcggcatagactacaaggaggcggaggcctttattgagcgctacttccagagcttccccaaggtgcgggcctggatagaaaggaccctggaggagggccggacgcggggctacgtggagaccctgttcggcaggaggcgctatgtgcccgacctggcctcccgggtccgctcggtgcgggaggcggcggagcggatggccttcaacatgcccgtgcagggcaccgccgccgacctgatgaagatcgccatggtcaagctcttccccaggctaaagcccctgggggcccacctcctcctccaggtgcacgacgagctggtcctggaggtgcccgaggaccgggccgaggaggccaaggccctggtcaaggaggtcatggagaacacctaccccttggacgtgcccctcgaggtggaggtgggcgtgggtcgggactggctggaggcgaagggggattgaagcggtcgac

SEQ ID NO: 3094 - DNA, 2605 bp, Artificial Sequence
  Description of Artificial Sequence: Synthetic DNA sequence of Thermus Rt41A DNA Polymerase E568I
atgaaatacctgctgccgaccgctgctgctggtctgctgctcctcgctgcccagccggcgatggccatggatatcggaattaattcggatccgaattccccactttttgacctggaggaaccccccaagcgggtgcttctggtggacggccaccacctggcctaccgcaccttctacgccctgagcctcaccacctcccggggggagccggtgcagatggtctacggcttcgcccggagcctcctcaaggccttgaaggaggacgggcaggcggtggtcgtggtctttgacgccaaggccccctccttccgccacgaggcctacgaggcctacaaggcgggccgggcccccaccccggaggacttcccccgccagctcgccttggtcaagcggctggtggaccttctgggcctggtccgcctcgaggccccgggttacgaggcggacgacgtcctgggcaccctggccaagaaggccgaaagggaggggatggaggtgcgcatcctcacgggagaccgggacttcttccagctcctctccgagaaggtctcggtcctcctgccggacgggaccctggtcaccccaaaggacgtccaggagaagtacggggtgccgccggagcgctgggtggacttccgcgccctcacgggggaccgctcggacaacatccccggggtggcggggataggggagaagaccgcccttcgactcctcgcggagtgggggagcgtggagaacctcctgaagaacctggaccgggtgaagccggactcggtccggcgcaagatagaggcgcaccttgaggacctccgcctctccttggacctggcccgcatccgcaccgacctccccttggaggtggactttaaggccctgcgccgcaggacccccgacctggagggcctgagggcctttttggaggagctggagttcggaagcctccttcatgagttcggcctcctgggaggggagaagccccgggaggaggccccctggcccccgcccgaaggggccttcgtaggcttcctcctctcccgcaaggagcccatgtgggcggagcttctggccctggcggccgccgcagagggccgggtccaccgggcaacaagcccggttgaggccctggccgacctcaaggaggcccgggggttcctggccaaggacctggccgttttggccctgcgggagggggtggccctggaccccacggacgaccccctcctggtggcctacctcctggacccggccaacaccaaccccgagggggtggcccggcgctacgggggcgagttcacggaggacgcagcggagagggccctcctctccgagaggctcttccagaacctctttccccggctttccgagaagctcctctggctctaccaggaggtggagcggcccctctcccgggtcttggcccacatggaggcccggggggtgaggctggacgtcccccttctggaggccctctcctttgagctggagaaggagatggagcgcctggagggggaggtcttccgcttggccggccaccccttcaacctcaactcccgcgaccagctggaaagggtcctctttgacgagctgggccttaccccggtgggtcggacggagaagacgggcaagcgctccaccgcccagggggccctggaggccctccggggggcccaccccatcgtggagctcatcctccagtaccggattctttccaagctcaaaagcacctacctggaccccctgccccggctcgtccacccgcggacgggccggcttcacacccgcttcaaccagacggccacggccacgggaaggctttccagctccgaccccaacctgcagaacatccccgtgcgcacccccttggggcagcgcatccgcaaggccttcgtggccgaggaggggtggctccttttggcggcggactactcccagatcgagcttcgggtcctggcccacctctcgggggacgagaacctgaagcgggtcttccgggaggggaaggacatccataccgaaaccgccgcctggatgttcggcttagaccccgctctagtggatccaaagatgcgccgggcggccaagacggtcaacttcggcgtcctctacgggatgtccgcccacaggctctcccaggagctcggcatagactacaaggaggcggaggcctttattgagcgctacttccagagcttccccaaggtgcgggcctggatagaaaggaccctggaggagggccggacgcggggctacgtggagaccctgttcggcaggaggcgctatgtgcccgacctggcctcccgggtccgctcggtgcgggaggcggcggagcggatggccttcaacatgcccgtgcagggcaccgccgccgacctgatgaagatcgccatggtcaagctcttccccaggctaaagcccctgggggcccacctcctcctccaggtgcacgacgagctggtcctggaggtgcccgaggaccgggccgaggaggccaaggccctggtcaaggaggtcatggagaacacctaccccttggacgtgcccctcgaggtggaggtgggcgtgggtcgggactggctggaggcgaagggggattgaagcggtcgac

SEQ ID NO: 3095 - DNA, 2605 bp, Artificial Sequence
  Description of Artificial Sequence: Synthetic DNA sequence of Thermus Rt41A DNA Polymerase E568L
atgaaatacctgctgccgaccgctgctgctggtctgctgctcctcgctgcccagccggcgatggccatggatatcggaattaattcggatccgaattccccactttttgacctggaggaaccccccaagcgggtgcttctggtggacggccaccacctggcctaccgcaccttctacgccctgagcctcaccacctcccggggggagccggtgcagatggtctacggcttcgcccggagcctcctcaaggccttgaaggaggacgggcaggcggtggtcgtggtctttgacgccaaggccccctccttccgccacgaggcctacgaggcctacaaggcgggccgggcccccaccccggaggacttcccccgccagctcgccttggtcaagcggctggtggaccttctgggcctggtccgcctcgaggccccgggttacgaggcggacgacgtcctgggcaccctggccaagaaggccgaaagggaggggatggaggtgcgcatcctcacgggagaccgggacttcttccagctcctctccgagaaggtctcggtcctcctgccggacgggaccctggtcaccccaaaggacgtccaggagaagtacggggtgccgccggagcgctgggtggacttccgcgccctcacgggggaccgctcggacaacatccccggggtggcggggataggggagaagaccgcccttcgactcctcgcggagtgggggagcgtggagaacctcctgaagaacctggaccgggtgaagccggactcggtccggcgcaagatagaggcgcaccttgaggacctccgcctctccttggacctggcccgcatccgcaccgacctccccttggaggtggactttaaggccctgcgccgcaggacccccgacctggagggcctgagggcctttttggaggagctggagttcggaagcctccttcatgagttcggcctcctgggaggggagaagccccgggaggaggccccctggcccccgcccgaaggggccttcgtaggcttcctcctctcccgcaaggagcccatgtgggcggagcttctggccctggcggccgccgcagagggccgggtccaccgggcaacaagcccggttgaggccctggccgacctcaaggaggcccgggggttcctggccaaggacctggccgttttggccctgcgggagggggtggccctggaccccacggacgaccccctcctggtggcctacctcctggacccggccaacaccaaccccgagggggtggcccggcgctacgggggcgagttcacggaggacgcagcggagagggccctcctctccgagaggctcttccagaacctctttccccggctttccgagaagctcctctggctctaccaggaggtggagcggcccctctcccgggtcttggcccacatggaggcccggggggtgaggctggacgtcccccttctggaggccctctcctttgagctggagaaggagatggagcgcctggagggggaggtcttccgcttggccggccaccccttcaacctcaactcccgcgaccagctggaaagggtcctctttgacgagctgggccttaccccggtgggtcggacggagaagacgggcaagcgctccaccgcccagggggccctggaggccctccggggggcccaccccatcgtggagctcatcctccagtaccggttactttccaagctcaaaagcacctacctggaccccctgccccggctcgtccacccgcggacgggccggcttcacacccgcttcaaccagacggccacggccacgggaaggctttccagctccgaccccaacctgcagaacatccccgtgcgcacccccttggggcagcgcatccgcaaggccttcgtggccgaggaggggtggctccttttggcggcggactactcccagatcgagcttcgggtcctggcccacctctcgggggacgagaacctgaagcgggtcttccgggaggggaaggacatccataccgaaaccgccgcctggatgttcggcttagaccccgctctagtggatccaaagatgcgccgggcggccaagacggtcaacttcggcgtcctctacgggatgtccgcccacaggctctcccaggagctcggcatagactacaaggaggcggaggcctttattgagcgctacttccagagcttccccaaggtgcgggcctggatagaaaggaccctggaggagggccggacgcggggctacgtggagaccctgttcggcaggaggcgctatgtgcccgacctggcctcccgggtccgctcggtgcgggaggcggcggagcggatggccttcaacatgcccgtgcagggcaccgccgccgacctgatgaagatcgccatggtcaagctcttccccaggctaaagcccctgggggcccacctcctcctccaggtgcacgacgagctggtcctggaggtgcccgaggaccgggccgaggaggccaaggccctggtcaaggaggtcatggagaacacctaccccttggacgtgcccctcgaggtggaggtgggcgtgggtcgggactggctggaggcgaagggggattgaagcggtcgac

SEQ ID NO: 3096 - DNA, 2605 bp, Artificial Sequence
  Description of Artificial Sequence: Synthetic DNA sequence of Thermus Rt41A DNA Polymerase E568K
atgaaatacctgctgccgaccgctgctgctggtctgctgctcctcgctgcccagccggcgatggccatggatatcggaattaattcggatccgaattccccactttttgacctggaggaaccccccaagcgggtgcttctggtggacggccaccacctggcctaccgcaccttctacgccctgagcctcaccacctcccggggggagccggtgcagatggtctacggcttcgcccggagcctcctcaaggccttgaaggaggacgggcaggcggtggtcgtggtctttgacgccaaggccccctccttccgccacgaggcctacgaggcctacaaggcgggccgggcccccaccccggaggacttcccccgccagctcgccttggtcaagcggctggtggaccttctgggcctggtccgcctcgaggccccgggttacgaggcggacgacgtcctgggcaccctggccaagaaggccgaaagggaggggatggaggtgcgcatcctcacgggagaccgggacttcttccagctcctctccgagaaggtctcggtcctcctgccggacgggaccctggtcaccccaaaggacgtccaggagaagtacggggtgccgccggagcgctgggtggacttccgcgccctcacgggggaccgctcggacaacatccccggggtggcggggataggggagaagaccgcccttcgactcctcgcggagtgggggagcgtggagaacctcctgaagaacctggaccgggtgaagccggactcggtccggcgcaagatagaggcgcaccttgaggacctccgcctctccttggacctggcccgcatccgcaccgacctccccttggaggtggactttaaggccctgcgccgcaggacccccgacctggagggcctgagggcctttttggaggagctggagttcggaagcctccttcatgagttcggcctcctgggaggggagaagccccgggaggaggccccctggcccccgcccgaaggggccttcgtaggcttcctcctctcccgcaaggagcccatgtgggcggagcttctggccctggcggccgccgcagagggccgggtccaccgggcaacaagcccggttgaggccctggccgacctcaaggaggcccgggggttcctggccaaggacctggccgttttggccctgcgggagggggtggccctggaccccacggacgaccccctcctggtggcctacctcctggacccggccaacaccaaccccgagggggtggcccggcgctacgggggcgagttcacggaggacgcagcggagagggccctcctctccgagaggctcttccagaacctctttccccggctttccgagaagctcctctggctctaccaggaggtggagcggcccctctcccgggtcttggcccacatggaggcccggggggtgaggctggacgtcccccttctggaggccctctcctttgagctggagaaggagatggagcgcctggagggggaggtcttccgcttggccggccaccccttcaacctcaactcccgcgaccagctggaaagggtcctctttgacgagctgggccttaccccggtgggtcggacggagaagacgggcaagcgctccaccgcccagggggccctggaggccctccggggggcccaccccatcgtggagctcatcctccagtaccggaaactttccaagctcaaaagcacctacctggaccccctgccccggctcgtccacccgcggacgggccggcttcacacccgcttcaaccagacggccacggccacgggaaggctttccagctccgaccccaacctgcagaacatccccgtgcgcacccccttggggcagcgcatccgcaaggccttcgtggccgaggaggggtggctccttttggcggcggactactcccagatcgagcttcgggtcctggcccacctctcgggggacgagaacctgaagcgggtcttccgggaggggaaggacatccataccgaaaccgccgcctggatgttcggcttagaccccgctctagtggatccaaagatgcgccgggcggccaagacggtcaacttcggcgtcctctacgggatgtccgcccacaggctctcccaggagctcggcatagactacaaggaggcggaggcctttattgagcgctacttccagagcttccccaaggtgcgggcctggatagaaaggaccctggaggagggccggacgcggggctacgtggagaccctgttcggcaggaggcgctatgtgcccgacctggcctcccgggtccgctcggtgcgggaggcggcggagcggatggccttcaacatgcccgtgcagggcaccgccgccgacctgatgaagatcgccatggtcaagctcttccccaggctaaagcccctgggggcccacctcctcctccaggtgcacgacgagctggtcctggaggtgcccgaggaccgggccgaggaggccaaggccctggtcaaggaggtcatggagaacacctaccccttggacgtgcccctcgaggtggaggtgggcgtgggtcgggactggctggaggcgaagggggattgaagcggtcgac

SEQ ID NO: 3097 - DNA, 2605 bp, Artificial Sequence
  Description of Artificial Sequence: Synthetic DNA sequence of Thermus Rt41A DNA Polymerase E568V
atgaaatacctgctgccgaccgctgctgctggtctgctgctcctcgctgcccagccggcgatggccatggatatcggaattaattcggatccgaattccccactttttgacctggaggaaccccccaagcgggtgcttctggtggacggccaccacctggcctaccgcaccttctacgccctgagcctcaccacctcccggggggagccggtgcagatggtctacggcttcgcccggagcctcctcaaggccttgaaggaggacgggcaggcggtggtcgtggtctttgacgccaaggccccctccttccgccacgaggcctacgaggcctacaaggcgggccgggcccccaccccggaggacttcccccgccagctcgccttggtcaagcggctggtggaccttctgggcctggtccgcctcgaggccccgggttacgaggcggacgacgtcctgggcaccctggccaagaaggccgaaagggaggggatggaggtgcgcatcctcacgggagaccgggacttcttccagctcctctccgagaaggtctcggtcctcctgccggacgggaccctggtcaccccaaaggacgtccaggagaagtacggggtgccgccggagcgctgggtggacttccgcgccctcacgggggaccgctcggacaacatccccggggtggcggggataggggagaagaccgcccttcgactcctcgcggagtgggggagcgtggagaacctcctgaagaacctggaccgggtgaagccggactcggtccggcgcaagatagaggcgcaccttgaggacctccgcctctccttggacctggcccgcatccgcaccgacctccccttggaggtggactttaaggccctgcgccgcaggacccccgacctggagggcctgagggcctttttggaggagctggagttcggaagcctccttcatgagttcggcctcctgggaggggagaagccccgggaggaggccccctggcccccgcccgaaggggccttcgtaggcttcctcctctcccgcaaggagcccatgtgggcggagcttctggccctggcggccgccgcagagggccgggtccaccgggcaacaagcccggttgaggccctggccgacctcaaggaggcccgggggttcctggccaaggacctggccgttttggccctgcgggagggggtggccctggaccccacggacgaccccctcctggtggcctacctcctggacccggccaacaccaaccccgagggggtggcccggcgctacgggggcgagttcacggaggacgcagcggagagggccctcctctccgagaggctcttccagaacctctttccccggctttccgagaagctcctctggctctaccaggaggtggagcggcccctctcccgggtcttggcccacatggaggcccggggggtgaggctggacgtcccccttctggaggccctctcctttgagctggagaaggagatggagcgcctggagggggaggtcttccgcttggccggccaccccttcaacctcaactcccgcgaccagctggaaagggtcctctttgacgagctgggccttaccccggtgggtcggacggagaagacgggcaagcgctccaccgcccagggggccctggaggccctccggggggcccaccccatcgtggagctcatcctccagtaccgggtcctttccaagctcaaaagcacctacctggaccccctgccccggctcgtccacccgcggacgggccggcttcacacccgcttcaaccagacggccacggccacgggaaggctttccagctccgaccccaacctgcagaacatccccgtgcgcacccccttggggcagcgcatccgcaaggccttcgtggccgaggaggggtggctccttttggcggcggactactcccagatcgagcttcgggtcctggcccacctctcgggggacgagaacctgaagcgggtcttccgggaggggaaggacatccataccgaaaccgccgcctggatgttcggcttagaccccgctctagtggatccaaagatgcgccgggcggccaagacggtcaacttcggcgtcctctacgggatgtccgcccacaggctctcccaggagctcggcatagactacaaggaggcggaggcctttattgagcgctacttccagagcttccccaaggtgcgggcctggatagaaaggaccctggaggagggccggacgcggggctacgtggagaccctgttcggcaggaggcgctatgtgcccgacctggcctcccgggtccgctcggtgcgggaggcggcggagcggatggccttcaacatgcccgtgcagggcaccgccgccgacctgatgaagatcgccatggtcaagctcttccccaggctaaagcccctgggggcccacctcctcctccaggtgcacgacgagctggtcctggaggtgcccgaggaccgggccgaggaggccaaggccctggtcaaggaggtcatggagaacacctaccccttggacgtgcccctcgaggtggaggtgggcgtgggtcgggactggctggaggcgaagggggattgaagcggtcgac

SEQ ID NO: 3098 - DNA, 2605 bp, Artificial Sequence
  Description of Artificial Sequence: Synthetic DNA sequence of Thermus Rt41A DNA Polymerase E568D
atgaaatacctgctgccgaccgctgctgctggtctgctgctcctcgctgcccagccggcgatggccatggatatcggaattaattcggatccgaattccccactttttgacctggaggaaccccccaagcgggtgcttctggtggacggccaccacctggcctaccgcaccttctacgccctgagcctcaccacctcccggggggagccggtgcagatggtctacggcttcgcccggagcctcctcaaggccttgaaggaggacgggcaggcggtggtcgtggtctttgacgccaaggccccctccttccgccacgaggcctacgaggcctacaaggcgggccgggcccccaccccggaggacttcccccgccagctcgccttggtcaagcggctggtggaccttctgggcctggtccgcctcgaggccccgggttacgaggcggacgacgtcctgggcaccctggccaagaaggccgaaagggaggggatggaggtgcgcatcctcacgggagaccgggacttcttccagctcctctccgagaaggtctcggtcctcctgccggacgggaccctggtcaccccaaaggacgtccaggagaagtacggggtgccgccggagcgctgggtggacttccgcgccctcacgggggaccgctcggacaacatccccggggtggcggggataggggagaagaccgcccttcgactcctcgcggagtgggggagcgtggagaacctcctgaagaacctggaccgggtgaagccggactcggtccggcgcaagatagaggcgcaccttgaggacctccgcctctccttggacctggcccgcatccgcaccgacctccccttggaggtggactttaaggccctgcgccgcaggacccccgacctggagggcctgagggcctttttggaggagctggagttcggaagcctccttcatgagttcggcctcctgggaggggagaagccccgggaggaggccccctggcccccgcccgaaggggccttcgtaggcttcctcctctcccgcaaggagcccatgtgggcggagcttctggccctggcggccgccgcagagggccgggtccaccgggcaacaagcccggttgaggccctggccgacctcaaggaggcccgggggttcctggccaaggacctggccgttttggccctgcgggagggggtggccctggaccccacggacgaccccctcctggtggcctacctcctggacccggccaacaccaaccccgagggggtggcccggcgctacgggggcgagttcacggaggacgcagcggagagggccctcctctccgagaggctcttccagaacctctttccccggctttccgagaagctcctctggctctaccaggaggtggagcggcccctctcccgggtcttggcccacatggaggcccggggggtgaggctggacgtcccccttctggaggccctctcctttgagctggagaaggagatggagcgcctggagggggaggtcttccgcttggccggccaccccttcaacctcaactcccgcgaccagctggaaagggtcctctttgacgagctgggccttaccccggtgggtcggacggagaagacgggcaagcgctccaccgcccagggggccctggaggccctccggggggcccaccccatcgtggagctcatcctccagtaccgggatctttccaagctcaaaagcacctacctggaccccctgccccggctcgtccacccgcggacgggccggcttcacacccgcttcaaccagacggccacggccacgggaaggctttccagctccgaccccaacctgcagaacatccccgtgcgcacccccttggggcagcgcatccgcaaggccttcgtggccgaggaggggtggctccttttggcggcggactactcccagatcgagcttcgggtcctggcccacctctcgggggacgagaacctgaagcgggtcttccgggaggggaaggacatccataccgaaaccgccgcctggatgttcggcttagaccccgctctagtggatccaaagatgcgccgggcggccaagacggtcaacttcggcgtcctctacgggatgtccgcccacaggctctcccaggagctcggcatagactacaaggaggcggaggcctttattgagcgctacttccagagcttccccaaggtgcgggcctggatagaaaggaccctggaggagggccggacgcggggctacgtggagaccctgttcggcaggaggcgctatgtgcccgacctggcctcccgggtccgctcggtgcgggaggcggcggagcggatggccttcaacatgcccgtgcagggcaccgccgccgacctgatgaagatcgccatggtcaagctcttccccaggctaaagcccctgggggcccacctcctcctccaggtgcacgacgagctggtcctggaggtgcccgaggaccgggccgaggaggccaaggccctggtcaaggaggtcatggagaacacctaccccttggacgtgcccctcgaggtggaggtgggcgtgggtcgggactggctggaggcgaagggggattgaagcggtcgac

SEQ ID NO: 3099 - DNA, 2605 bp, Artificial Sequence
  Description of Artificial Sequence: Synthetic DNA sequence of Thermus Rt41A DNA Polymerase E568F
atgaaatacctgctgccgaccgctgctgctggtctgctgctcctcgctgcccagccggcgatggccatggatatcggaattaattcggatccgaattccccactttttgacctggaggaaccccccaagcgggtgcttctggtggacggccaccacctggcctaccgcaccttctacgccctgagcctcaccacctcccggggggagccggtgcagatggtctacggcttcgcccggagcctcctcaaggccttgaaggaggacgggcaggcggtggtcgtggtctttgacgccaaggccccctccttccgccacgaggcctacgaggcctacaaggcgggccgggcccccaccccggaggacttcccccgccagctcgccttggtcaagcggctggtggaccttctgggcctggtccgcctcgaggccccgggttacgaggcggacgacgtcctgggcaccctggccaagaaggccgaaagggaggggatggaggtgcgcatcctcacgggagaccgggacttcttccagctcctctccgagaaggtctcggtcctcctgccggacgggaccctggtcaccccaaaggacgtccaggagaagtacggggtgccgccggagcgctgggtggacttccgcgccctcacgggggaccgctcggacaacatccccggggtggcggggataggggagaagaccgcccttcgactcctcgcggagtgggggagcgtggagaacctcctgaagaacctggaccgggtgaagccggactcggtccggcgcaagatagaggcgcaccttgaggacctccgcctctccttggacctggcccgcatccgcaccgacctccccttggaggtggactttaaggccctgcgccgcaggacccccgacctggagggcctgagggcctttttggaggagctggagttcggaagcctccttcatgagttcggcctcctgggaggggagaagccccgggaggaggccccctggcccccgcccgaaggggccttcgtaggcttcctcctctcccgcaaggagcccatgtgggcggagcttctggccctggcggccgccgcagagggccgggtccaccgggcaacaagcccggttgaggccctggccgacctcaaggaggcccgggggttcctggccaaggacctggccgttttggccctgcgggagggggtggccctggaccccacggacgaccccctcctggtggcctacctcctggacccggccaacaccaaccccgagggggtggcccggcgctacgggggcgagttcacggaggacgcagcggagagggccctcctctccgagaggctcttccagaacctctttccccggctttccgagaagctcctctggctctaccaggaggtggagcggcccctctcccgggtcttggcccacatggaggcccggggggtgaggctggacgtcccccttctggaggccctctcctttgagctggagaaggagatggagcgcctggagggggaggtcttccgcttggccggccaccccttcaacctcaactcccgcgaccagctggaaagggtcctctttgacgagctgggccttaccccggtgggtcggacggagaagacgggcaagcgctccaccgcccagggggccctggaggccctccggggggcccaccccatcgtggagctcatcctccagtaccggtttctttccaagctcaaaagcacctacctggaccccctgccccggctcgtccacccgcggacgggccggcttcacacccgcttcaaccagacggccacggccacgggaaggctttccagctccgaccccaacctgcagaacatccccgtgcgcacccccttggggcagcgcatccgcaaggccttcgtggccgaggaggggtggctccttttggcggcggactactcccagatcgagcttcgggtcctggcccacctctcgggggacgagaacctgaagcgggtcttccgggaggggaaggacatccataccgaaaccgccgcctggatgttcggcttagaccccgctctagtggatccaaagatgcgccgggcggccaagacggtcaacttcggcgtcctctacgggatgtccgcccacaggctctcccaggagctcggcatagactacaaggaggcggaggcctttattgagcgctacttccagagcttccccaaggtgcgggcctggatagaaaggaccctggaggagggccggacgcggggctacgtggagaccctgttcggcaggaggcgctatgtgcccgacctggcctcccgggtccgctcggtgcgggaggcggcggagcggatggccttcaacatgcccgtgcagggcaccgccgccgacctgatgaagatcgccatggtcaagctcttccccaggctaaagcccctgggggcccacctcctcctccaggtgcacgacgagctggtcctggaggtgcccgaggaccgggccgaggaggccaaggccctggtcaaggaggtcatggagaacacctaccccttggacgtgcccctcgaggtggaggtgggcgtgggtcgggactggctggaggcgaagggggattgaagcggtcgac

SEQ ID NO: 3100 - DNA, 2605 bp, Artificial Sequence
  Description of Artificial Sequence: Synthetic DNA sequence of Thermus Rt41A DNA Polymerase E568S
atgaaatacctgctgccgaccgctgctgctggtctgctgctcctcgctgcccagccggcgatggccatggatatcggaattaattcggatccgaattccccactttttgacctggaggaaccccccaagcgggtgcttctggtggacggccaccacctggcctaccgcaccttctacgccctgagcctcaccacctcccggggggagccggtgcagatggtctacggcttcgcccggagcctcctcaaggccttgaaggaggacgggcaggcggtggtcgtggtctttgacgccaaggccccctccttccgccacgaggcctacgaggcctacaaggcgggccgggcccccaccccggaggacttcccccgccagctcgccttggtcaagcggctggtggaccttctgggcctggtccgcctcgaggccccgggttacgaggcggacgacgtcctgggcaccctggccaagaaggccgaaagggaggggatggaggtgcgcatcctcacgggagaccgggacttcttccagctcctctccgagaaggtctcggtcctcctgccggacgggaccctggtcaccccaaaggacgtccaggagaagtacggggtgccgccggagcgctgggtggacttccgcgccctcacgggggaccgctcggacaacatccccggggtggcggggataggggagaagaccgcccttcgactcctcgcggagtgggggagcgtggagaacctcctgaagaacctggaccgggtgaagccggactcggtccggcgcaagatagaggcgcaccttgaggacctccgcctctccttggacctggcccgcatccgcaccgacctccccttggaggtggactttaaggccctgcgccgcaggacccccgacctggagggcctgagggcctttttggaggagctggagttcggaagcctccttcatgagttcggcctcctgggaggggagaagccccgggaggaggccccctggcccccgcccgaaggggccttcgtaggcttcctcctctcccgcaaggagcccatgtgggcggagcttctggccctggcggccgccgcagagggccgggtccaccgggcaacaagcccggttgaggccctggccgacctcaaggaggcccgggggttcctggccaaggacctggccgttttggccctgcgggagggggtggccctggaccccacggacgaccccctcctggtggcctacctcctggacccggccaacaccaaccccgagggggtggcccggcgctacgggggcgagttcacggaggacgcagcggagagggccctcctctccgagaggctcttccagaacctctttccccggctttccgagaagctcctctggctctaccaggaggtggagcggcccctctcccgggtcttggcccacatggaggcccggggggtgaggctggacgtcccccttctggaggccctctcctttgagctggagaaggagatggagcgcctggagggggaggtcttccgcttggccggccaccccttcaacctcaactcccgcgaccagctggaaagggtcctctttgacgagctgggccttaccccggtgggtcggacggagaagacgggcaagcgctccaccgcccagggggccctggaggccctccggggggcccaccccatcgtggagctcatcctccagtaccggtctctttccaagctcaaaagcacctacctggaccccctgccccggctcgtccacccgcggacgggccggcttcacacccgcttcaaccagacggccacggccacgggaaggctttccagctccgaccccaacctgcagaacatccccgtgcgcacccccttggggcagcgcatccgcaaggccttcgtggccgaggaggggtggctccttttggcggcggactactcccagatcgagcttcgggtcctggcccacctctcgggggacgagaacctgaagcgggtcttccgggaggggaaggacatccataccgaaaccgccgcctggatgttcggcttagaccccgctctagtggatccaaagatgcgccgggcggccaagacggtcaacttcggcgtcctctacgggatgtccgcccacaggctctcccaggagctcggcatagactacaaggaggcggaggcctttattgagcgctacttccagagcttccccaaggtgcgggcctggatagaaaggaccctggaggagggccggacgcggggctacgtggagaccctgttcggcaggaggcgctatgtgcccgacctggcctcccgggtccgctcggtgcgggaggcggcggagcggatggccttcaacatgcccgtgcagggcaccgccgccgacctgatgaagatcgccatggtcaagctcttccccaggctaaagcccctgggggcccacctcctcctccaggtgcacgacgagctggtcctggaggtgcccgaggaccgggccgaggaggccaaggccctggtcaaggaggtcatggagaacacctaccccttggacgtgcccctcgaggtggaggtgggcgtgggtcgggactggctggaggcgaagggggattgaagcggtcgac

SEQ ID NO: 3101 - DNA, 2605 bp, Artificial Sequence
  Description of Artificial Sequence: Synthetic DNA sequence of Thermus Rt41A DNA Polymerase E568Y
atgaaatacctgctgccgaccgctgctgctggtctgctgctcctcgctgcccagccggcgatggccatggatatcggaattaattcggatccgaattccccactttttgacctggaggaaccccccaagcgggtgcttctggtggacggccaccacctggcctaccgcaccttctacgccctgagcctcaccacctcccggggggagccggtgcagatggtctacggcttcgcccggagcctcctcaaggccttgaaggaggacgggcaggcggtggtcgtggtctttgacgccaaggccccctccttccgccacgaggcctacgaggcctacaaggcgggccgggcccccaccccggaggacttcccccgccagctcgccttggtcaagcggctggtggaccttctgggcctggtccgcctcgaggccccgggttacgaggcggacgacgtcctgggcaccctggccaagaaggccgaaagggaggggatggaggtgcgcatcctcacgggagaccgggacttcttccagctcctctccgagaaggtctcggtcctcctgccggacgggaccctggtcaccccaaaggacgtccaggagaagtacggggtgccgccggagcgctgggtggacttccgcgccctcacgggggaccgctcggacaacatccccggggtggcggggataggggagaagaccgcccttcgactcctcgcggagtgggggagcgtggagaacctcctgaagaacctggaccgggtgaagccggactcggtccggcgcaagatagaggcgcaccttgaggacctccgcctctccttggacctggcccgcatccgcaccgacctccccttggaggtggactttaaggccctgcgccgcaggacccccgacctggagggcctgagggcctttttggaggagctggagttcggaagcctccttcatgagttcggcctcctgggaggggagaagccccgggaggaggccccctggcccccgcccgaaggggccttcgtaggcttcctcctctcccgcaaggagcccatgtgggcggagcttctggccctggcggccgccgcagagggccgggtccaccgggcaacaagcccggttgaggccctggccgacctcaaggaggcccgggggttcctggccaaggacctggccgttttggccctgcgggagggggtggccctggaccccacggacgaccccctcctggtggcctacctcctggacccggccaacaccaaccccgagggggtggcccggcgctacgggggcgagttcacggaggacgcagcggagagggccctcctctccgagaggctcttccagaacctctttccccggctttccgagaagctcctctggctctaccaggaggtggagcggcccctctcccgggtcttggcccacatggaggcccggggggtgaggctggacgtcccccttctggaggccctctcctttgagctggagaaggagatggagcgcctggagggggaggtcttccgcttggccggccaccccttcaacctcaactcccgcgaccagctggaaagggtcctctttgacgagctgggccttaccccggtgggtcggacggagaagacgggcaagcgctccaccgcccagggggccctggaggccctccggggggcccaccccatcgtggagctcatcctccagtaccggtatctttccaagctcaaaagcacctacctggaccccctgccccggctcgtccacccgcggacgggccggcttcacacccgcttcaaccagacggccacggccacgggaaggctttccagctccgaccccaacctgcagaacatccccgtgcgcacccccttggggcagcgcatccgcaaggccttcgtggccgaggaggggtggctccttttggcggcggactactcccagatcgagcttcgggtcctggcccacctctcgggggacgagaacctgaagcgggtcttccgggaggggaaggacatccataccgaaaccgccgcctggatgttcggcttagaccccgctctagtggatccaaagatgcgccgggcggccaagacggtcaacttcggcgtcctctacgggatgtccgcccacaggctctcccaggagctcggcatagactacaaggaggcggaggcctttattgagcgctacttccagagcttccccaaggtgcgggcctggatagaaaggaccctggaggagggccggacgcggggctacgtggagaccctgttcggcaggaggcgctatgtgcccgacctggcctcccgggtccgctcggtgcgggaggcggcggagcggatggccttcaacatgcccgtgcagggcaccgccgccgacctgatgaagatcgccatggtcaagctcttccccaggctaaagcccctgggggcccacctcctcctccaggtgcacgacgagctggtcctggaggtgcccgaggaccgggccgaggaggccaaggccctggtcaaggaggtcatggagaacacctaccccttggacgtgcccctcgaggtggaggtgggcgtgggtcgggactggctggaggcgaagggggattgaagcggtcgac

SEQ ID NO: 3102 - DNA, 2605 bp, Artificial Sequence
  Description of Artificial Sequence: Synthetic DNA sequence of Thermus Rt41A DNA Polymerase E568W
atgaaatacctgctgccgaccgctgctgctggtctgctgctcctcgctgcccagccggcgatggccatggatatcggaattaattcggatccgaattccccactttttgacctggaggaaccccccaagcgggtgcttctggtggacggccaccacctggcctaccgcaccttctacgccctgagcctcaccacctcccggggggagccggtgcagatggtctacggcttcgcccggagcctcctcaaggccttgaaggaggacgggcaggcggtggtcgtggtctttgacgccaaggccccctccttccgccacgaggcctacgaggcctacaaggcgggccgggcccccaccccggaggacttcccccgccagctcgccttggtcaagcggctggtggaccttctgggcctggtccgcctcgaggccccgggttacgaggcggacgacgtcctgggcaccctggccaagaaggccgaaagggaggggatggaggtgcgcatcctcacgggagaccgggacttcttccagctcctctccgagaaggtctcggtcctcctgccggacgggaccctggtcaccccaaaggacgtccaggagaagtacggggtgccgccggagcgctgggtggacttccgcgccctcacgggggaccgctcggacaacatccccggggtggcggggataggggagaagaccgcccttcgactcctcgcggagtgggggagcgtggagaacctcctgaagaacctggaccgggtgaagccggactcggtccggcgcaagatagaggcgcaccttgaggacctccgcctctccttggacctggcccgcatccgcaccgacctccccttggaggtggactttaaggccctgcgccgcaggacccccgacctggagggcctgagggcctttttggaggagctggagttcggaagcctccttcatgagttcggcctcctgggaggggagaagccccgggaggaggccccctggcccccgcccgaaggggccttcgtaggcttcctcctctcccgcaaggagcccatgtgggcggagcttctggccctggcggccgccgcagagggccgggtccaccgggcaacaagcccggttgaggccctggccgacctcaaggaggcccgggggttcctggccaaggacctggccgttttggccctgcgggagggggtggccctggaccccacggacgaccccctcctggtggcctacctcctggacccggccaacaccaaccccgagggggtggcccggcgctacgggggcgagttcacggaggacgcagcggagagggccctcctctccgagaggctcttccagaacctctttccccggctttccgagaagctcctctggctctaccaggaggtggagcggcccctctcccgggtcttggcccacatggaggcccggggggtgaggctggacgtcccccttctggaggccctctcctttgagctggagaaggagatggagcgcctggagggggaggtcttccgcttggccggccaccccttcaacctcaactcccgcgaccagctggaaagggtcctctttgacgagctgggccttaccccggtgggtcggacggagaagacgggcaagcgctccaccgcccagggggccctggaggccctccggggggcccaccccatcgtggagctcatcctccagtaccggtggctttccaagctcaaaagcacctacctggaccccctgccccggctcgtccacccgcggacgggccggcttcacacccgcttcaaccagacggccacggccacgggaaggctttccagctccgaccccaacctgcagaacatccccgtgcgcacccccttggggcagcgcatccgcaaggccttcgtggccgaggaggggtggctccttttggcggcggactactcccagatcgagcttcgggtcctggcccacctctcgggggacgagaacctgaagcgggtcttccgggaggggaaggacatccataccgaaaccgccgcctggatgttcggcttagaccccgctctagtggatccaaagatgcgccgggcggccaagacggtcaacttcggcgtcctctacgggatgtccgcccacaggctctcccaggagctcggcatagactacaaggaggcggaggcctttattgagcgctacttccagagcttccccaaggtgcgggcctggatagaaaggaccctggaggagggccggacgcggggctacgtggagaccctgttcggcaggaggcgctatgtgcccgacctggcctcccgggtccgctcggtgcgggaggcggcggagcggatggccttcaacatgcccgtgcagggcaccgccgccgacctgatgaagatcgccatggtcaagctcttccccaggctaaagcccctgggggcccacctcctcctccaggtgcacgacgagctggtcctggaggtgcccgaggaccgggccgaggaggccaaggccctggtcaaggaggtcatggagaacacctaccccttggacgtgcccctcgaggtggaggtgggcgtgggtcgggactggctggaggcgaagggggattgaagcggtcgac

SEQ ID NO: 3103 - DNA, 2605 bp, Artificial Sequence
  Description of Artificial Sequence: Synthetic DNA sequence of Thermus Rt41A DNA Polymerase E568P
atgaaatacctgctgccgaccgctgctgctggtctgctgctcctcgctgcccagccggcgatggccatggatatcggaattaattcggatccgaattccccactttttgacctggaggaaccccccaagcgggtgcttctggtggacggccaccacctggcctaccgcaccttctacgccctgagcctcaccacctcccggggggagccggtgcagatggtctacggcttcgcccggagcctcctcaaggccttgaaggaggacgggcaggcggtggtcgtggtctttgacgccaaggccccctccttccgccacgaggcctacgaggcctacaaggcgggccgggcccccaccccggaggacttcccccgccagctcgccttggtcaagcggctggtggaccttctgggcctggtccgcctcgaggccccgggttacgaggcggacgacgtcctgggcaccctggccaagaaggccgaaagggaggggatggaggtgcgcatcctcacgggagaccgggacttcttccagctcctctccgagaaggtctcggtcctcctgccggacgggaccctggtcaccccaaaggacgtccaggagaagtacggggtgccgccggagcgctgggtggacttccgcgccctcacgggggaccgctcggacaacatccccggggtggcggggataggggagaagaccgcccttcgactcctcgcggagtgggggagcgtggagaacctcctgaagaacctggaccgggtgaagccggactcggtccggcgcaagatagaggcgcaccttgaggacctccgcctctccttggacctggcccgcatccgcaccgacctccccttggaggtggactttaaggccctgcgccgcaggacccccgacctggagggcctgagggcctttttggaggagctggagttcggaagcctccttcatgagttcggcctcctgggaggggagaagccccgggaggaggccccctggcccccgcccgaaggggccttcgtaggcttcctcctctcccgcaaggagcccatgtgggcggagcttctggccctggcggccgccgcagagggccgggtccaccgggcaacaagcccggttgaggccctggccgacctcaaggaggcccgggggttcctggccaaggacctggccgttttggccctgcgggagggggtggccctggaccccacggacgaccccctcctggtggcctacctcctggacccggccaacaccaaccccgagggggtggcccggcgctacgggggcgagttcacggaggacgcagcggagagggccctcctctccgagaggctcttccagaacctctttccccggctttccgagaagctcctctggctctaccaggaggtggagcggcccctctcccgggtcttggcccacatggaggcccggggggtgaggctggacgtcccccttctggaggccctctcctttgagctggagaaggagatggagcgcctggagggggaggtcttccgcttggccggccaccccttcaacctcaactcccgcgaccagctggaaagggtcctctttgacgagctgggccttaccccggtgggtcggacggagaagacgggcaagcgctccaccgcccagggggccctggaggccctccggggggcccaccccatcgtggagctcatcctccagtaccggcctctttccaagctcaaaagcacctacctggaccccctgccccggctcgtccacccgcggacgggccggcttcacacccgcttcaaccagacggccacggccacgggaaggctttccagctccgaccccaacctgcagaacatccccgtgcgcacccccttggggcagcgcatccgcaaggccttcgtggccgaggaggggtggctccttttggcggcggactactcccagatcgagcttcgggtcctggcccacctctcgggggacgagaacctgaagcgggtcttccgggaggggaaggacatccataccgaaaccgccgcctggatgttcggcttagaccccgctctagtggatccaaagatgcgccgggcggccaagacggtcaacttcggcgtcctctacgggatgtccgcccacaggctctcccaggagctcggcatagactacaaggaggcggaggcctttattgagcgctacttccagagcttccccaaggtgcgggcctggatagaaaggaccctggaggagggccggacgcggggctacgtggagaccctgttcggcaggaggcgctatgtgcccgacctggcctcccgggtccgctcggtgcgggaggcggcggagcggatggccttcaacatgcccgtgcagggcaccgccgccgacctgatgaagatcgccatggtcaagctcttccccaggctaaagcccctgggggcccacctcctcctccaggtgcacgacgagctggtcctggaggtgcccgaggaccgggccgaggaggccaaggccctggtcaaggaggtcatggagaacacctaccccttggacgtgcccctcgaggtggaggtgggcgtgggtcgggactggctggaggcgaagggggattgaagcggtcgac

SEQ ID NO: 3104 - DNA, 2605 bp, Artificial Sequence
  Description of Artificial Sequence: Synthetic DNA sequence of Thermus Rt41A DNA Polymerase E568M
atgaaatacctgctgccgaccgctgctgctggtctgctgctcctcgctgcccagccggcgatggccatggatatcggaattaattcggatccgaattccccactttttgacctggaggaaccccccaagcgggtgcttctggtggacggccaccacctggcctaccgcaccttctacgccctgagcctcaccacctcccggggggagccggtgcagatggtctacggcttcgcccggagcctcctcaaggccttgaaggaggacgggcaggcggtggtcgtggtctttgacgccaaggccccctccttccgccacgaggcctacgaggcctacaaggcgggccgggcccccaccccggaggacttcccccgccagctcgccttggtcaagcggctggtggaccttctgggcctggtccgcctcgaggccccgggttacgaggcggacgacgtcctgggcaccctggccaagaaggccgaaagggaggggatggaggtgcgcatcctcacgggagaccgggacttcttccagctcctctccgagaaggtctcggtcctcctgccggacgggaccctggtcaccccaaaggacgtccaggagaagtacggggtgccgccggagcgctgggtggacttccgcgccctcacgggggaccgctcggacaacatccccggggtggcggggataggggagaagaccgcccttcgactcctcgcggagtgggggagcgtggagaacctcctgaagaacctggaccgggtgaagccggactcggtccggcgcaagatagaggcgcaccttgaggacctccgcctctccttggacctggcccgcatccgcaccgacctccccttggaggtggactttaaggccctgcgccgcaggacccccgacctggagggcctgagggcctttttggaggagctggagttcggaagcctccttcatgagttcggcctcctgggaggggagaagccccgggaggaggccccctggcccccgcccgaaggggccttcgtaggcttcctcctctcccgcaaggagcccatgtgggcggagcttctggccctggcggccgccgcagagggccgggtccaccgggcaacaagcccggttgaggccctggccgacctcaaggaggcccgggggttcctggccaaggacctggccgttttggccctgcgggagggggtggccctggaccccacggacgaccccctcctggtggcctacctcctggacccggccaacaccaaccccgagggggtggcccggcgctacgggggcgagttcacggaggacgcagcggagagggccctcctctccgagaggctcttccagaacctctttccccggctttccgagaagctcctctggctctaccaggaggtggagcggcccctctcccgggtcttggcccacatggaggcccggggggtgaggctggacgtcccccttctggaggccctctcctttgagctggagaaggagatggagcgcctggagggggaggtcttccgcttggccggccaccccttcaacctcaactcccgcgaccagctggaaagggtcctctttgacgagctgggccttaccccggtgggtcggacggagaagacgggcaagcgctccaccgcccagggggccctggaggccctccggggggcccaccccatcgtggagctcatcctccagtaccggatgctttccaagctcaaaagcacctacctggaccccctgccccggctcgtccacccgcggacgggccggcttcacacccgcttcaaccagacggccacggccacgggaaggctttccagctccgaccccaacctgcagaacatccccgtgcgcacccccttggggcagcgcatccgcaaggccttcgtggccgaggaggggtggctccttttggcggcggactactcccagatcgagcttcgggtcctggcccacctctcgggggacgagaacctgaagcgggtcttccgggaggggaaggacatccataccgaaaccgccgcctggatgttcggcttagaccccgctctagtggatccaaagatgcgccgggcggccaagacggtcaacttcggcgtcctctacgggatgtccgcccacaggctctcccaggagctcggcatagactacaaggaggcggaggcctttattgagcgctacttccagagcttccccaaggtgcgggcctggatagaaaggaccctggaggagggccggacgcggggctacgtggagaccctgttcggcaggaggcgctatgtgcccgacctggcctcccgggtccgctcggtgcgggaggcggcggagcggatggccttcaacatgcccgtgcagggcaccgccgccgacctgatgaagatcgccatggtcaagctcttccccaggctaaagcccctgggggcccacctcctcctccaggtgcacgacgagctggtcctggaggtgcccgaggaccgggccgaggaggccaaggccctggtcaaggaggtcatggagaacacctaccccttggacgtgcccctcgaggtggaggtgggcgtgggtcgggactggctggaggcgaagggggattgaagcggtcgac

SEQ ID NO: 3105 - DNA, 2605 bp, Artificial Sequence
  Description of Artificial Sequence: Synthetic DNA sequence of Thermus Rt41A DNA Polymerase E568T
atgaaatacctgctgccgaccgctgctgctggtctgctgctcctcgctgcccagccggcgatggccatggatatcggaattaattcggatccgaattccccactttttgacctggaggaaccccccaagcgggtgcttctggtggacggccaccacctggcctaccgcaccttctacgccctgagcctcaccacctcccggggggagccggtgcagatggtctacggcttcgcccggagcctcctcaaggccttgaaggaggacgggcaggcggtggtcgtggtctttgacgccaaggccccctccttccgccacgaggcctacgaggcctacaaggcgggccgggcccccaccccggaggacttcccccgccagctcgccttggtcaagcggctggtggaccttctgggcctggtccgcctcgaggccccgggttacgaggcggacgacgtcctgggcaccctggccaagaaggccgaaagggaggggatggaggtgcgcatcctcacgggagaccgggacttcttccagctcctctccgagaaggtctcggtcctcctgccggacgggaccctggtcaccccaaaggacgtccaggagaagtacggggtgccgccggagcgctgggtggacttccgcgccctcacgggggaccgctcggacaacatccccggggtggcggggataggggagaagaccgcccttcgactcctcgcggagtgggggagcgtggagaacctcctgaagaacctggaccgggtgaagccggactcggtccggcgcaagatagaggcgcaccttgaggacctccgcctctccttggacctggcccgcatccgcaccgacctccccttggaggtggactttaaggccctgcgccgcaggacccccgacctggagggcctgagggcctttttggaggagctggagttcggaagcctccttcatgagttcggcctcctgggaggggagaagccccgggaggaggccccctggcccccgcccgaaggggccttcgtaggcttcctcctctcccgcaaggagcccatgtgggcggagcttctggccctggcggccgccgcagagggccgggtccaccgggcaacaagcccggttgaggccctggccgacctcaaggaggcccgggggttcctggccaaggacctggccgttttggccctgcgggagggggtggccctggaccccacggacgaccccctcctggtggcctacctcctggacccggccaacaccaaccccgagggggtggcccggcgctacgggggcgagttcacggaggacgcagcggagagggccctcctctccgagaggctcttccagaacctctttccccggctttccgagaagctcctctggctctaccaggaggtggagcggcccctctcccgggtcttggcccacatggaggcccggggggtgaggctggacgtcccccttctggaggccctctcctttgagctggagaaggagatggagcgcctggagggggaggtcttccgcttggccggccaccccttcaacctcaactcccgcgaccagctggaaagggtcctctttgacgagctgggccttaccccggtgggtcggacggagaagacgggcaagcgctccaccgcccagggggccctggaggccctccggggggcccaccccatcgtggagctcatcctccagtaccggactctttccaagctcaaaagcacctacctggaccccctgccccggctcgtccacccgcggacgggccggcttcacacccgcttcaaccagacggccacggccacgggaaggctttccagctccgaccccaacctgcagaacatccccgtgcgcacccccttggggcagcgcatccgcaaggccttcgtggccgaggaggggtggctccttttggcggcggactactcccagatcgagcttcgggtcctggcccacctctcgggggacgagaacctgaagcgggtcttccgggaggggaaggacatccataccgaaaccgccgcctggatgttcggcttagaccccgctctagtggatccaaagatgcgccgggcggccaagacggtcaacttcggcgtcctctacgggatgtccgcccacaggctctcccaggagctcggcatagactacaaggaggcggaggcctttattgagcgctacttccagagcttccccaaggtgcgggcctggatagaaaggaccctggaggagggccggacgcggggctacgtggagaccctgttcggcaggaggcgctatgtgcccgacctggcctcccgggtccgctcggtgcgggaggcggcggagcggatggccttcaacatgcccgtgcagggcaccgccgccgacctgatgaagatcgccatggtcaagctcttccccaggctaaagcccctgggggcccacctcctcctccaggtgcacgacgagctggtcctggaggtgcccgaggaccgggccgaggaggccaaggccctggtcaaggaggtcatggagaacacctaccccttggacgtgcccctcgaggtggaggtgggcgtgggtcgggactggctggaggcgaagggggattgaagcggtcgac

SEQ ID NO: 3106 - DNA, 2605 bp, Artificial Sequence
  Description of Artificial Sequence: Synthetic DNA sequence of Thermus Rt41A DNA Polymerase E568N
atgaaatacctgctgccgaccgctgctgctggtctgctgctcctcgctgcccagccggcgatggccatggatatcggaattaattcggatccgaattccccactttttgacctggaggaaccccccaagcgggtgcttctggtggacggccaccacctggcctaccgcaccttctacgccctgagcctcaccacctcccggggggagccggtgcagatggtctacggcttcgcccggagcctcctcaaggccttgaaggaggacgggcaggcggtggtcgtggtctttgacgccaaggccccctccttccgccacgaggcctacgaggcctacaaggcgggccgggcccccaccccggaggacttcccccgccagctcgccttggtcaagcggctggtggaccttctgggcctggtccgcctcgaggccccgggttacgaggcggacgacgtcctgggcaccctggccaagaaggccgaaagggaggggatggaggtgcgcatcctcacgggagaccgggacttcttccagctcctctccgagaaggtctcggtcctcctgccggacgggaccctggtcaccccaaaggacgtccaggagaagtacggggtgccgccggagcgctgggtggacttccgcgccctcacgggggaccgctcggacaacatccccggggtggcggggataggggagaagaccgcccttcgactcctcgcggagtgggggagcgtggagaacctcctgaagaacctggaccgggtgaagccggactcggtccggcgcaagatagaggcgcaccttgaggacctccgcctctccttggacctggcccgcatccgcaccgacctccccttggaggtggactttaaggccctgcgccgcaggacccccgacctggagggcctgagggcctttttggaggagctggagttcggaagcctccttcatgagttcggcctcctgggaggggagaagccccgggaggaggccccctggcccccgcccgaaggggccttcgtaggcttcctcctctcccgcaaggagcccatgtgggcggagcttctggccctggcggccgccgcagagggccgggtccaccgggcaacaagcccggttgaggccctggccgacctcaaggaggcccgggggttcctggccaaggacctggccgttttggccctgcgggagggggtggccctggaccccacggacgaccccctcctggtggcctacctcctggacccggccaacaccaaccccgagggggtggcccggcgctacgggggcgagttcacggaggacgcagcggagagggccctcctctccgagaggctcttccagaacctctttccccggctttccgagaagctcctctggctctaccaggaggtggagcggcccctctcccgggtcttggcccacatggaggcccggggggtgaggctggacgtcccccttctggaggccctctcctttgagctggagaaggagatggagcgcctggagggggaggtcttccgcttggccggccaccccttcaacctcaactcccgcgaccagctggaaagggtcctctttgacgagctgggccttaccccggtgggtcggacggagaagacgggcaagcgctccaccgcccagggggccctggaggccctccggggggcccaccccatcgtggagctcatcctccagtaccggaatctttccaagctcaaaagcacctacctggaccccctgccccggctcgtccacccgcggacgggccggcttcacacccgcttcaaccagacggccacggccacgggaaggctttccagctccgaccccaacctgcagaacatccccgtgcgcacccccttggggcagcgcatccgcaaggccttcgtggccgaggaggggtggctccttttggcggcggactactcccagatcgagcttcgggtcctggcccacctctcgggggacgagaacctgaagcgggtcttccgggaggggaaggacatccataccgaaaccgccgcctggatgttcggcttagaccccgctctagtggatccaaagatgcgccgggcggccaagacggtcaacttcggcgtcctctacgggatgtccgcccacaggctctcccaggagctcggcatagactacaaggaggcggaggcctttattgagcgctacttccagagcttccccaaggtgcgggcctggatagaaaggaccctggaggagggccggacgcggggctacgtggagaccctgttcggcaggaggcgctatgtgcccgacctggcctcccgggtccgctcggtgcgggaggcggcggagcggatggccttcaacatgcccgtgcagggcaccgccgccgacctgatgaagatcgccatggtcaagctcttccccaggctaaagcccctgggggcccacctcctcctccaggtgcacgacgagctggtcctggaggtgcccgaggaccgggccgaggaggccaaggccctggtcaaggaggtcatggagaacacctaccccttggacgtgcccctcgaggtggaggtgggcgtgggtcgggactggctggaggcgaagggggattgaagcggtcgac

SEQ ID NO: 3107 - DNA, 2605 bp, Artificial Sequence
  Description of Artificial Sequence: Synthetic DNA sequence of Thermus Rt41A DNA Polymerase A599R
atgaaatacctgctgccgaccgctgctgctggtctgctgctcctcgctgcccagccggcgatggccatggatatcggaattaattcggatccgaattccccactttttgacctggaggaaccccccaagcgggtgcttctggtggacggccaccacctggcctaccgcaccttctacgccctgagcctcaccacctcccggggggagccggtgcagatggtctacggcttcgcccggagcctcctcaaggccttgaaggaggacgggcaggcggtggtcgtggtctttgacgccaaggccccctccttccgccacgaggcctacgaggcctacaaggcgggccgggcccccaccccggaggacttcccccgccagctcgccttggtcaagcggctggtggaccttctgggcctggtccgcctcgaggccccgggttacgaggcggacgacgtcctgggcaccctggccaagaaggccgaaagggaggggatggaggtgcgcatcctcacgggagaccgggacttcttccagctcctctccgagaaggtctcggtcctcctgccggacgggaccctggtcaccccaaaggacgtccaggagaagtacggggtgccgccggagcgctgggtggacttccgcgccctcacgggggaccgctcggacaacatccccggggtggcggggataggggagaagaccgcccttcgactcctcgcggagtgggggagcgtggagaacctcctgaagaacctggaccgggtgaagccggactcggtccggcgcaagatagaggcgcaccttgaggacctccgcctctccttggacctggcccgcatccgcaccgacctccccttggaggtggactttaaggccctgcgccgcaggacccccgacctggagggcctgagggcctttttggaggagctggagttcggaagcctccttcatgagttcggcctcctgggaggggagaagccccgggaggaggccccctggcccccgcccgaaggggccttcgtaggcttcctcctctcccgcaaggagcccatgtgggcggagcttctggccctggcggccgccgcagagggccgggtccaccgggcaacaagcccggttgaggccctggccgacctcaaggaggcccgggggttcctggccaaggacctggccgttttggccctgcgggagggggtggccctggaccccacggacgaccccctcctggtggcctacctcctggacccggccaacaccaaccccgagggggtggcccggcgctacgggggcgagttcacggaggacgcagcggagagggccctcctctccgagaggctcttccagaacctctttccccggctttccgagaagctcctctggctctaccaggaggtggagcggcccctctcccgggtcttggcccacatggaggcccggggggtgaggctggacgtcccccttctggaggccctctcctttgagctggagaaggagatggagcgcctggagggggaggtcttccgcttggccggccaccccttcaacctcaactcccgcgaccagctggaaagggtcctctttgacgagctgggccttaccccggtgggtcggacggagaagacgggcaagcgctccaccgcccagggggccctggaggccctccggggggcccaccccatcgtggagctcatcctccagtaccgggagctttccaagctcaaaagcacctacctggaccccctgccccggctcgtccacccgcggacgggccggcttcacacccgcttcaaccagacgcgaacggccacgggaaggctttccagctccgaccccaacctgcagaacatccccgtgcgcacccccttggggcagcgcatccgcaaggccttcgtggccgaggaggggtggctccttttggcggcggactactcccagatcgagcttcgggtcctggcccacctctcgggggacgagaacctgaagcgggtcttccgggaggggaaggacatccataccgaaaccgccgcctggatgttcggcttagaccccgctctagtggatccaaagatgcgccgggcggccaagacggtcaacttcggcgtcctctacgggatgtccgcccacaggctctcccaggagctcggcatagactacaaggaggcggaggcctttattgagcgctacttccagagcttccccaaggtgcgggcctggatagaaaggaccctggaggagggccggacgcggggctacgtggagaccctgttcggcaggaggcgctatgtgcccgacctggcctcccgggtccgctcggtgcgggaggcggcggagcggatggccttcaacatgcccgtgcagggcaccgccgccgacctgatgaagatcgccatggtcaagctcttccccaggctaaagcccctgggggcccacctcctcctccaggtgcacgacgagctggtcctggaggtgcccgaggaccgggccgaggaggccaaggccctggtcaaggaggtcatggagaacacctaccccttggacgtgcccctcgaggtggaggtgggcgtgggtcgggactggctggaggcgaagggggattgaagcggtcgac

SEQ ID NO: 3108 - DNA, 2605 bp, Artificial Sequence
  Description of Artificial Sequence: Synthetic DNA sequence of Thermus Rt41A DNA Polymerase A599C
atgaaatacctgctgccgaccgctgctgctggtctgctgctcctcgctgcccagccggcgatggccatggatatcggaattaattcggatccgaattccccactttttgacctggaggaaccccccaagcgggtgcttctggtggacggccaccacctggcctaccgcaccttctacgccctgagcctcaccacctcccggggggagccggtgcagatggtctacggcttcgcccggagcctcctcaaggccttgaaggaggacgggcaggcggtggtcgtggtctttgacgccaaggccccctccttccgccacgaggcctacgaggcctacaaggcgggccgggcccccaccccggaggacttcccccgccagctcgccttggtcaagcggctggtggaccttctgggcctggtccgcctcgaggccccgggttacgaggcggacgacgtcctgggcaccctggccaagaaggccgaaagggaggggatggaggtgcgcatcctcacgggagaccgggacttcttccagctcctctccgagaaggtctcggtcctcctgccggacgggaccctggtcaccccaaaggacgtccaggagaagtacggggtgccgccggagcgctgggtggacttccgcgccctcacgggggaccgctcggacaacatccccggggtggcggggataggggagaagaccgcccttcgactcctcgcggagtgggggagcgtggagaacctcctgaagaacctggaccgggtgaagccggactcggtccggcgcaagatagaggcgcaccttgaggacctccgcctctccttggacctggcccgcatccgcaccgacctccccttggaggtggactttaaggccctgcgccgcaggacccccgacctggagggcctgagggcctttttggaggagctggagttcggaagcctccttcatgagttcggcctcctgggaggggagaagccccgggaggaggccccctggcccccgcccgaaggggccttcgtaggcttcctcctctcccgcaaggagcccatgtgggcggagcttctggccctggcggccgccgcagagggccgggtccaccgggcaacaagcccggttgaggccctggccgacctcaaggaggcccgggggttcctggccaaggacctggccgttttggccctgcgggagggggtggccctggaccccacggacgaccccctcctggtggcctacctcctggacccggccaacaccaaccccgagggggtggcccggcgctacgggggcgagttcacggaggacgcagcggagagggccctcctctccgagaggctcttccagaacctctttccccggctttccgagaagctcctctggctctaccaggaggtggagcggcccctctcccgggtcttggcccacatggaggcccggggggtgaggctggacgtcccccttctggaggccctctcctttgagctggagaaggagatggagcgcctggagggggaggtcttccgcttggccggccaccccttcaacctcaactcccgcgaccagctggaaagggtcctctttgacgagctgggccttaccccggtgggtcggacggagaagacgggcaagcgctccaccgcccagggggccctggaggccctccggggggcccaccccatcgtggagctcatcctccagtaccgggagctttccaagctcaaaagcacctacctggaccccctgccccggctcgtccacccgcggacgggccggcttcacacccgcttcaaccagacgtgtacggccacgggaaggctttccagctccgaccccaacctgcagaacatccccgtgcgcacccccttggggcagcgcatccgcaaggccttcgtggccgaggaggggtggctccttttggcggcggactactcccagatcgagcttcgggtcctggcccacctctcgggggacgagaacctgaagcgggtcttccgggaggggaaggacatccataccgaaaccgccgcctggatgttcggcttagaccccgctctagtggatccaaagatgcgccgggcggccaagacggtcaacttcggcgtcctctacgggatgtccgcccacaggctctcccaggagctcggcatagactacaaggaggcggaggcctttattgagcgctacttccagagcttccccaaggtgcgggcctggatagaaaggaccctggaggagggccggacgcggggctacgtggagaccctgttcggcaggaggcgctatgtgcccgacctggcctcccgggtccgctcggtgcgggaggcggcggagcggatggccttcaacatgcccgtgcagggcaccgccgccgacctgatgaagatcgccatggtcaagctcttccccaggctaaagcccctgggggcccacctcctcctccaggtgcacgacgagctggtcctggaggtgcccgaggaccgggccgaggaggccaaggccctggtcaaggaggtcatggagaacacctaccccttggacgtgcccctcgaggtggaggtgggcgtgggtcgggactggctggaggcgaagggggattgaagcggtcgac

SEQ ID NO: 3109 - DNA, 2605 bp, Artificial Sequence
  Description of Artificial Sequence: Synthetic DNA sequence of Thermus Rt41A DNA Polymerase A599G
atgaaatacctgctgccgaccgctgctgctggtctgctgctcctcgctgcccagccggcgatggccatggatatcggaattaattcggatccgaattccccactttttgacctggaggaaccccccaagcgggtgcttctggtggacggccaccacctggcctaccgcaccttctacgccctgagcctcaccacctcccggggggagccggtgcagatggtctacggcttcgcccggagcctcctcaaggccttgaaggaggacgggcaggcggtggtcgtggtctttgacgccaaggccccctccttccgccacgaggcctacgaggcctacaaggcgggccgggcccccaccccggaggacttcccccgccagctcgccttggtcaagcggctggtggaccttctgggcctggtccgcctcgaggccccgggttacgaggcggacgacgtcctgggcaccctggccaagaaggccgaaagggaggggatggaggtgcgcatcctcacgggagaccgggacttcttccagctcctctccgagaaggtctcggtcctcctgccggacgggaccctggtcaccccaaaggacgtccaggagaagtacggggtgccgccggagcgctgggtggacttccgcgccctcacgggggaccgctcggacaacatccccggggtggcggggataggggagaagaccgcccttcgactcctcgcggagtgggggagcgtggagaacctcctgaagaacctggaccgggtgaagccggactcggtccggcgcaagatagaggcgcaccttgaggacctccgcctctccttggacctggcccgcatccgcaccgacctccccttggaggtggactttaaggccctgcgccgcaggacccccgacctggagggcctgagggcctttttggaggagctggagttcggaagcctccttcatgagttcggcctcctgggaggggagaagccccgggaggaggccccctggcccccgcccgaaggggccttcgtaggcttcctcctctcccgcaaggagcccatgtgggcggagcttctggccctggcggccgccgcagagggccgggtccaccgggcaacaagcccggttgaggccctggccgacctcaaggaggcccgggggttcctggccaaggacctggccgttttggccctgcgggagggggtggccctggaccccacggacgaccccctcctggtggcctacctcctggacccggccaacaccaaccccgagggggtggcccggcgctacgggggcgagttcacggaggacgcagcggagagggccctcctctccgagaggctcttccagaacctctttccccggctttccgagaagctcctctggctctaccaggaggtggagcggcccctctcccgggtcttggcccacatggaggcccggggggtgaggctggacgtcccccttctggaggccctctcctttgagctggagaaggagatggagcgcctggagggggaggtcttccgcttggccggccaccccttcaacctcaactcccgcgaccagctggaaagggtcctctttgacgagctgggccttaccccggtgggtcggacggagaagacgggcaagcgctccaccgcccagggggccctggaggccctccggggggcccaccccatcgtggagctcatcctccagtaccgggagctttccaagctcaaaagcacctacctggaccccctgccccggctcgtccacccgcggacgggccggcttcacacccgcttcaaccagacgggtacggccacgggaaggctttccagctccgaccccaacctgcagaacatccccgtgcgcacccccttggggcagcgcatccgcaaggccttcgtggccgaggaggggtggctccttttggcggcggactactcccagatcgagcttcgggtcctggcccacctctcgggggacgagaacctgaagcgggtcttccgggaggggaaggacatccataccgaaaccgccgcctggatgttcggcttagaccccgctctagtggatccaaagatgcgccgggcggccaagacggtcaacttcggcgtcctctacgggatgtccgcccacaggctctcccaggagctcggcatagactacaaggaggcggaggcctttattgagcgctacttccagagcttccccaaggtgcgggcctggatagaaaggaccctggaggagggccggacgcggggctacgtggagaccctgttcggcaggaggcgctatgtgcccgacctggcctcccgggtccgctcggtgcgggaggcggcggagcggatggccttcaacatgcccgtgcagggcaccgccgccgacctgatgaagatcgccatggtcaagctcttccccaggctaaagcccctgggggcccacctcctcctccaggtgcacgacgagctggtcctggaggtgcccgaggaccgggccgaggaggccaaggccctggtcaaggaggtcatggagaacacctaccccttggacgtgcccctcgaggtggaggtgggcgtgggtcgggactggctggaggcgaagggggattgaagcggtcgac

SEQ ID NO: 3110 - DNA, 2605 bp, Artificial Sequence
  Description of Artificial Sequence: Synthetic DNA sequence of Thermus Rt41A DNA Polymerase A599Q
atgaaatacctgctgccgaccgctgctgctggtctgctgctcctcgctgcccagccggcgatggccatggatatcggaattaattcggatccgaattccccactttttgacctggaggaaccccccaagcgggtgcttctggtggacggccaccacctggcctaccgcaccttctacgccctgagcctcaccacctcccggggggagccggtgcagatggtctacggcttcgcccggagcctcctcaaggccttgaaggaggacgggcaggcggtggtcgtggtctttgacgccaaggccccctccttccgccacgaggcctacgaggcctacaaggcgggccgggcccccaccccggaggacttcccccgccagctcgccttggtcaagcggctggtggaccttctgggcctggtccgcctcgaggccccgggttacgaggcggacgacgtcctgggcaccctggccaagaaggccgaaagggaggggatggaggtgcgcatcctcacgggagaccgggacttcttccagctcctctccgagaaggtctcggtcctcctgccggacgggaccctggtcaccccaaaggacgtccaggagaagtacggggtgccgccggagcgctgggtggacttccgcgccctcacgggggaccgctcggacaacatccccggggtggcggggataggggagaagaccgcccttcgactcctcgcggagtgggggagcgtggagaacctcctgaagaacctggaccgggtgaagccggactcggtccggcgcaagatagaggcgcaccttgaggacctccgcctctccttggacctggcccgcatccgcaccgacctccccttggaggtggactttaaggccctgcgccgcaggacccccgacctggagggcctgagggcctttttggaggagctggagttcggaagcctccttcatgagttcggcctcctgggaggggagaagccccgggaggaggccccctggcccccgcccgaaggggccttcgtaggcttcctcctctcccgcaaggagcccatgtgggcggagcttctggccctggcggccgccgcagagggccgggtccaccgggcaacaagcccggttgaggccctggccgacctcaaggaggcccgggggttcctggccaaggacctggccgttttggccctgcgggagggggtggccctggaccccacggacgaccccctcctggtggcctacctcctggacccggccaacaccaaccccgagggggtggcccggcgctacgggggcgagttcacggaggacgcagcggagagggccctcctctccgagaggctcttccagaacctctttccccggctttccgagaagctcctctggctctaccaggaggtggagcggcccctctcccgggtcttggcccacatggaggcccggggggtgaggctggacgtcccccttctggaggccctctcctttgagctggagaaggagatggagcgcctggagggggaggtcttccgcttggccggccaccccttcaacctcaactcccgcgaccagctggaaagggtcctctttgacgagctgggccttaccccggtgggtcggacggagaagacgggcaagcgctccaccgcccagggggccctggaggccctccggggggcccaccccatcgtggagctcatcctccagtaccgggagctttccaagctcaaaagcacctacctggaccccctgccccggctcgtccacccgcggacgggccggcttcacacccgcttcaaccagacgcaaacggccacgggaaggctttccagctccgaccccaacctgcagaacatccccgtgcgcacccccttggggcagcgcatccgcaaggccttcgtggccgaggaggggtggctccttttggcggcggactactcccagatcgagcttcgggtcctggcccacctctcgggggacgagaacctgaagcgggtcttccgggaggggaaggacatccataccgaaaccgccgcctggatgttcggcttagaccccgctctagtggatccaaagatgcgccgggcggccaagacggtcaacttcggcgtcctctacgggatgtccgcccacaggctctcccaggagctcggcatagactacaaggaggcggaggcctttattgagcgctacttccagagcttccccaaggtgcgggcctggatagaaaggaccctggaggagggccggacgcggggctacgtggagaccctgttcggcaggaggcgctatgtgcccgacctggcctcccgggtccgctcggtgcgggaggcggcggagcggatggccttcaacatgcccgtgcagggcaccgccgccgacctgatgaagatcgccatggtcaagctcttccccaggctaaagcccctgggggcccacctcctcctccaggtgcacgacgagctggtcctggaggtgcccgaggaccgggccgaggaggccaaggccctggtcaaggaggtcatggagaacacctaccccttggacgtgcccctcgaggtggaggtgggcgtgggtcgggactggctggaggcgaagggggattgaagcggtcgac

SEQ ID NO: 3111 - DNA, 2605 bp, Artificial Sequence
  Description of Artificial Sequence: Synthetic DNA sequence of Thermus Rt41A DNA Polymerase A599H
atgaaatacctgctgccgaccgctgctgctggtctgctgctcctcgctgcccagccggcgatggccatggatatcggaattaattcggatccgaattccccactttttgacctggaggaaccccccaagcgggtgcttctggtggacggccaccacctggcctaccgcaccttctacgccctgagcctcaccacctcccggggggagccggtgcagatggtctacggcttcgcccggagcctcctcaaggccttgaaggaggacgggcaggcggtggtcgtggtctttgacgccaaggccccctccttccgccacgaggcctacgaggcctacaaggcgggccgggcccccaccccggaggacttcccccgccagctcgccttggtcaagcggctggtggaccttctgggcctggtccgcctcgaggccccgggttacgaggcggacgacgtcctgggcaccctggccaagaaggccgaaagggaggggatggaggtgcgcatcctcacgggagaccgggacttcttccagctcctctccgagaaggtctcggtcctcctgccggacgggaccctggtcaccccaaaggacgtccaggagaagtacggggtgccgccggagcgctgggtggacttccgcgccctcacgggggaccgctcggacaacatccccggggtggcggggataggggagaagaccgcccttcgactcctcgcggagtgggggagcgtggagaacctcctgaagaacctggaccgggtgaagccggactcggtccggcgcaagatagaggcgcaccttgaggacctccgcctctccttggacctggcccgcatccgcaccgacctccccttggaggtggactttaaggccctgcgccgcaggacccccgacctggagggcctgagggcctttttggaggagctggagttcggaagcctccttcatgagttcggcctcctgggaggggagaagccccgggaggaggccccctggcccccgcccgaaggggccttcgtaggcttcctcctctcccgcaaggagcccatgtgggcggagcttctggccctggcggccgccgcagagggccgggtccaccgggcaacaagcccggttgaggccctggccgacctcaaggaggcccgggggttcctggccaaggacctggccgttttggccctgcgggagggggtggccctggaccccacggacgaccccctcctggtggcctacctcctggacccggccaacaccaaccccgagggggtggcccggcgctacgggggcgagttcacggaggacgcagcggagagggccctcctctccgagaggctcttccagaacctctttccccggctttccgagaagctcctctggctctaccaggaggtggagcggcccctctcccgggtcttggcccacatggaggcccggggggtgaggctggacgtcccccttctggaggccctctcctttgagctggagaaggagatggagcgcctggagggggaggtcttccgcttggccggccaccccttcaacctcaactcccgcgaccagctggaaagggtcctctttgacgagctgggccttaccccggtgggtcggacggagaagacgggcaagcgctccaccgcccagggggccctggaggccctccggggggcccaccccatcgtggagctcatcctccagtaccgggagctttccaagctcaaaagcacctacctggaccccctgccccggctcgtccacccgcggacgggccggcttcacacccgcttcaaccagacgcatacggccacgggaaggctttccagctccgaccccaacctgcagaacatccccgtgcgcacccccttggggcagcgcatccgcaaggccttcgtggccgaggaggggtggctccttttggcggcggactactcccagatcgagcttcgggtcctggcccacctctcgggggacgagaacctgaagcgggtcttccgggaggggaaggacatccataccgaaaccgccgcctggatgttcggcttagaccccgctctagtggatccaaagatgcgccgggcggccaagacggtcaacttcggcgtcctctacgggatgtccgcccacaggctctcccaggagctcggcatagactacaaggaggcggaggcctttattgagcgctacttccagagcttccccaaggtgcgggcctggatagaaaggaccctggaggagggccggacgcggggctacgtggagaccctgttcggcaggaggcgctatgtgcccgacctggcctcccgggtccgctcggtgcgggaggcggcggagcggatggccttcaacatgcccgtgcagggcaccgccgccgacctgatgaagatcgccatggtcaagctcttccccaggctaaagcccctgggggcccacctcctcctccaggtgcacgacgagctggtcctggaggtgcccgaggaccgggccgaggaggccaaggccctggtcaaggaggtcatggagaacacctaccccttggacgtgcccctcgaggtggaggtgggcgtgggtcgggactggctggaggcgaagggggattgaagcggtcgac

SEQ ID NO: 3112 - DNA, 2605 bp, Artificial Sequence
  Description of Artificial Sequence: Synthetic DNA sequence of Thermus Rt41A DNA Polymerase A599I
atgaaatacctgctgccgaccgctgctgctggtctgctgctcctcgctgcccagccggcgatggccatggatatcggaattaattcggatccgaattccccactttttgacctggaggaaccccccaagcgggtgcttctggtggacggccaccacctggcctaccgcaccttctacgccctgagcctcaccacctcccggggggagccggtgcagatggtctacggcttcgcccggagcctcctcaaggccttgaaggaggacgggcaggcggtggtcgtggtctttgacgccaaggccccctccttccgccacgaggcctacgaggcctacaaggcgggccgggcccccaccccggaggacttcccccgccagctcgccttggtcaagcggctggtggaccttctgggcctggtccgcctcgaggccccgggttacgaggcggacgacgtcctgggcaccctggccaagaaggccgaaagggaggggatggaggtgcgcatcctcacgggagaccgggacttcttccagctcctctccgagaaggtctcggtcctcctgccggacgggaccctggtcaccccaaaggacgtccaggagaagtacggggtgccgccggagcgctgggtggacttccgcgccctcacgggggaccgctcggacaacatccccggggtggcggggataggggagaagaccgcccttcgactcctcgcggagtgggggagcgtggagaacctcctgaagaacctggaccgggtgaagccggactcggtccggcgcaagatagaggcgcaccttgaggacctccgcctctccttggacctggcccgcatccgcaccgacctccccttggaggtggactttaaggccctgcgccgcaggacccccgacctggagggcctgagggcctttttggaggagctggagttcggaagcctccttcatgagttcggcctcctgggaggggagaagccccgggaggaggccccctggcccccgcccgaaggggccttcgtaggcttcctcctctcccgcaaggagcccatgtgggcggagcttctggccctggcggccgccgcagagggccgggtccaccgggcaacaagcccggttgaggccctggccgacctcaaggaggcccgggggttcctggccaaggacctggccgttttggccctgcgggagggggtggccctggaccccacggacgaccccctcctggtggcctacctcctggacccggccaacaccaaccccgagggggtggcccggcgctacgggggcgagttcacggaggacgcagcggagagggccctcctctccgagaggctcttccagaacctctttccccggctttccgagaagctcctctggctctaccaggaggtggagcggcccctctcccgggtcttggcccacatggaggcccggggggtgaggctggacgtcccccttctggaggccctctcctttgagctggagaaggagatggagcgcctggagggggaggtcttccgcttggccggccaccccttcaacctcaactcccgcgaccagctggaaagggtcctctttgacgagctgggccttaccccggtgggtcggacggagaagacgggcaagcgctccaccgcccagggggccctggaggccctccggggggcccaccccatcgtggagctcatcctccagtaccgggagctttccaagctcaaaagcacctacctggaccccctgccccggctcgtccacccgcggacgggccggcttcacacccgcttcaaccagacgattacggccacgggaaggctttccagctccgaccccaacctgcagaacatccccgtgcgcacccccttggggcagcgcatccgcaaggccttcgtggccgaggaggggtggctccttttggcggcggactactcccagatcgagcttcgggtcctggcccacctctcgggggacgagaacctgaagcgggtcttccgggaggggaaggacatccataccgaaaccgccgcctggatgttcggcttagaccccgctctagtggatccaaagatgcgccgggcggccaagacggtcaacttcggcgtcctctacgggatgtccgcccacaggctctcccaggagctcggcatagactacaaggaggcggaggcctttattgagcgctacttccagagcttccccaaggtgcgggcctggatagaaaggaccctggaggagggccggacgcggggctacgtggagaccctgttcggcaggaggcgctatgtgcccgacctggcctcccgggtccgctcggtgcgggaggcggcggagcggatggccttcaacatgcccgtgcagggcaccgccgccgacctgatgaagatcgccatggtcaagctcttccccaggctaaagcccctgggggcccacctcctcctccaggtgcacgacgagctggtcctggaggtgcccgaggaccgggccgaggaggccaaggccctggtcaaggaggtcatggagaacacctaccccttggacgtgcccctcgaggtggaggtgggcgtgggtcgggactggctggaggcgaagggggattgaagcggtcgac

SEQ ID NO: 3113 - DNA, 2605 bp, Artificial Sequence
  Description of Artificial Sequence: Synthetic DNA sequence of Thermus Rt41A DNA Polymerase A599L
atgaaatacctgctgccgaccgctgctgctggtctgctgctcctcgctgcccagccggcgatggccatggatatcggaattaattcggatccgaattccccactttttgacctggaggaaccccccaagcgggtgcttctggtggacggccaccacctggcctaccgcaccttctacgccctgagcctcaccacctcccggggggagccggtgcagatggtctacggcttcgcccggagcctcctcaaggccttgaaggaggacgggcaggcggtggtcgtggtctttgacgccaaggccccctccttccgccacgaggcctacgaggcctacaaggcgggccgggcccccaccccggaggacttcccccgccagctcgccttggtcaagcggctggtggaccttctgggcctggtccgcctcgaggccccgggttacgaggcggacgacgtcctgggcaccctggccaagaaggccgaaagggaggggatggaggtgcgcatcctcacgggagaccgggacttcttccagctcctctccgagaaggtctcggtcctcctgccggacgggaccctggtcaccccaaaggacgtccaggagaagtacggggtgccgccggagcgctgggtggacttccgcgccctcacgggggaccgctcggacaacatccccggggtggcggggataggggagaagaccgcccttcgactcctcgcggagtgggggagcgtggagaacctcctgaagaacctggaccgggtgaagccggactcggtccggcgcaagatagaggcgcaccttgaggacctccgcctctccttggacctggcccgcatccgcaccgacctccccttggaggtggactttaaggccctgcgccgcaggacccccgacctggagggcctgagggcctttttggaggagctggagttcggaagcctccttcatgagttcggcctcctgggaggggagaagccccgggaggaggccccctggcccccgcccgaaggggccttcgtaggcttcctcctctcccgcaaggagcccatgtgggcggagcttctggccctggcggccgccgcagagggccgggtccaccgggcaacaagcccggttgaggccctggccgacctcaaggaggcccgggggttcctggccaaggacctggccgttttggccctgcgggagggggtggccctggaccccacggacgaccccctcctggtggcctacctcctggacccggccaacaccaaccccgagggggtggcccggcgctacgggggcgagttcacggaggacgcagcggagagggccctcctctccgagaggctcttccagaacctctttccccggctttccgagaagctcctctggctctaccaggaggtggagcggcccctctcccgggtcttggcccacatggaggcccggggggtgaggctggacgtcccccttctggaggccctctcctttgagctggagaaggagatggagcgcctggagggggaggtcttccgcttggccggccaccccttcaacctcaactcccgcgaccagctggaaagggtcctctttgacgagctgggccttaccccggtgggtcggacggagaagacgggcaagcgctccaccgcccagggggccctggaggccctccggggggcccaccccatcgtggagctcatcctccagtaccgggagctttccaagctcaaaagcacctacctggaccccctgccccggctcgtccacccgcggacgggccggcttcacacccgcttcaaccagacgttaacggccacgggaaggctttccagctccgaccccaacctgcagaacatccccgtgcgcacccccttggggcagcgcatccgcaaggccttcgtggccgaggaggggtggctccttttggcggcggactactcccagatcgagcttcgggtcctggcccacctctcgggggacgagaacctgaagcgggtcttccgggaggggaaggacatccataccgaaaccgccgcctggatgttcggcttagaccccgctctagtggatccaaagatgcgccgggcggccaagacggtcaacttcggcgtcctctacgggatgtccgcccacaggctctcccaggagctcggcatagactacaaggaggcggaggcctttattgagcgctacttccagagcttccccaaggtgcgggcctggatagaaaggaccctggaggagggccggacgcggggctacgtggagaccctgttcggcaggaggcgctatgtgcccgacctggcctcccgggtccgctcggtgcgggaggcggcggagcggatggccttcaacatgcccgtgcagggcaccgccgccgacctgatgaagatcgccatggtcaagctcttccccaggctaaagcccctgggggcccacctcctcctccaggtgcacgacgagctggtcctggaggtgcccgaggaccgggccgaggaggccaaggccctggtcaaggaggtcatggagaacacctaccccttggacgtgcccctcgaggtggaggtgggcgtgggtcgggactggctggaggcgaagggggattgaagcggtcgac

SEQ ID NO: 3114 - DNA, 2605 bp, Artificial Sequence
  Description of Artificial Sequence: Synthetic DNA sequence of Thermus Rt41A DNA Polymerase A599K
atgaaatacctgctgccgaccgctgctgctggtctgctgctcctcgctgcccagccggcgatggccatggatatcggaattaattcggatccgaattccccactttttgacctggaggaaccccccaagcgggtgcttctggtggacggccaccacctggcctaccgcaccttctacgccctgagcctcaccacctcccggggggagccggtgcagatggtctacggcttcgcccggagcctcctcaaggccttgaaggaggacgggcaggcggtggtcgtggtctttgacgccaaggccccctccttccgccacgaggcctacgaggcctacaaggcgggccgggcccccaccccggaggacttcccccgccagctcgccttggtcaagcggctggtggaccttctgggcctggtccgcctcgaggccccgggttacgaggcggacgacgtcctgggcaccctggccaagaaggccgaaagggaggggatggaggtgcgcatcctcacgggagaccgggacttcttccagctcctctccgagaaggtctcggtcctcctgccggacgggaccctggtcaccccaaaggacgtccaggagaagtacggggtgccgccggagcgctgggtggacttccgcgccctcacgggggaccgctcggacaacatccccggggtggcggggataggggagaagaccgcccttcgactcctcgcggagtgggggagcgtggagaacctcctgaagaacctggaccgggtgaagccggactcggtccggcgcaagatagaggcgcaccttgaggacctccgcctctccttggacctggcccgcatccgcaccgacctccccttggaggtggactttaaggccctgcgccgcaggacccccgacctggagggcctgagggcctttttggaggagctggagttcggaagcctccttcatgagttcggcctcctgggaggggagaagccccgggaggaggccccctggcccccgcccgaaggggccttcgtaggcttcctcctctcccgcaaggagcccatgtgggcggagcttctggccctggcggccgccgcagagggccgggtccaccgggcaacaagcccggttgaggccctggccgacctcaaggaggcccgggggttcctggccaaggacctggccgttttggccctgcgggagggggtggccctggaccccacggacgaccccctcctggtggcctacctcctggacccggccaacaccaaccccgagggggtggcccggcgctacgggggcgagttcacggaggacgcagcggagagggccctcctctccgagaggctcttccagaacctctttccccggctttccgagaagctcctctggctctaccaggaggtggagcggcccctctcccgggtcttggcccacatggaggcccggggggtgaggctggacgtcccccttctggaggccctctcctttgagctggagaaggagatggagcgcctggagggggaggtcttccgcttggccggccaccccttcaacctcaactcccgcgaccagctggaaagggtcctctttgacgagctgggccttaccccggtgggtcggacggagaagacgggcaagcgctccaccgcccagggggccctggaggccctccggggggcccaccccatcgtggagctcatcctccagtaccgggagctttccaagctcaaaagcacctacctggaccccctgccccggctcgtccacccgcggacgggccggcttcacacccgcttcaaccagacgaaaacggccacgggaaggctttccagctccgaccccaacctgcagaacatccccgtgcgcacccccttggggcagcgcatccgcaaggccttcgtggccgaggaggggtggctccttttggcggcggactactcccagatcgagcttcgggtcctggcccacctctcgggggacgagaacctgaagcgggtcttccgggaggggaaggacatccataccgaaaccgccgcctggatgttcggcttagaccccgctctagtggatccaaagatgcgccgggcggccaagacggtcaacttcggcgtcctctacgggatgtccgcccacaggctctcccaggagctcggcatagactacaaggaggcggaggcctttattgagcgctacttccagagcttccccaaggtgcgggcctggatagaaaggaccctggaggagggccggacgcggggctacgtggagaccctgttcggcaggaggcgctatgtgcccgacctggcctcccgggtccgctcggtgcgggaggcggcggagcggatggccttcaacatgcccgtgcagggcaccgccgccgacctgatgaagatcgccatggtcaagctcttccccaggctaaagcccctgggggcccacctcctcctccaggtgcacgacgagctggtcctggaggtgcccgaggaccgggccgaggaggccaaggccctggtcaaggaggtcatggagaacacctaccccttggacgtgcccctcgaggtggaggtgggcgtgggtcgggactggctggaggcgaagggggattgaagcggtcgac

SEQ ID NO: 3115 - DNA, 2605 bp, Artificial Sequence
  Description of Artificial Sequence: Synthetic DNA sequence of Thermus Rt41A DNA Polymerase A599E
atgaaatacctgctgccgaccgctgctgctggtctgctgctcctcgctgcccagccggcgatggccatggatatcggaattaattcggatccgaattccccactttttgacctggaggaaccccccaagcgggtgcttctggtggacggccaccacctggcctaccgcaccttctacgccctgagcctcaccacctcccggggggagccggtgcagatggtctacggcttcgcccggagcctcctcaaggccttgaaggaggacgggcaggcggtggtcgtggtctttgacgccaaggccccctccttccgccacgaggcctacgaggcctacaaggcgggccgggcccccaccccggaggacttcccccgccagctcgccttggtcaagcggctggtggaccttctgggcctggtccgcctcgaggccccgggttacgaggcggacgacgtcctgggcaccctggccaagaaggccgaaagggaggggatggaggtgcgcatcctcacgggagaccgggacttcttccagctcctctccgagaaggtctcggtcctcctgccggacgggaccctggtcaccccaaaggacgtccaggagaagtacggggtgccgccggagcgctgggtggacttccgcgccctcacgggggaccgctcggacaacatccccggggtggcggggataggggagaagaccgcccttcgactcctcgcggagtgggggagcgtggagaacctcctgaagaacctggaccgggtgaagccggactcggtccggcgcaagatagaggcgcaccttgaggacctccgcctctccttggacctggcccgcatccgcaccgacctccccttggaggtggactttaaggccctgcgccgcaggacccccgacctggagggcctgagggcctttttggaggagctggagttcggaagcctccttcatgagttcggcctcctgggaggggagaagccccgggaggaggccccctggcccccgcccgaaggggccttcgtaggcttcctcctctcccgcaaggagcccatgtgggcggagcttctggccctggcggccgccgcagagggccgggtccaccgggcaacaagcccggttgaggccctggccgacctcaaggaggcccgggggttcctggccaaggacctggccgttttggccctgcgggagggggtggccctggaccccacggacgaccccctcctggtggcctacctcctggacccggccaacaccaaccccgagggggtggcccggcgctacgggggcgagttcacggaggacgcagcggagagggccctcctctccgagaggctcttccagaacctctttccccggctttccgagaagctcctctggctctaccaggaggtggagcggcccctctcccgggtcttggcccacatggaggcccggggggtgaggctggacgtcccccttctggaggccctctcctttgagctggagaaggagatggagcgcctggagggggaggtcttccgcttggccggccaccccttcaacctcaactcccgcgaccagctggaaagggtcctctttgacgagctgggccttaccccggtgggtcggacggagaagacgggcaagcgctccaccgcccagggggccctggaggccctccggggggcccaccccatcgtggagctcatcctccagtaccgggagctttccaagctcaaaagcacctacctggaccccctgccccggctcgtccacccgcggacgggccggcttcacacccgcttcaaccagacggaaacggccacgggaaggctttccagctccgaccccaacctgcagaacatccccgtgcgcacccccttggggcagcgcatccgcaaggccttcgtggccgaggaggggtggctccttttggcggcggactactcccagatcgagcttcgggtcctggcccacctctcgggggacgagaacctgaagcgggtcttccgggaggggaaggacatccataccgaaaccgccgcctggatgttcggcttagaccccgctctagtggatccaaagatgcgccgggcggccaagacggtcaacttcggcgtcctctacgggatgtccgcccacaggctctcccaggagctcggcatagactacaaggaggcggaggcctttattgagcgctacttccagagcttccccaaggtgcgggcctggatagaaaggaccctggaggagggccggacgcggggctacgtggagaccctgttcggcaggaggcgctatgtgcccgacctggcctcccgggtccgctcggtgcgggaggcggcggagcggatggccttcaacatgcccgtgcagggcaccgccgccgacctgatgaagatcgccatggtcaagctcttccccaggctaaagcccctgggggcccacctcctcctccaggtgcacgacgagctggtcctggaggtgcccgaggaccgggccgaggaggccaaggccctggtcaaggaggtcatggagaacacctaccccttggacgtgcccctcgaggtggaggtgggcgtgggtcgggactggctggaggcgaagggggattgaagcggtcgac

SEQ ID NO: 3116 - DNA, 2605 bp, Artificial Sequence
  Description of Artificial Sequence: Synthetic DNA sequence of Thermus Rt41A DNA Polymerase A599D
atgaaatacctgctgccgaccgctgctgctggtctgctgctcctcgctgcccagccggcgatggccatggatatcggaattaattcggatccgaattccccactttttgacctggaggaaccccccaagcgggtgcttctggtggacggccaccacctggcctaccgcaccttctacgccctgagcctcaccacctcccggggggagccggtgcagatggtctacggcttcgcccggagcctcctcaaggccttgaaggaggacgggcaggcggtggtcgtggtctttgacgccaaggccccctccttccgccacgaggcctacgaggcctacaaggcgggccgggcccccaccccggaggacttcccccgccagctcgccttggtcaagcggctggtggaccttctgggcctggtccgcctcgaggccccgggttacgaggcggacgacgtcctgggcaccctggccaagaaggccgaaagggaggggatggaggtgcgcatcctcacgggagaccgggacttcttccagctcctctccgagaaggtctcggtcctcctgccggacgggaccctggtcaccccaaaggacgtccaggagaagtacggggtgccgccggagcgctgggtggacttccgcgccctcacgggggaccgctcggacaacatccccggggtggcggggataggggagaagaccgcccttcgactcctcgcggagtgggggagcgtggagaacctcctgaagaacctggaccgggtgaagccggactcggtccggcgcaagatagaggcgcaccttgaggacctccgcctctccttggacctggcccgcatccgcaccgacctccccttggaggtggactttaaggccctgcgccgcaggacccccgacctggagggcctgagggcctttttggaggagctggagttcggaagcctccttcatgagttcggcctcctgggaggggagaagccccgggaggaggccccctggcccccgcccgaaggggccttcgtaggcttcctcctctcccgcaaggagcccatgtgggcggagcttctggccctggcggccgccgcagagggccgggtccaccgggcaacaagcccggttgaggccctggccgacctcaaggaggcccgggggttcctggccaaggacctggccgttttggccctgcgggagggggtggccctggaccccacggacgaccccctcctggtggcctacctcctggacccggccaacaccaaccccgagggggtggcccggcgctacgggggcgagttcacggaggacgcagcggagagggccctcctctccgagaggctcttccagaacctctttccccggctttccgagaagctcctctggctctaccaggaggtggagcggcccctctcccgggtcttggcccacatggaggcccggggggtgaggctggacgtcccccttctggaggccctctcctttgagctggagaaggagatggagcgcctggagggggaggtcttccgcttggccggccaccccttcaacctcaactcccgcgaccagctggaaagggtcctctttgacgagctgggccttaccccggtgggtcggacggagaagacgggcaagcgctccaccgcccagggggccctggaggccctccggggggcccaccccatcgtggagctcatcctccagtaccgggagctttccaagctcaaaagcacctacctggaccccctgccccggctcgtccacccgcggacgggccggcttcacacccgcttcaaccagacggatacggccacgggaaggctttccagctccgaccccaacctgcagaacatccccgtgcgcacccccttggggcagcgcatccgcaaggccttcgtggccgaggaggggtggctccttttggcggcggactactcccagatcgagcttcgggtcctggcccacctctcgggggacgagaacctgaagcgggtcttccgggaggggaaggacatccataccgaaaccgccgcctggatgttcggcttagaccccgctctagtggatccaaagatgcgccgggcggccaagacggtcaacttcggcgtcctctacgggatgtccgcccacaggctctcccaggagctcggcatagactacaaggaggcggaggcctttattgagcgctacttccagagcttccccaaggtgcgggcctggatagaaaggaccctggaggagggccggacgcggggctacgtggagaccctgttcggcaggaggcgctatgtgcccgacctggcctcccgggtccgctcggtgcgggaggcggcggagcggatggccttcaacatgcccgtgcagggcaccgccgccgacctgatgaagatcgccatggtcaagctcttccccaggctaaagcccctgggggcccacctcctcctccaggtgcacgacgagctggtcctggaggtgcccgaggaccgggccgaggaggccaaggccctggtcaaggaggtcatggagaacacctaccccttggacgtgcccctcgaggtggaggtgggcgtgggtcgggactggctggaggcgaagggggattgaagcggtcgac

SEQ ID NO: 3117 - DNA, 2605 bp, Artificial Sequence
  Description of Artificial Sequence: Synthetic DNA sequence of Thermus Rt41A DNA Polymerase A599F
atgaaatacctgctgccgaccgctgctgctggtctgctgctcctcgctgcccagccggcgatggccatggatatcggaattaattcggatccgaattccccactttttgacctggaggaaccccccaagcgggtgcttctggtggacggccaccacctggcctaccgcaccttctacgccctgagcctcaccacctcccggggggagccggtgcagatggtctacggcttcgcccggagcctcctcaaggccttgaaggaggacgggcaggcggtggtcgtggtctttgacgccaaggccccctccttccgccacgaggcctacgaggcctacaaggcgggccgggcccccaccccggaggacttcccccgccagctcgccttggtcaagcggctggtggaccttctgggcctggtccgcctcgaggccccgggttacgaggcggacgacgtcctgggcaccctggccaagaaggccgaaagggaggggatggaggtgcgcatcctcacgggagaccgggacttcttccagctcctctccgagaaggtctcggtcctcctgccggacgggaccctggtcaccccaaaggacgtccaggagaagtacggggtgccgccggagcgctgggtggacttccgcgccctcacgggggaccgctcggacaacatccccggggtggcggggataggggagaagaccgcccttcgactcctcgcggagtgggggagcgtggagaacctcctgaagaacctggaccgggtgaagccggactcggtccggcgcaagatagaggcgcaccttgaggacctccgcctctccttggacctggcccgcatccgcaccgacctccccttggaggtggactttaaggccctgcgccgcaggacccccgacctggagggcctgagggcctttttggaggagctggagttcggaagcctccttcatgagttcggcctcctgggaggggagaagccccgggaggaggccccctggcccccgcccgaaggggccttcgtaggcttcctcctctcccgcaaggagcccatgtgggcggagcttctggccctggcggccgccgcagagggccgggtccaccgggcaacaagcccggttgaggccctggccgacctcaaggaggcccgggggttcctggccaaggacctggccgttttggccctgcgggagggggtggccctggaccccacggacgaccccctcctggtggcctacctcctggacccggccaacaccaaccccgagggggtggcccggcgctacgggggcgagttcacggaggacgcagcggagagggccctcctctccgagaggctcttccagaacctctttccccggctttccgagaagctcctctggctctaccaggaggtggagcggcccctctcccgggtcttggcccacatggaggcccggggggtgaggctggacgtcccccttctggaggccctctcctttgagctggagaaggagatggagcgcctggagggggaggtcttccgcttggccggccaccccttcaacctcaactcccgcgaccagctggaaagggtcctctttgacgagctgggccttaccccggtgggtcggacggagaagacgggcaagcgctccaccgcccagggggccctggaggccctccggggggcccaccccatcgtggagctcatcctccagtaccgggagctttccaagctcaaaagcacctacctggaccccctgccccggctcgtccacccgcggacgggccggcttcacacccgcttcaaccagacgtttacggccacgggaaggctttccagctccgaccccaacctgcagaacatccccgtgcgcacccccttggggcagcgcatccgcaaggccttcgtggccgaggaggggtggctccttttggcggcggactactcccagatcgagcttcgggtcctggcccacctctcgggggacgagaacctgaagcgggtcttccgggaggggaaggacatccataccgaaaccgccgcctggatgttcggcttagaccccgctctagtggatccaaagatgcgccgggcggccaagacggtcaacttcggcgtcctctacgggatgtccgcccacaggctctcccaggagctcggcatagactacaaggaggcggaggcctttattgagcgctacttccagagcttccccaaggtgcgggcctggatagaaaggaccctggaggagggccggacgcggggctacgtggagaccctgttcggcaggaggcgctatgtgcccgacctggcctcccgggtccgctcggtgcgggaggcggcggagcggatggccttcaacatgcccgtgcagggcaccgccgccgacctgatgaagatcgccatggtcaagctcttccccaggctaaagcccctgggggcccacctcctcctccaggtgcacgacgagctggtcctggaggtgcccgaggaccgggccgaggaggccaaggccctggtcaaggaggtcatggagaacacctaccccttggacgtgcccctcgaggtggaggtgggcgtgggtcgggactggctggaggcgaagggggattgaagcggtcgac

SEQ ID NO: 3118 - DNA, 2605 bp, Artificial Sequence
  Description of Artificial Sequence: Synthetic DNA sequence of Thermus Rt41A DNA Polymerase A599S
atgaaatacctgctgccgaccgctgctgctggtctgctgctcctcgctgcccagccggcgatggccatggatatcggaattaattcggatccgaattccccactttttgacctggaggaaccccccaagcgggtgcttctggtggacggccaccacctggcctaccgcaccttctacgccctgagcctcaccacctcccggggggagccggtgcagatggtctacggcttcgcccggagcctcctcaaggccttgaaggaggacgggcaggcggtggtcgtggtctttgacgccaaggccccctccttccgccacgaggcctacgaggcctacaaggcgggccgggcccccaccccggaggacttcccccgccagctcgccttggtcaagcggctggtggaccttctgggcctggtccgcctcgaggccccgggttacgaggcggacgacgtcctgggcaccctggccaagaaggccgaaagggaggggatggaggtgcgcatcctcacgggagaccgggacttcttccagctcctctccgagaaggtctcggtcctcctgccggacgggaccctggtcaccccaaaggacgtccaggagaagtacggggtgccgccggagcgctgggtggacttccgcgccctcacgggggaccgctcggacaacatccccggggtggcggggataggggagaagaccgcccttcgactcctcgcggagtgggggagcgtggagaacctcctgaagaacctggaccgggtgaagccggactcggtccggcgcaagatagaggcgcaccttgaggacctccgcctctccttggacctggcccgcatccgcaccgacctccccttggaggtggactttaaggccctgcgccgcaggacccccgacctggagggcctgagggcctttttggaggagctggagttcggaagcctccttcatgagttcggcctcctgggaggggagaagccccgggaggaggccccctggcccccgcccgaaggggccttcgtaggcttcctcctctcccgcaaggagcccatgtgggcggagcttctggccctggcggccgccgcagagggccgggtccaccgggcaacaagcccggttgaggccctggccgacctcaaggaggcccgggggttcctggccaaggacctggccgttttggccctgcgggagggggtggccctggaccccacggacgaccccctcctggtggcctacctcctggacccggccaacaccaaccccgagggggtggcccggcgctacgggggcgagttcacggaggacgcagcggagagggccctcctctccgagaggctcttccagaacctctttccccggctttccgagaagctcctctggctctaccaggaggtggagcggcccctctcccgggtcttggcccacatggaggcccggggggtgaggctggacgtcccccttctggaggccctctcctttgagctggagaaggagatggagcgcctggagggggaggtcttccgcttggccggccaccccttcaacctcaactcccgcgaccagctggaaagggtcctctttgacgagctgggccttaccccggtgggtcggacggagaagacgggcaagcgctccaccgcccagggggccctggaggccctccggggggcccaccccatcgtggagctcatcctccagtaccgggagctttccaagctcaaaagcacctacctggaccccctgccccggctcgtccacccgcggacgggccggcttcacacccgcttcaaccagacgtctacggccacgggaaggctttccagctccgaccccaacctgcagaacatccccgtgcgcacccccttggggcagcgcatccgcaaggccttcgtggccgaggaggggtggctccttttggcggcggactactcccagatcgagcttcgggtcctggcccacctctcgggggacgagaacctgaagcgggtcttccgggaggggaaggacatccataccgaaaccgccgcctggatgttcggcttagaccccgctctagtggatccaaagatgcgccgggcggccaagacggtcaacttcggcgtcctctacgggatgtccgcccacaggctctcccaggagctcggcatagactacaaggaggcggaggcctttattgagcgctacttccagagcttccccaaggtgcgggcctggatagaaaggaccctggaggagggccggacgcggggctacgtggagaccctgttcggcaggaggcgctatgtgcccgacctggcctcccgggtccgctcggtgcgggaggcggcggagcggatggccttcaacatgcccgtgcagggcaccgccgccgacctgatgaagatcgccatggtcaagctcttccccaggctaaagcccctgggggcccacctcctcctccaggtgcacgacgagctggtcctggaggtgcccgaggaccgggccgaggaggccaaggccctggtcaaggaggtcatggagaacacctaccccttggacgtgcccctcgaggtggaggtgggcgtgggtcgggactggctggaggcgaagggggattgaagcggtcgac

SEQ ID NO: 3119 - DNA, 2605 bp, Artificial Sequence
  Description of Artificial Sequence: Synthetic DNA sequence of Thermus Rt41A DNA Polymerase A599Y
atgaaatacctgctgccgaccgctgctgctggtctgctgctcctcgctgcccagccggcgatggccatggatatcggaattaattcggatccgaattccccactttttgacctggaggaaccccccaagcgggtgcttctggtggacggccaccacctggcctaccgcaccttctacgccctgagcctcaccacctcccggggggagccggtgcagatggtctacggcttcgcccggagcctcctcaaggccttgaaggaggacgggcaggcggtggtcgtggtctttgacgccaaggccccctccttccgccacgaggcctacgaggcctacaaggcgggccgggcccccaccccggaggacttcccccgccagctcgccttggtcaagcggctggtggaccttctgggcctggtccgcctcgaggccccgggttacgaggcggacgacgtcctgggcaccctggccaagaaggccgaaagggaggggatggaggtgcgcatcctcacgggagaccgggacttcttccagctcctctccgagaaggtctcggtcctcctgccggacgggaccctggtcaccccaaaggacgtccaggagaagtacggggtgccgccggagcgctgggtggacttccgcgccctcacgggggaccgctcggacaacatccccggggtggcggggataggggagaagaccgcccttcgactcctcgcggagtgggggagcgtggagaacctcctgaagaacctggaccgggtgaagccggactcggtccggcgcaagatagaggcgcaccttgaggacctccgcctctccttggacctggcccgcatccgcaccgacctccccttggaggtggactttaaggccctgcgccgcaggacccccgacctggagggcctgagggcctttttggaggagctggagttcggaagcctccttcatgagttcggcctcctgggaggggagaagccccgggaggaggccccctggcccccgcccgaaggggccttcgtaggcttcctcctctcccgcaaggagcccatgtgggcggagcttctggccctggcggccgccgcagagggccgggtccaccgggcaacaagcccggttgaggccctggccgacctcaaggaggcccgggggttcctggccaaggacctggccgttttggccctgcgggagggggtggccctggaccccacggacgaccccctcctggtggcctacctcctggacccggccaacaccaaccccgagggggtggcccggcgctacgggggcgagttcacggaggacgcagcggagagggccctcctctccgagaggctcttccagaacctctttccccggctttccgagaagctcctctggctctaccaggaggtggagcggcccctctcccgggtcttggcccacatggaggcccggggggtgaggctggacgtcccccttctggaggccctctcctttgagctggagaaggagatggagcgcctggagggggaggtcttccgcttggccggccaccccttcaacctcaactcccgcgaccagctggaaagggtcctctttgacgagctgggccttaccccggtgggtcggacggagaagacgggcaagcgctccaccgcccagggggccctggaggccctccggggggcccaccccatcgtggagctcatcctccagtaccgggagctttccaagctcaaaagcacctacctggaccccctgccccggctcgtccacccgcggacgggccggcttcacacccgcttcaaccagacgtatacggccacgggaaggctttccagctccgaccccaacctgcagaacatccccgtgcgcacccccttggggcagcgcatccgcaaggccttcgtggccgaggaggggtggctccttttggcggcggactactcccagatcgagcttcgggtcctggcccacctctcgggggacgagaacctgaagcgggtcttccgggaggggaaggacatccataccgaaaccgccgcctggatgttcggcttagaccccgctctagtggatccaaagatgcgccgggcggccaagacggtcaacttcggcgtcctctacgggatgtccgcccacaggctctcccaggagctcggcatagactacaaggaggcggaggcctttattgagcgctacttccagagcttccccaaggtgcgggcctggatagaaaggaccctggaggagggccggacgcggggctacgtggagaccctgttcggcaggaggcgctatgtgcccgacctggcctcccgggtccgctcggtgcgggaggcggcggagcggatggccttcaacatgcccgtgcagggcaccgccgccgacctgatgaagatcgccatggtcaagctcttccccaggctaaagcccctgggggcccacctcctcctccaggtgcacgacgagctggtcctggaggtgcccgaggaccgggccgaggaggccaaggccctggtcaaggaggtcatggagaacacctaccccttggacgtgcccctcgaggtggaggtgggcgtgggtcgggactggctggaggcgaagggggattgaagcggtcgac

SEQ ID NO: 3120 - DNA, 2605 bp, Artificial Sequence
  Description of Artificial Sequence: Synthetic DNA sequence of Thermus Rt41A DNA Polymerase A599W
atgaaatacctgctgccgaccgctgctgctggtctgctgctcctcgctgcccagccggcgatggccatggatatcggaattaattcggatccgaattccccactttttgacctggaggaaccccccaagcgggtgcttctggtggacggccaccacctggcctaccgcaccttctacgccctgagcctcaccacctcccggggggagccggtgcagatggtctacggcttcgcccggagcctcctcaaggccttgaaggaggacgggcaggcggtggtcgtggtctttgacgccaaggccccctccttccgccacgaggcctacgaggcctacaaggcgggccgggcccccaccccggaggacttcccccgccagctcgccttggtcaagcggctggtggaccttctgggcctggtccgcctcgaggccccgggttacgaggcggacgacgtcctgggcaccctggccaagaaggccgaaagggaggggatggaggtgcgcatcctcacgggagaccgggacttcttccagctcctctccgagaaggtctcggtcctcctgccggacgggaccctggtcaccccaaaggacgtccaggagaagtacggggtgccgccggagcgctgggtggacttccgcgccctcacgggggaccgctcggacaacatccccggggtggcggggataggggagaagaccgcccttcgactcctcgcggagtgggggagcgtggagaacctcctgaagaacctggaccgggtgaagccggactcggtccggcgcaagatagaggcgcaccttgaggacctccgcctctccttggacctggcccgcatccgcaccgacctccccttggaggtggactttaaggccctgcgccgcaggacccccgacctggagggcctgagggcctttttggaggagctggagttcggaagcctccttcatgagttcggcctcctgggaggggagaagccccgggaggaggccccctggcccccgcccgaaggggccttcgtaggcttcctcctctcccgcaaggagcccatgtgggcggagcttctggccctggcggccgccgcagagggccgggtccaccgggcaacaagcccggttgaggccctggccgacctcaaggaggcccgggggttcctggccaaggacctggccgttttggccctgcgggagggggtggccctggaccccacggacgaccccctcctggtggcctacctcctggacccggccaacaccaaccccgagggggtggcccggcgctacgggggcgagttcacggaggacgcagcggagagggccctcctctccgagaggctcttccagaacctctttccccggctttccgagaagctcctctggctctaccaggaggtggagcggcccctctcccgggtcttggcccacatggaggcccggggggtgaggctggacgtcccccttctggaggccctctcctttgagctggagaaggagatggagcgcctggagggggaggtcttccgcttggccggccaccccttcaacctcaactcccgcgaccagctggaaagggtcctctttgacgagctgggccttaccccggtgggtcggacggagaagacgggcaagcgctccaccgcccagggggccctggaggccctccggggggcccaccccatcgtggagctcatcctccagtaccgggagctttccaagctcaaaagcacctacctggaccccctgccccggctcgtccacccgcggacgggccggcttcacacccgcttcaaccagacgtggacggccacgggaaggctttccagctccgaccccaacctgcagaacatccccgtgcgcacccccttggggcagcgcatccgcaaggccttcgtggccgaggaggggtggctccttttggcggcggactactcccagatcgagcttcgggtcctggcccacctctcgggggacgagaacctgaagcgggtcttccgggaggggaaggacatccataccgaaaccgccgcctggatgttcggcttagaccccgctctagtggatccaaagatgcgccgggcggccaagacggtcaacttcggcgtcctctacgggatgtccgcccacaggctctcccaggagctcggcatagactacaaggaggcggaggcctttattgagcgctacttccagagcttccccaaggtgcgggcctggatagaaaggaccctggaggagggccggacgcggggctacgtggagaccctgttcggcaggaggcgctatgtgcccgacctggcctcccgggtccgctcggtgcgggaggcggcggagcggatggccttcaacatgcccgtgcagggcaccgccgccgacctgatgaagatcgccatggtcaagctcttccccaggctaaagcccctgggggcccacctcctcctccaggtgcacgacgagctggtcctggaggtgcccgaggaccgggccgaggaggccaaggccctggtcaaggaggtcatggagaacacctaccccttggacgtgcccctcgaggtggaggtgggcgtgggtcgggactggctggaggcgaagggggattgaagcggtcgac

SEQ ID NO: 3121 - DNA, 2605 bp, Artificial Sequence
  Description of Artificial Sequence: Synthetic DNA sequence of Thermus Rt41A DNA Polymerase A599P
atgaaatacctgctgccgaccgctgctgctggtctgctgctcctcgctgcccagccggcgatggccatggatatcggaattaattcggatccgaattccccactttttgacctggaggaaccccccaagcgggtgcttctggtggacggccaccacctggcctaccgcaccttctacgccctgagcctcaccacctcccggggggagccggtgcagatggtctacggcttcgcccggagcctcctcaaggccttgaaggaggacgggcaggcggtggtcgtggtctttgacgccaaggccccctccttccgccacgaggcctacgaggcctacaaggcgggccgggcccccaccccggaggacttcccccgccagctcgccttggtcaagcggctggtggaccttctgggcctggtccgcctcgaggccccgggttacgaggcggacgacgtcctgggcaccctggccaagaaggccgaaagggaggggatggaggtgcgcatcctcacgggagaccgggacttcttccagctcctctccgagaaggtctcggtcctcctgccggacgggaccctggtcaccccaaaggacgtccaggagaagtacggggtgccgccggagcgctgggtggacttccgcgccctcacgggggaccgctcggacaacatccccggggtggcggggataggggagaagaccgcccttcgactcctcgcggagtgggggagcgtggagaacctcctgaagaacctggaccgggtgaagccggactcggtccggcgcaagatagaggcgcaccttgaggacctccgcctctccttggacctggcccgcatccgcaccgacctccccttggaggtggactttaaggccctgcgccgcaggacccccgacctggagggcctgagggcctttttggaggagctggagttcggaagcctccttcatgagttcggcctcctgggaggggagaagccccgggaggaggccccctggcccccgcccgaaggggccttcgtaggcttcctcctctcccgcaaggagcccatgtgggcggagcttctggccctggcggccgccgcagagggccgggtccaccgggcaacaagcccggttgaggccctggccgacctcaaggaggcccgggggttcctggccaaggacctggccgttttggccctgcgggagggggtggccctggaccccacggacgaccccctcctggtggcctacctcctggacccggccaacaccaaccccgagggggtggcccggcgctacgggggcgagttcacggaggacgcagcggagagggccctcctctccgagaggctcttccagaacctctttccccggctttccgagaagctcctctggctctaccaggaggtggagcggcccctctcccgggtcttggcccacatggaggcccggggggtgaggctggacgtcccccttctggaggccctctcctttgagctggagaaggagatggagcgcctggagggggaggtcttccgcttggccggccaccccttcaacctcaactcccgcgaccagctggaaagggtcctctttgacgagctgggccttaccccggtgggtcggacggagaagacgggcaagcgctccaccgcccagggggccctggaggccctccggggggcccaccccatcgtggagctcatcctccagtaccgggagctttccaagctcaaaagcacctacctggaccccctgccccggctcgtccacccgcggacgggccggcttcacacccgcttcaaccagacgcctacggccacgggaaggctttccagctccgaccccaacctgcagaacatccccgtgcgcacccccttggggcagcgcatccgcaaggccttcgtggccgaggaggggtggctccttttggcggcggactactcccagatcgagcttcgggtcctggcccacctctcgggggacgagaacctgaagcgggtcttccgggaggggaaggacatccataccgaaaccgccgcctggatgttcggcttagaccccgctctagtggatccaaagatgcgccgggcggccaagacggtcaacttcggcgtcctctacgggatgtccgcccacaggctctcccaggagctcggcatagactacaaggaggcggaggcctttattgagcgctacttccagagcttccccaaggtgcgggcctggatagaaaggaccctggaggagggccggacgcggggctacgtggagaccctgttcggcaggaggcgctatgtgcccgacctggcctcccgggtccgctcggtgcgggaggcggcggagcggatggccttcaacatgcccgtgcagggcaccgccgccgacctgatgaagatcgccatggtcaagctcttccccaggctaaagcccctgggggcccacctcctcctccaggtgcacgacgagctggtcctggaggtgcccgaggaccgggccgaggaggccaaggccctggtcaaggaggtcatggagaacacctaccccttggacgtgcccctcgaggtggaggtgggcgtgggtcgggactggctggaggcgaagggggattgaagcggtcgac

SEQ ID NO: 3122 - DNA, 2605 bp, Artificial Sequence
  Description of Artificial Sequence: Synthetic DNA sequence of Thermus Rt41A DNA Polymerase A599M
atgaaatacctgctgccgaccgctgctgctggtctgctgctcctcgctgcccagccggcgatggccatggatatcggaattaattcggatccgaattccccactttttgacctggaggaaccccccaagcgggtgcttctggtggacggccaccacctggcctaccgcaccttctacgccctgagcctcaccacctcccggggggagccggtgcagatggtctacggcttcgcccggagcctcctcaaggccttgaaggaggacgggcaggcggtggtcgtggtctttgacgccaaggccccctccttccgccacgaggcctacgaggcctacaaggcgggccgggcccccaccccggaggacttcccccgccagctcgccttggtcaagcggctggtggaccttctgggcctggtccgcctcgaggccccgggttacgaggcggacgacgtcctgggcaccctggccaagaaggccgaaagggaggggatggaggtgcgcatcctcacgggagaccgggacttcttccagctcctctccgagaaggtctcggtcctcctgccggacgggaccctggtcaccccaaaggacgtccaggagaagtacggggtgccgccggagcgctgggtggacttccgcgccctcacgggggaccgctcggacaacatccccggggtggcggggataggggagaagaccgcccttcgactcctcgcggagtgggggagcgtggagaacctcctgaagaacctggaccgggtgaagccggactcggtccggcgcaagatagaggcgcaccttgaggacctccgcctctccttggacctggcccgcatccgcaccgacctccccttggaggtggactttaaggccctgcgccgcaggacccccgacctggagggcctgagggcctttttggaggagctggagttcggaagcctccttcatgagttcggcctcctgggaggggagaagccccgggaggaggccccctggcccccgcccgaaggggccttcgtaggcttcctcctctcccgcaaggagcccatgtgggcggagcttctggccctggcggccgccgcagagggccgggtccaccgggcaacaagcccggttgaggccctggccgacctcaaggaggcccgggggttcctggccaaggacctggccgttttggccctgcgggagggggtggccctggaccccacggacgaccccctcctggtggcctacctcctggacccggccaacaccaaccccgagggggtggcccggcgctacgggggcgagttcacggaggacgcagcggagagggccctcctctccgagaggctcttccagaacctctttccccggctttccgagaagctcctctggctctaccaggaggtggagcggcccctctcccgggtcttggcccacatggaggcccggggggtgaggctggacgtcccccttctggaggccctctcctttgagctggagaaggagatggagcgcctggagggggaggtcttccgcttggccggccaccccttcaacctcaactcccgcgaccagctggaaagggtcctctttgacgagctgggccttaccccggtgggtcggacggagaagacgggcaagcgctccaccgcccagggggccctggaggccctccggggggcccaccccatcgtggagctcatcctccagtaccgggagctttccaagctcaaaagcacctacctggaccccctgccccggctcgtccacccgcggacgggccggcttcacacccgcttcaaccagacgatgacggccacgggaaggctttccagctccgaccccaacctgcagaacatccccgtgcgcacccccttggggcagcgcatccgcaaggccttcgtggccgaggaggggtggctccttttggcggcggactactcccagatcgagcttcgggtcctggcccacctctcgggggacgagaacctgaagcgggtcttccgggaggggaaggacatccataccgaaaccgccgcctggatgttcggcttagaccccgctctagtggatccaaagatgcgccgggcggccaagacggtcaacttcggcgtcctctacgggatgtccgcccacaggctctcccaggagctcggcatagactacaaggaggcggaggcctttattgagcgctacttccagagcttccccaaggtgcgggcctggatagaaaggaccctggaggagggccggacgcggggctacgtggagaccctgttcggcaggaggcgctatgtgcccgacctggcctcccgggtccgctcggtgcgggaggcggcggagcggatggccttcaacatgcccgtgcagggcaccgccgccgacctgatgaagatcgccatggtcaagctcttccccaggctaaagcccctgggggcccacctcctcctccaggtgcacgacgagctggtcctggaggtgcccgaggaccgggccgaggaggccaaggccctggtcaaggaggtcatggagaacacctaccccttggacgtgcccctcgaggtggaggtgggcgtgggtcgggactggctggaggcgaagggggattgaagcggtcgac

SEQ ID NO: 3123 - DNA, 2605 bp, Artificial Sequence
  Description of Artificial Sequence: Synthetic DNA sequence of Thermus Rt41A DNA Polymerase A599T
atgaaatacctgctgccgaccgctgctgctggtctgctgctcctcgctgcccagccggcgatggccatggatatcggaattaattcggatccgaattccccactttttgacctggaggaaccccccaagcgggtgcttctggtggacggccaccacctggcctaccgcaccttctacgccctgagcctcaccacctcccggggggagccggtgcagatggtctacggcttcgcccggagcctcctcaaggccttgaaggaggacgggcaggcggtggtcgtggtctttgacgccaaggccccctccttccgccacgaggcctacgaggcctacaaggcgggccgggcccccaccccggaggacttcccccgccagctcgccttggtcaagcggctggtggaccttctgggcctggtccgcctcgaggccccgggttacgaggcggacgacgtcctgggcaccctggccaagaaggccgaaagggaggggatggaggtgcgcatcctcacgggagaccgggacttcttccagctcctctccgagaaggtctcggtcctcctgccggacgggaccctggtcaccccaaaggacgtccaggagaagtacggggtgccgccggagcgctgggtggacttccgcgccctcacgggggaccgctcggacaacatccccggggtggcggggataggggagaagaccgcccttcgactcctcgcggagtgggggagcgtggagaacctcctgaagaacctggaccgggtgaagccggactcggtccggcgcaagatagaggcgcaccttgaggacctccgcctctccttggacctggcccgcatccgcaccgacctccccttggaggtggactttaaggccctgcgccgcaggacccccgacctggagggcctgagggcctttttggaggagctggagttcggaagcctccttcatgagttcggcctcctgggaggggagaagccccgggaggaggccccctggcccccgcccgaaggggccttcgtaggcttcctcctctcccgcaaggagcccatgtgggcggagcttctggccctggcggccgccgcagagggccgggtccaccgggcaacaagcccggttgaggccctggccgacctcaaggaggcccgggggttcctggccaaggacctggccgttttggccctgcgggagggggtggccctggaccccacggacgaccccctcctggtggcctacctcctggacccggccaacaccaaccccgagggggtggcccggcgctacgggggcgagttcacggaggacgcagcggagagggccctcctctccgagaggctcttccagaacctctttccccggctttccgagaagctcctctggctctaccaggaggtggagcggcccctctcccgggtcttggcccacatggaggcccggggggtgaggctggacgtcccccttctggaggccctctcctttgagctggagaaggagatggagcgcctggagggggaggtcttccgcttggccggccaccccttcaacctcaactcccgcgaccagctggaaagggtcctctttgacgagctgggccttaccccggtgggtcggacggagaagacgggcaagcgctccaccgcccagggggccctggaggccctccggggggcccaccccatcgtggagctcatcctccagtaccgggagctttccaagctcaaaagcacctacctggaccccctgccccggctcgtccacccgcggacgggccggcttcacacccgcttcaaccagacgactacggccacgggaaggctttccagctccgaccccaacctgcagaacatccccgtgcgcacccccttggggcagcgcatccgcaaggccttcgtggccgaggaggggtggctccttttggcggcggactactcccagatcgagcttcgggtcctggcccacctctcgggggacgagaacctgaagcgggtcttccgggaggggaaggacatccataccgaaaccgccgcctggatgttcggcttagaccccgctctagtggatccaaagatgcgccgggcggccaagacggtcaacttcggcgtcctctacgggatgtccgcccacaggctctcccaggagctcggcatagactacaaggaggcggaggcctttattgagcgctacttccagagcttccccaaggtgcgggcctggatagaaaggaccctggaggagggccggacgcggggctacgtggagaccctgttcggcaggaggcgctatgtgcccgacctggcctcccgggtccgctcggtgcgggaggcggcggagcggatggccttcaacatgcccgtgcagggcaccgccgccgacctgatgaagatcgccatggtcaagctcttccccaggctaaagcccctgggggcccacctcctcctccaggtgcacgacgagctggtcctggaggtgcccgaggaccgggccgaggaggccaaggccctggtcaaggaggtcatggagaacacctaccccttggacgtgcccctcgaggtggaggtgggcgtgggtcgggactggctggaggcgaagggggattgaagcggtcgac

SEQ ID NO: 3124 - DNA, 2605 bp, Artificial Sequence
  Description of Artificial Sequence: Synthetic DNA sequence of Thermus Rt41A DNA Polymerase A599N
atgaaatacctgctgccgaccgctgctgctggtctgctgctcctcgctgcccagccggcgatggccatggatatcggaattaattcggatccgaattccccactttttgacctggaggaaccccccaagcgggtgcttctggtggacggccaccacctggcctaccgcaccttctacgccctgagcctcaccacctcccggggggagccggtgcagatggtctacggcttcgcccggagcctcctcaaggccttgaaggaggacgggcaggcggtggtcgtggtctttgacgccaaggccccctccttccgccacgaggcctacgaggcctacaaggcgggccgggcccccaccccggaggacttcccccgccagctcgccttggtcaagcggctggtggaccttctgggcctggtccgcctcgaggccccgggttacgaggcggacgacgtcctgggcaccctggccaagaaggccgaaagggaggggatggaggtgcgcatcctcacgggagaccgggacttcttccagctcctctccgagaaggtctcggtcctcctgccggacgggaccctggtcaccccaaaggacgtccaggagaagtacggggtgccgccggagcgctgggtggacttccgcgccctcacgggggaccgctcggacaacatccccggggtggcggggataggggagaagaccgcccttcgactcctcgcggagtgggggagcgtggagaacctcctgaagaacctggaccgggtgaagccggactcggtccggcgcaagatagaggcgcaccttgaggacctccgcctctccttggacctggcccgcatccgcaccgacctccccttggaggtggactttaaggccctgcgccgcaggacccccgacctggagggcctgagggcctttttggaggagctggagttcggaagcctccttcatgagttcggcctcctgggaggggagaagccccgggaggaggccccctggcccccgcccgaaggggccttcgtaggcttcctcctctcccgcaaggagcccatgtgggcggagcttctggccctggcggccgccgcagagggccgggtccaccgggcaacaagcccggttgaggccctggccgacctcaaggaggcccgggggttcctggccaaggacctggccgttttggccctgcgggagggggtggccctggaccccacggacgaccccctcctggtggcctacctcctggacccggccaacaccaaccccgagggggtggcccggcgctacgggggcgagttcacggaggacgcagcggagagggccctcctctccgagaggctcttccagaacctctttccccggctttccgagaagctcctctggctctaccaggaggtggagcggcccctctcccgggtcttggcccacatggaggcccggggggtgaggctggacgtcccccttctggaggccctctcctttgagctggagaaggagatggagcgcctggagggggaggtcttccgcttggccggccaccccttcaacctcaactcccgcgaccagctggaaagggtcctctttgacgagctgggccttaccccggtgggtcggacggagaagacgggcaagcgctccaccgcccagggggccctggaggccctccggggggcccaccccatcgtggagctcatcctccagtaccgggagctttccaagctcaaaagcacctacctggaccccctgccccggctcgtccacccgcggacgggccggcttcacacccgcttcaaccagacgaatacggccacgggaaggctttccagctccgaccccaacctgcagaacatccccgtgcgcacccccttggggcagcgcatccgcaaggccttcgtggccgaggaggggtggctccttttggcggcggactactcccagatcgagcttcgggtcctggcccacctctcgggggacgagaacctgaagcgggtcttccgggaggggaaggacatccataccgaaaccgccgcctggatgttcggcttagaccccgctctagtggatccaaagatgcgccgggcggccaagacggtcaacttcggcgtcctctacgggatgtccgcccacaggctctcccaggagctcggcatagactacaaggaggcggaggcctttattgagcgctacttccagagcttccccaaggtgcgggcctggatagaaaggaccctggaggagggccggacgcggggctacgtggagaccctgttcggcaggaggcgctatgtgcccgacctggcctcccgggtccgctcggtgcgggaggcggcggagcggatggccttcaacatgcccgtgcagggcaccgccgccgacctgatgaagatcgccatggtcaagctcttccccaggctaaagcccctgggggcccacctcctcctccaggtgcacgacgagctggtcctggaggtgcccgaggaccgggccgaggaggccaaggccctggtcaaggaggtcatggagaacacctaccccttggacgtgcccctcgaggtggaggtgggcgtgggtcgggactggctggaggcgaagggggattgaagcggtcgac

SEQ ID NO: 3125 - DNA, 2605 bp, Artificial Sequence
  Description of Artificial Sequence: Synthetic DNA sequence of Thermus Rt41A DNA Polymerase A599V
atgaaatacctgctgccgaccgctgctgctggtctgctgctcctcgctgcccagccggcgatggccatggatatcggaattaattcggatccgaattccccactttttgacctggaggaaccccccaagcgggtgcttctggtggacggccaccacctggcctaccgcaccttctacgccctgagcctcaccacctcccggggggagccggtgcagatggtctacggcttcgcccggagcctcctcaaggccttgaaggaggacgggcaggcggtggtcgtggtctttgacgccaaggccccctccttccgccacgaggcctacgaggcctacaaggcgggccgggcccccaccccggaggacttcccccgccagctcgccttggtcaagcggctggtggaccttctgggcctggtccgcctcgaggccccgggttacgaggcggacgacgtcctgggcaccctggccaagaaggccgaaagggaggggatggaggtgcgcatcctcacgggagaccgggacttcttccagctcctctccgagaaggtctcggtcctcctgccggacgggaccctggtcaccccaaaggacgtccaggagaagtacggggtgccgccggagcgctgggtggacttccgcgccctcacgggggaccgctcggacaacatccccggggtggcggggataggggagaagaccgcccttcgactcctcgcggagtgggggagcgtggagaacctcctgaagaacctggaccgggtgaagccggactcggtccggcgcaagatagaggcgcaccttgaggacctccgcctctccttggacctggcccgcatccgcaccgacctccccttggaggtggactttaaggccctgcgccgcaggacccccgacctggagggcctgagggcctttttggaggagctggagttcggaagcctccttcatgagttcggcctcctgggaggggagaagccccgggaggaggccccctggcccccgcccgaaggggccttcgtaggcttcctcctctcccgcaaggagcccatgtgggcggagcttctggccctggcggccgccgcagagggccgggtccaccgggcaacaagcccggttgaggccctggccgacctcaaggaggcccgggggttcctggccaaggacctggccgttttggccctgcgggagggggtggccctggaccccacggacgaccccctcctggtggcctacctcctggacccggccaacaccaaccccgagggggtggcccggcgctacgggggcgagttcacggaggacgcagcggagagggccctcctctccgagaggctcttccagaacctctttccccggctttccgagaagctcctctggctctaccaggaggtggagcggcccctctcccgggtcttggcccacatggaggcccggggggtgaggctggacgtcccccttctggaggccctctcctttgagctggagaaggagatggagcgcctggagggggaggtcttccgcttggccggccaccccttcaacctcaactcccgcgaccagctggaaagggtcctctttgacgagctgggccttaccccggtgggtcggacggagaagacgggcaagcgctccaccgcccagggggccctggaggccctccggggggcccaccccatcgtggagctcatcctccagtaccgggagctttccaagctcaaaagcacctacctggaccccctgccccggctcgtccacccgcggacgggccggcttcacacccgcttcaaccagacggtcacggccacgggaaggctttccagctccgaccccaacctgcagaacatccccgtgcgcacccccttggggcagcgcatccgcaaggccttcgtggccgaggaggggtggctccttttggcggcggactactcccagatcgagcttcgggtcctggcccacctctcgggggacgagaacctgaagcgggtcttccgggaggggaaggacatccataccgaaaccgccgcctggatgttcggcttagaccccgctctagtggatccaaagatgcgccgggcggccaagacggtcaacttcggcgtcctctacgggatgtccgcccacaggctctcccaggagctcggcatagactacaaggaggcggaggcctttattgagcgctacttccagagcttccccaaggtgcgggcctggatagaaaggaccctggaggagggccggacgcggggctacgtggagaccctgttcggcaggaggcgctatgtgcccgacctggcctcccgggtccgctcggtgcgggaggcggcggagcggatggccttcaacatgcccgtgcagggcaccgccgccgacctgatgaagatcgccatggtcaagctcttccccaggctaaagcccctgggggcccacctcctcctccaggtgcacgacgagctggtcctggaggtgcccgaggaccgggccgaggaggccaaggccctggtcaaggaggtcatggagaacacctaccccttggacgtgcccctcgaggtggaggtgggcgtgggtcgggactggctggaggcgaagggggattgaagcggtcgac

SEQ ID NO: 3126 - DNA, 2605 bp, Artificial Sequence
  Description of Artificial Sequence: Synthetic DNA sequence of Thermus Rt41A DNA Polymerase S608A
atgaaatacctgctgccgaccgctgctgctggtctgctgctcctcgctgcccagccggcgatggccatggatatcggaattaattcggatccgaattccccactttttgacctggaggaaccccccaagcgggtgcttctggtggacggccaccacctggcctaccgcaccttctacgccctgagcctcaccacctcccggggggagccggtgcagatggtctacggcttcgcccggagcctcctcaaggccttgaaggaggacgggcaggcggtggtcgtggtctttgacgccaaggccccctccttccgccacgaggcctacgaggcctacaaggcgggccgggcccccaccccggaggacttcccccgccagctcgccttggtcaagcggctggtggaccttctgggcctggtccgcctcgaggccccgggttacgaggcggacgacgtcctgggcaccctggccaagaaggccgaaagggaggggatggaggtgcgcatcctcacgggagaccgggacttcttccagctcctctccgagaaggtctcggtcctcctgccggacgggaccctggtcaccccaaaggacgtccaggagaagtacggggtgccgccggagcgctgggtggacttccgcgccctcacgggggaccgctcggacaacatccccggggtggcggggataggggagaagaccgcccttcgactcctcgcggagtgggggagcgtggagaacctcctgaagaacctggaccgggtgaagccggactcggtccggcgcaagatagaggcgcaccttgaggacctccgcctctccttggacctggcccgcatccgcaccgacctccccttggaggtggactttaaggccctgcgccgcaggacccccgacctggagggcctgagggcctttttggaggagctggagttcggaagcctccttcatgagttcggcctcctgggaggggagaagccccgggaggaggccccctggcccccgcccgaaggggccttcgtaggcttcctcctctcccgcaaggagcccatgtgggcggagcttctggccctggcggccgccgcagagggccgggtccaccgggcaacaagcccggttgaggccctggccgacctcaaggaggcccgggggttcctggccaaggacctggccgttttggccctgcgggagggggtggccctggaccccacggacgaccccctcctggtggcctacctcctggacccggccaacaccaaccccgagggggtggcccggcgctacgggggcgagttcacggaggacgcagcggagagggccctcctctccgagaggctcttccagaacctctttccccggctttccgagaagctcctctggctctaccaggaggtggagcggcccctctcccgggtcttggcccacatggaggcccggggggtgaggctggacgtcccccttctggaggccctctcctttgagctggagaaggagatggagcgcctggagggggaggtcttccgcttggccggccaccccttcaacctcaactcccgcgaccagctggaaagggtcctctttgacgagctgggccttaccccggtgggtcggacggagaagacgggcaagcgctccaccgcccagggggccctggaggccctccggggggcccaccccatcgtggagctcatcctccagtaccgggagctttccaagctcaaaagcacctacctggaccccctgccccggctcgtccacccgcggacgggccggcttcacacccgcttcaaccagacggccacggccacgggaaggctttccagcgctgaccccaacctgcagaacatccccgtgcgcacccccttggggcagcgcatccgcaaggccttcgtggccgaggaggggtggctccttttggcggcggactactcccagatcgagcttcgggtcctggcccacctctcgggggacgagaacctgaagcgggtcttccgggaggggaaggacatccataccgaaaccgccgcctggatgttcggcttagaccccgctctagtggatccaaagatgcgccgggcggccaagacggtcaacttcggcgtcctctacgggatgtccgcccacaggctctcccaggagctcggcatagactacaaggaggcggaggcctttattgagcgctacttccagagcttccccaaggtgcgggcctggatagaaaggaccctggaggagggccggacgcggggctacgtggagaccctgttcggcaggaggcgctatgtgcccgacctggcctcccgggtccgctcggtgcgggaggcggcggagcggatggccttcaacatgcccgtgcagggcaccgccgccgacctgatgaagatcgccatggtcaagctcttccccaggctaaagcccctgggggcccacctcctcctccaggtgcacgacgagctggtcctggaggtgcccgaggaccgggccgaggaggccaaggccctggtcaaggaggtcatggagaacacctaccccttggacgtgcccctcgaggtggaggtgggcgtgggtcgggactggctggaggcgaagggggattgaagcggtcgac

SEQ ID NO: 3127 - DNA, 2605 bp, Artificial Sequence
  Description of Artificial Sequence: Synthetic DNA sequence of Thermus Rt41A DNA Polymerase S608R
atgaaatacctgctgccgaccgctgctgctggtctgctgctcctcgctgcccagccggcgatggccatggatatcggaattaattcggatccgaattccccactttttgacctggaggaaccccccaagcgggtgcttctggtggacggccaccacctggcctaccgcaccttctacgccctgagcctcaccacctcccggggggagccggtgcagatggtctacggcttcgcccggagcctcctcaaggccttgaaggaggacgggcaggcggtggtcgtggtctttgacgccaaggccccctccttccgccacgaggcctacgaggcctacaaggcgggccgggcccccaccccggaggacttcccccgccagctcgccttggtcaagcggctggtggaccttctgggcctggtccgcctcgaggccccgggttacgaggcggacgacgtcctgggcaccctggccaagaaggccgaaagggaggggatggaggtgcgcatcctcacgggagaccgggacttcttccagctcctctccgagaaggtctcggtcctcctgccggacgggaccctggtcaccccaaaggacgtccaggagaagtacggggtgccgccggagcgctgggtggacttccgcgccctcacgggggaccgctcggacaacatccccggggtggcggggataggggagaagaccgcccttcgactcctcgcggagtgggggagcgtggagaacctcctgaagaacctggaccgggtgaagccggactcggtccggcgcaagatagaggcgcaccttgaggacctccgcctctccttggacctggcccgcatccgcaccgacctccccttggaggtggactttaaggccctgcgccgcaggacccccgacctggagggcctgagggcctttttggaggagctggagttcggaagcctccttcatgagttcggcctcctgggaggggagaagccccgggaggaggccccctggcccccgcccgaaggggccttcgtaggcttcctcctctcccgcaaggagcccatgtgggcggagcttctggccctggcggccgccgcagagggccgggtccaccgggcaacaagcccggttgaggccctggccgacctcaaggaggcccgggggttcctggccaaggacctggccgttttggccctgcgggagggggtggccctggaccccacggacgaccccctcctggtggcctacctcctggacccggccaacaccaaccccgagggggtggcccggcgctacgggggcgagttcacggaggacgcagcggagagggccctcctctccgagaggctcttccagaacctctttccccggctttccgagaagctcctctggctctaccaggaggtggagcggcccctctcccgggtcttggcccacatggaggcccggggggtgaggctggacgtcccccttctggaggccctctcctttgagctggagaaggagatggagcgcctggagggggaggtcttccgcttggccggccaccccttcaacctcaactcccgcgaccagctggaaagggtcctctttgacgagctgggccttaccccggtgggtcggacggagaagacgggcaagcgctccaccgcccagggggccctggaggccctccggggggcccaccccatcgtggagctcatcctccagtaccgggagctttccaagctcaaaagcacctacctggaccccctgccccggctcgtccacccgcggacgggccggcttcacacccgcttcaaccagacggccacggccacgggaaggctttccagccgagaccccaacctgcagaacatccccgtgcgcacccccttggggcagcgcatccgcaaggccttcgtggccgaggaggggtggctccttttggcggcggactactcccagatcgagcttcgggtcctggcccacctctcgggggacgagaacctgaagcgggtcttccgggaggggaaggacatccataccgaaaccgccgcctggatgttcggcttagaccccgctctagtggatccaaagatgcgccgggcggccaagacggtcaacttcggcgtcctctacgggatgtccgcccacaggctctcccaggagctcggcatagactacaaggaggcggaggcctttattgagcgctacttccagagcttccccaaggtgcgggcctggatagaaaggaccctggaggagggccggacgcggggctacgtggagaccctgttcggcaggaggcgctatgtgcccgacctggcctcccgggtccgctcggtgcgggaggcggcggagcggatggccttcaacatgcccgtgcagggcaccgccgccgacctgatgaagatcgccatggtcaagctcttccccaggctaaagcccctgggggcccacctcctcctccaggtgcacgacgagctggtcctggaggtgcccgaggaccgggccgaggaggccaaggccctggtcaaggaggtcatggagaacacctaccccttggacgtgcccctcgaggtggaggtgggcgtgggtcgggactggctggaggcgaagggggattgaagcggtcgac

SEQ ID NO: 3128 - DNA, 2605 bp, Artificial Sequence
  Description of Artificial Sequence: Synthetic DNA sequence of Thermus Rt41A DNA Polymerase S608C
atgaaatacctgctgccgaccgctgctgctggtctgctgctcctcgctgcccagccggcgatggccatggatatcggaattaattcggatccgaattccccactttttgacctggaggaaccccccaagcgggtgcttctggtggacggccaccacctggcctaccgcaccttctacgccctgagcctcaccacctcccggggggagccggtgcagatggtctacggcttcgcccggagcctcctcaaggccttgaaggaggacgggcaggcggtggtcgtggtctttgacgccaaggccccctccttccgccacgaggcctacgaggcctacaaggcgggccgggcccccaccccggaggacttcccccgccagctcgccttggtcaagcggctggtggaccttctgggcctggtccgcctcgaggccccgggttacgaggcggacgacgtcctgggcaccctggccaagaaggccgaaagggaggggatggaggtgcgcatcctcacgggagaccgggacttcttccagctcctctccgagaaggtctcggtcctcctgccggacgggaccctggtcaccccaaaggacgtccaggagaagtacggggtgccgccggagcgctgggtggacttccgcgccctcacgggggaccgctcggacaacatccccggggtggcggggataggggagaagaccgcccttcgactcctcgcggagtgggggagcgtggagaacctcctgaagaacctggaccgggtgaagccggactcggtccggcgcaagatagaggcgcaccttgaggacctccgcctctccttggacctggcccgcatccgcaccgacctccccttggaggtggactttaaggccctgcgccgcaggacccccgacctggagggcctgagggcctttttggaggagctggagttcggaagcctccttcatgagttcggcctcctgggaggggagaagccccgggaggaggccccctggcccccgcccgaaggggccttcgtaggcttcctcctctcccgcaaggagcccatgtgggcggagcttctggccctggcggccgccgcagagggccgggtccaccgggcaacaagcccggttgaggccctggccgacctcaaggaggcccgggggttcctggccaaggacctggccgttttggccctgcgggagggggtggccctggaccccacggacgaccccctcctggtggcctacctcctggacccggccaacaccaaccccgagggggtggcccggcgctacgggggcgagttcacggaggacgcagcggagagggccctcctctccgagaggctcttccagaacctctttccccggctttccgagaagctcctctggctctaccaggaggtggagcggcccctctcccgggtcttggcccacatggaggcccggggggtgaggctggacgtcccccttctggaggccctctcctttgagctggagaaggagatggagcgcctggagggggaggtcttccgcttggccggccaccccttcaacctcaactcccgcgaccagctggaaagggtcctctttgacgagctgggccttaccccggtgggtcggacggagaagacgggcaagcgctccaccgcccagggggccctggaggccctccggggggcccaccccatcgtggagctcatcctccagtaccgggagctttccaagctcaaaagcacctacctggaccccctgccccggctcgtccacccgcggacgggccggcttcacacccgcttcaaccagacggccacggccacgggaaggctttccagctgtgaccccaacctgcagaacatccccgtgcgcacccccttggggcagcgcatccgcaaggccttcgtggccgaggaggggtggctccttttggcggcggactactcccagatcgagcttcgggtcctggcccacctctcgggggacgagaacctgaagcgggtcttccgggaggggaaggacatccataccgaaaccgccgcctggatgttcggcttagaccccgctctagtggatccaaagatgcgccgggcggccaagacggtcaacttcggcgtcctctacgggatgtccgcccacaggctctcccaggagctcggcatagactacaaggaggcggaggcctttattgagcgctacttccagagcttccccaaggtgcgggcctggatagaaaggaccctggaggagggccggacgcggggctacgtggagaccctgttcggcaggaggcgctatgtgcccgacctggcctcccgggtccgctcggtgcgggaggcggcggagcggatggccttcaacatgcccgtgcagggcaccgccgccgacctgatgaagatcgccatggtcaagctcttccccaggctaaagcccctgggggcccacctcctcctccaggtgcacgacgagctggtcctggaggtgcccgaggaccgggccgaggaggccaaggccctggtcaaggaggtcatggagaacacctaccccttggacgtgcccctcgaggtggaggtgggcgtgggtcgggactggctggaggcgaagggggattgaagcggtcgac

SEQ ID NO: 3129 - DNA, 2605 bp, Artificial Sequence
  Description of Artificial Sequence: Synthetic DNA sequence of Thermus Rt41A DNA Polymerase S608G
atgaaatacctgctgccgaccgctgctgctggtctgctgctcctcgctgcccagccggcgatggccatggatatcggaattaattcggatccgaattccccactttttgacctggaggaaccccccaagcgggtgcttctggtggacggccaccacctggcctaccgcaccttctacgccctgagcctcaccacctcccggggggagccggtgcagatggtctacggcttcgcccggagcctcctcaaggccttgaaggaggacgggcaggcggtggtcgtggtctttgacgccaaggccccctccttccgccacgaggcctacgaggcctacaaggcgggccgggcccccaccccggaggacttcccccgccagctcgccttggtcaagcggctggtggaccttctgggcctggtccgcctcgaggccccgggttacgaggcggacgacgtcctgggcaccctggccaagaaggccgaaagggaggggatggaggtgcgcatcctcacgggagaccgggacttcttccagctcctctccgagaaggtctcggtcctcctgccggacgggaccctggtcaccccaaaggacgtccaggagaagtacggggtgccgccggagcgctgggtggacttccgcgccctcacgggggaccgctcggacaacatccccggggtggcggggataggggagaagaccgcccttcgactcctcgcggagtgggggagcgtggagaacctcctgaagaacctggaccgggtgaagccggactcggtccggcgcaagatagaggcgcaccttgaggacctccgcctctccttggacctggcccgcatccgcaccgacctccccttggaggtggactttaaggccctgcgccgcaggacccccgacctggagggcctgagggcctttttggaggagctggagttcggaagcctccttcatgagttcggcctcctgggaggggagaagccccgggaggaggccccctggcccccgcccgaaggggccttcgtaggcttcctcctctcccgcaaggagcccatgtgggcggagcttctggccctggcggccgccgcagagggccgggtccaccgggcaacaagcccggttgaggccctggccgacctcaaggaggcccgggggttcctggccaaggacctggccgttttggccctgcgggagggggtggccctggaccccacggacgaccccctcctggtggcctacctcctggacccggccaacaccaaccccgagggggtggcccggcgctacgggggcgagttcacggaggacgcagcggagagggccctcctctccgagaggctcttccagaacctctttccccggctttccgagaagctcctctggctctaccaggaggtggagcggcccctctcccgggtcttggcccacatggaggcccggggggtgaggctggacgtcccccttctggaggccctctcctttgagctggagaaggagatggagcgcctggagggggaggtcttccgcttggccggccaccccttcaacctcaactcccgcgaccagctggaaagggtcctctttgacgagctgggccttaccccggtgggtcggacggagaagacgggcaagcgctccaccgcccagggggccctggaggccctccggggggcccaccccatcgtggagctcatcctccagtaccgggagctttccaagctcaaaagcacctacctggaccccctgccccggctcgtccacccgcggacgggccggcttcacacccgcttcaaccagacggccacggccacgggaaggctttccagcggtgaccccaacctgcagaacatccccgtgcgcacccccttggggcagcgcatccgcaaggccttcgtggccgaggaggggtggctccttttggcggcggactactcccagatcgagcttcgggtcctggcccacctctcgggggacgagaacctgaagcgggtcttccgggaggggaaggacatccataccgaaaccgccgcctggatgttcggcttagaccccgctctagtggatccaaagatgcgccgggcggccaagacggtcaacttcggcgtcctctacgggatgtccgcccacaggctctcccaggagctcggcatagactacaaggaggcggaggcctttattgagcgctacttccagagcttccccaaggtgcgggcctggatagaaaggaccctggaggagggccggacgcggggctacgtggagaccctgttcggcaggaggcgctatgtgcccgacctggcctcccgggtccgctcggtgcgggaggcggcggagcggatggccttcaacatgcccgtgcagggcaccgccgccgacctgatgaagatcgccatggtcaagctcttccccaggctaaagcccctgggggcccacctcctcctccaggtgcacgacgagctggtcctggaggtgcccgaggaccgggccgaggaggccaaggccctggtcaaggaggtcatggagaacacctaccccttggacgtgcccctcgaggtggaggtgggcgtgggtcgggactggctggaggcgaagggggattgaagcggtcgac

SEQ ID NO: 3130 - DNA, 2605 bp, Artificial Sequence
  Description of Artificial Sequence: Synthetic DNA sequence of Thermus Rt41A DNA Polymerase S608Q
atgaaatacctgctgccgaccgctgctgctggtctgctgctcctcgctgcccagccggcgatggccatggatatcggaattaattcggatccgaattccccactttttgacctggaggaaccccccaagcgggtgcttctggtggacggccaccacctggcctaccgcaccttctacgccctgagcctcaccacctcccggggggagccggtgcagatggtctacggcttcgcccggagcctcctcaaggccttgaaggaggacgggcaggcggtggtcgtggtctttgacgccaaggccccctccttccgccacgaggcctacgaggcctacaaggcgggccgggcccccaccccggaggacttcccccgccagctcgccttggtcaagcggctggtggaccttctgggcctggtccgcctcgaggccccgggttacgaggcggacgacgtcctgggcaccctggccaagaaggccgaaagggaggggatggaggtgcgcatcctcacgggagaccgggacttcttccagctcctctccgagaaggtctcggtcctcctgccggacgggaccctggtcaccccaaaggacgtccaggagaagtacggggtgccgccggagcgctgggtggacttccgcgccctcacgggggaccgctcggacaacatccccggggtggcggggataggggagaagaccgcccttcgactcctcgcggagtgggggagcgtggagaacctcctgaagaacctggaccgggtgaagccggactcggtccggcgcaagatagaggcgcaccttgaggacctccgcctctccttggacctggcccgcatccgcaccgacctccccttggaggtggactttaaggccctgcgccgcaggacccccgacctggagggcctgagggcctttttggaggagctggagttcggaagcctccttcatgagttcggcctcctgggaggggagaagccccgggaggaggccccctggcccccgcccgaaggggccttcgtaggcttcctcctctcccgcaaggagcccatgtgggcggagcttctggccctggcggccgccgcagagggccgggtccaccgggcaacaagcccggttgaggccctggccgacctcaaggaggcccgggggttcctggccaaggacctggccgttttggccctgcgggagggggtggccctggaccccacggacgaccccctcctggtggcctacctcctggacccggccaacaccaaccccgagggggtggcccggcgctacgggggcgagttcacggaggacgcagcggagagggccctcctctccgagaggctcttccagaacctctttccccggctttccgagaagctcctctggctctaccaggaggtggagcggcccctctcccgggtcttggcccacatggaggcccggggggtgaggctggacgtcccccttctggaggccctctcctttgagctggagaaggagatggagcgcctggagggggaggtcttccgcttggccggccaccccttcaacctcaactcccgcgaccagctggaaagggtcctctttgacgagctgggccttaccccggtgggtcggacggagaagacgggcaagcgctccaccgcccagggggccctggaggccctccggggggcccaccccatcgtggagctcatcctccagtaccgggagctttccaagctcaaaagcacctacctggaccccctgccccggctcgtccacccgcggacgggccggcttcacacccgcttcaaccagacggccacggccacgggaaggctttccagccaagaccccaacctgcagaacatccccgtgcgcacccccttggggcagcgcatccgcaaggccttcgtggccgaggaggggtggctccttttggcggcggactactcccagatcgagcttcgggtcctggcccacctctcgggggacgagaacctgaagcgggtcttccgggaggggaaggacatccataccgaaaccgccgcctggatgttcggcttagaccccgctctagtggatccaaagatgcgccgggcggccaagacggtcaacttcggcgtcctctacgggatgtccgcccacaggctctcccaggagctcggcatagactacaaggaggcggaggcctttattgagcgctacttccagagcttccccaaggtgcgggcctggatagaaaggaccctggaggagggccggacgcggggctacgtggagaccctgttcggcaggaggcgctatgtgcccgacctggcctcccgggtccgctcggtgcgggaggcggcggagcggatggccttcaacatgcccgtgcagggcaccgccgccgacctgatgaagatcgccatggtcaagctcttccccaggctaaagcccctgggggcccacctcctcctccaggtgcacgacgagctggtcctggaggtgcccgaggaccgggccgaggaggccaaggccctggtcaaggaggtcatggagaacacctaccccttggacgtgcccctcgaggtggaggtgggcgtgggtcgggactggctggaggcgaagggggattgaagcggtcgac

SEQ ID NO: 3131 - DNA, 2605 bp, Artificial Sequence
  Description of Artificial Sequence: Synthetic DNA sequence of Thermus Rt41A DNA Polymerase S608H
atgaaatacctgctgccgaccgctgctgctggtctgctgctcctcgctgcccagccggcgatggccatggatatcggaattaattcggatccgaattccccactttttgacctggaggaaccccccaagcgggtgcttctggtggacggccaccacctggcctaccgcaccttctacgccctgagcctcaccacctcccggggggagccggtgcagatggtctacggcttcgcccggagcctcctcaaggccttgaaggaggacgggcaggcggtggtcgtggtctttgacgccaaggccccctccttccgccacgaggcctacgaggcctacaaggcgggccgggcccccaccccggaggacttcccccgccagctcgccttggtcaagcggctggtggaccttctgggcctggtccgcctcgaggccccgggttacgaggcggacgacgtcctgggcaccctggccaagaaggccgaaagggaggggatggaggtgcgcatcctcacgggagaccgggacttcttccagctcctctccgagaaggtctcggtcctcctgccggacgggaccctggtcaccccaaaggacgtccaggagaagtacggggtgccgccggagcgctgggtggacttccgcgccctcacgggggaccgctcggacaacatccccggggtggcggggataggggagaagaccgcccttcgactcctcgcggagtgggggagcgtggagaacctcctgaagaacctggaccgggtgaagccggactcggtccggcgcaagatagaggcgcaccttgaggacctccgcctctccttggacctggcccgcatccgcaccgacctccccttggaggtggactttaaggccctgcgccgcaggacccccgacctggagggcctgagggcctttttggaggagctggagttcggaagcctccttcatgagttcggcctcctgggaggggagaagccccgggaggaggccccctggcccccgcccgaaggggccttcgtaggcttcctcctctcccgcaaggagcccatgtgggcggagcttctggccctggcggccgccgcagagggccgggtccaccgggcaacaagcccggttgaggccctggccgacctcaaggaggcccgggggttcctggccaaggacctggccgttttggccctgcgggagggggtggccctggaccccacggacgaccccctcctggtggcctacctcctggacccggccaacaccaaccccgagggggtggcccggcgctacgggggcgagttcacggaggacgcagcggagagggccctcctctccgagaggctcttccagaacctctttccccggctttccgagaagctcctctggctctaccaggaggtggagcggcccctctcccgggtcttggcccacatggaggcccggggggtgaggctggacgtcccccttctggaggccctctcctttgagctggagaaggagatggagcgcctggagggggaggtcttccgcttggccggccaccccttcaacctcaactcccgcgaccagctggaaagggtcctctttgacgagctgggccttaccccggtgggtcggacggagaagacgggcaagcgctccaccgcccagggggccctggaggccctccggggggcccaccccatcgtggagctcatcctccagtaccgggagctttccaagctcaaaagcacctacctggaccccctgccccggctcgtccacccgcggacgggccggcttcacacccgcttcaaccagacggccacggccacgggaaggctttccagccatgaccccaacctgcagaacatccccgtgcgcacccccttggggcagcgcatccgcaaggccttcgtggccgaggaggggtggctccttttggcggcggactactcccagatcgagcttcgggtcctggcccacctctcgggggacgagaacctgaagcgggtcttccgggaggggaaggacatccataccgaaaccgccgcctggatgttcggcttagaccccgctctagtggatccaaagatgcgccgggcggccaagacggtcaacttcggcgtcctctacgggatgtccgcccacaggctctcccaggagctcggcatagactacaaggaggcggaggcctttattgagcgctacttccagagcttccccaaggtgcgggcctggatagaaaggaccctggaggagggccggacgcggggctacgtggagaccctgttcggcaggaggcgctatgtgcccgacctggcctcccgggtccgctcggtgcgggaggcggcggagcggatggccttcaacatgcccgtgcagggcaccgccgccgacctgatgaagatcgccatggtcaagctcttccccaggctaaagcccctgggggcccacctcctcctccaggtgcacgacgagctggtcctggaggtgcccgaggaccgggccgaggaggccaaggccctggtcaaggaggtcatggagaacacctaccccttggacgtgcccctcgaggtggaggtgggcgtgggtcgggactggctggaggcgaagggggattgaagcggtcgac

SEQ ID NO: 3132 - DNA, 2605 bp, Artificial Sequence
  Description of Artificial Sequence: Synthetic DNA sequence of Thermus Rt41A DNA Polymerase S608I
atgaaatacctgctgccgaccgctgctgctggtctgctgctcctcgctgcccagccggcgatggccatggatatcggaattaattcggatccgaattccccactttttgacctggaggaaccccccaagcgggtgcttctggtggacggccaccacctggcctaccgcaccttctacgccctgagcctcaccacctcccggggggagccggtgcagatggtctacggcttcgcccggagcctcctcaaggccttgaaggaggacgggcaggcggtggtcgtggtctttgacgccaaggccccctccttccgccacgaggcctacgaggcctacaaggcgggccgggcccccaccccggaggacttcccccgccagctcgccttggtcaagcggctggtggaccttctgggcctggtccgcctcgaggccccgggttacgaggcggacgacgtcctgggcaccctggccaagaaggccgaaagggaggggatggaggtgcgcatcctcacgggagaccgggacttcttccagctcctctccgagaaggtctcggtcctcctgccggacgggaccctggtcaccccaaaggacgtccaggagaagtacggggtgccgccggagcgctgggtggacttccgcgccctcacgggggaccgctcggacaacatccccggggtggcggggataggggagaagaccgcccttcgactcctcgcggagtgggggagcgtggagaacctcctgaagaacctggaccgggtgaagccggactcggtccggcgcaagatagaggcgcaccttgaggacctccgcctctccttggacctggcccgcatccgcaccgacctccccttggaggtggactttaaggccctgcgccgcaggacccccgacctggagggcctgagggcctttttggaggagctggagttcggaagcctccttcatgagttcggcctcctgggaggggagaagccccgggaggaggccccctggcccccgcccgaaggggccttcgtaggcttcctcctctcccgcaaggagcccatgtgggcggagcttctggccctggcggccgccgcagagggccgggtccaccgggcaacaagcccggttgaggccctggccgacctcaaggaggcccgggggttcctggccaaggacctggccgttttggccctgcgggagggggtggccctggaccccacggacgaccccctcctggtggcctacctcctggacccggccaacaccaaccccgagggggtggcccggcgctacgggggcgagttcacggaggacgcagcggagagggccctcctctccgagaggctcttccagaacctctttccccggctttccgagaagctcctctggctctaccaggaggtggagcggcccctctcccgggtcttggcccacatggaggcccggggggtgaggctggacgtcccccttctggaggccctctcctttgagctggagaaggagatggagcgcctggagggggaggtcttccgcttggccggccaccccttcaacctcaactcccgcgaccagctggaaagggtcctctttgacgagctgggccttaccccggtgggtcggacggagaagacgggcaagcgctccaccgcccagggggccctggaggccctccggggggcccaccccatcgtggagctcatcctccagtaccgggagctttccaagctcaaaagcacctacctggaccccctgccccggctcgtccacccgcggacgggccggcttcacacccgcttcaaccagacggccacggccacgggaaggctttccagcattgaccccaacctgcagaacatccccgtgcgcacccccttggggcagcgcatccgcaaggccttcgtggccgaggaggggtggctccttttggcggcggactactcccagatcgagcttcgggtcctggcccacctctcgggggacgagaacctgaagcgggtcttccgggaggggaaggacatccataccgaaaccgccgcctggatgttcggcttagaccccgctctagtggatccaaagatgcgccgggcggccaagacggtcaacttcggcgtcctctacgggatgtccgcccacaggctctcccaggagctcggcatagactacaaggaggcggaggcctttattgagcgctacttccagagcttccccaaggtgcgggcctggatagaaaggaccctggaggagggccggacgcggggctacgtggagaccctgttcggcaggaggcgctatgtgcccgacctggcctcccgggtccgctcggtgcgggaggcggcggagcggatggccttcaacatgcccgtgcagggcaccgccgccgacctgatgaagatcgccatggtcaagctcttccccaggctaaagcccctgggggcccacctcctcctccaggtgcacgacgagctggtcctggaggtgcccgaggaccgggccgaggaggccaaggccctggtcaaggaggtcatggagaacacctaccccttggacgtgcccctcgaggtggaggtgggcgtgggtcgggactggctggaggcgaagggggattgaagcggtcgac

SEQ ID NO: 3133 - DNA, 2605 bp, Artificial Sequence
  Description of Artificial Sequence: Synthetic DNA sequence of Thermus Rt41A DNA Polymerase S608L
atgaaatacctgctgccgaccgctgctgctggtctgctgctcctcgctgcccagccggcgatggccatggatatcggaattaattcggatccgaattccccactttttgacctggaggaaccccccaagcgggtgcttctggtggacggccaccacctggcctaccgcaccttctacgccctgagcctcaccacctcccggggggagccggtgcagatggtctacggcttcgcccggagcctcctcaaggccttgaaggaggacgggcaggcggtggtcgtggtctttgacgccaaggccccctccttccgccacgaggcctacgaggcctacaaggcgggccgggcccccaccccggaggacttcccccgccagctcgccttggtcaagcggctggtggaccttctgggcctggtccgcctcgaggccccgggttacgaggcggacgacgtcctgggcaccctggccaagaaggccgaaagggaggggatggaggtgcgcatcctcacgggagaccgggacttcttccagctcctctccgagaaggtctcggtcctcctgccggacgggaccctggtcaccccaaaggacgtccaggagaagtacggggtgccgccggagcgctgggtggacttccgcgccctcacgggggaccgctcggacaacatccccggggtggcggggataggggagaagaccgcccttcgactcctcgcggagtgggggagcgtggagaacctcctgaagaacctggaccgggtgaagccggactcggtccggcgcaagatagaggcgcaccttgaggacctccgcctctccttggacctggcccgcatccgcaccgacctccccttggaggtggactttaaggccctgcgccgcaggacccccgacctggagggcctgagggcctttttggaggagctggagttcggaagcctccttcatgagttcggcctcctgggaggggagaagccccgggaggaggccccctggcccccgcccgaaggggccttcgtaggcttcctcctctcccgcaaggagcccatgtgggcggagcttctggccctggcggccgccgcagagggccgggtccaccgggcaacaagcccggttgaggccctggccgacctcaaggaggcccgggggttcctggccaaggacctggccgttttggccctgcgggagggggtggccctggaccccacggacgaccccctcctggtggcctacctcctggacccggccaacaccaaccccgagggggtggcccggcgctacgggggcgagttcacggaggacgcagcggagagggccctcctctccgagaggctcttccagaacctctttccccggctttccgagaagctcctctggctctaccaggaggtggagcggcccctctcccgggtcttggcccacatggaggcccggggggtgaggctggacgtcccccttctggaggccctctcctttgagctggagaaggagatggagcgcctggagggggaggtcttccgcttggccggccaccccttcaacctcaactcccgcgaccagctggaaagggtcctctttgacgagctgggccttaccccggtgggtcggacggagaagacgggcaagcgctccaccgcccagggggccctggaggccctccggggggcccaccccatcgtggagctcatcctccagtaccgggagctttccaagctcaaaagcacctacctggaccccctgccccggctcgtccacccgcggacgggccggcttcacacccgcttcaaccagacggccacggccacgggaaggctttccagcttagaccccaacctgcagaacatccccgtgcgcacccccttggggcagcgcatccgcaaggccttcgtggccgaggaggggtggctccttttggcggcggactactcccagatcgagcttcgggtcctggcccacctctcgggggacgagaacctgaagcgggtcttccgggaggggaaggacatccataccgaaaccgccgcctggatgttcggcttagaccccgctctagtggatccaaagatgcgccgggcggccaagacggtcaacttcggcgtcctctacgggatgtccgcccacaggctctcccaggagctcggcatagactacaaggaggcggaggcctttattgagcgctacttccagagcttccccaaggtgcgggcctggatagaaaggaccctggaggagggccggacgcggggctacgtggagaccctgttcggcaggaggcgctatgtgcccgacctggcctcccgggtccgctcggtgcgggaggcggcggagcggatggccttcaacatgcccgtgcagggcaccgccgccgacctgatgaagatcgccatggtcaagctcttccccaggctaaagcccctgggggcccacctcctcctccaggtgcacgacgagctggtcctggaggtgcccgaggaccgggccgaggaggccaaggccctggtcaaggaggtcatggagaacacctaccccttggacgtgcccctcgaggtggaggtgggcgtgggtcgggactggctggaggcgaagggggattgaagcggtcgac

SEQ ID NO: 3134 - DNA, 2605 bp, Artificial Sequence
  Description of Artificial Sequence: Synthetic DNA sequence of Thermus Rt41A DNA Polymerase S608K
atgaaatacctgctgccgaccgctgctgctggtctgctgctcctcgctgcccagccggcgatggccatggatatcggaattaattcggatccgaattccccactttttgacctggaggaaccccccaagcgggtgcttctggtggacggccaccacctggcctaccgcaccttctacgccctgagcctcaccacctcccggggggagccggtgcagatggtctacggcttcgcccggagcctcctcaaggccttgaaggaggacgggcaggcggtggtcgtggtctttgacgccaaggccccctccttccgccacgaggcctacgaggcctacaaggcgggccgggcccccaccccggaggacttcccccgccagctcgccttggtcaagcggctggtggaccttctgggcctggtccgcctcgaggccccgggttacgaggcggacgacgtcctgggcaccctggccaagaaggccgaaagggaggggatggaggtgcgcatcctcacgggagaccgggacttcttccagctcctctccgagaaggtctcggtcctcctgccggacgggaccctggtcaccccaaaggacgtccaggagaagtacggggtgccgccggagcgctgggtggacttccgcgccctcacgggggaccgctcggacaacatccccggggtggcggggataggggagaagaccgcccttcgactcctcgcggagtgggggagcgtggagaacctcctgaagaacctggaccgggtgaagccggactcggtccggcgcaagatagaggcgcaccttgaggacctccgcctctccttggacctggcccgcatccgcaccgacctccccttggaggtggactttaaggccctgcgccgcaggacccccgacctggagggcctgagggcctttttggaggagctggagttcggaagcctccttcatgagttcggcctcctgggaggggagaagccccgggaggaggccccctggcccccgcccgaaggggccttcgtaggcttcctcctctcccgcaaggagcccatgtgggcggagcttctggccctggcggccgccgcagagggccgggtccaccgggcaacaagcccggttgaggccctggccgacctcaaggaggcccgggggttcctggccaaggacctggccgttttggccctgcgggagggggtggccctggaccccacggacgaccccctcctggtggcctacctcctggacccggccaacaccaaccccgagggggtggcccggcgctacgggggcgagttcacggaggacgcagcggagagggccctcctctccgagaggctcttccagaacctctttccccggctttccgagaagctcctctggctctaccaggaggtggagcggcccctctcccgggtcttggcccacatggaggcccggggggtgaggctggacgtcccccttctggaggccctctcctttgagctggagaaggagatggagcgcctggagggggaggtcttccgcttggccggccaccccttcaacctcaactcccgcgaccagctggaaagggtcctctttgacgagctgggccttaccccggtgggtcggacggagaagacgggcaagcgctccaccgcccagggggccctggaggccctccggggggcccaccccatcgtggagctcatcctccagtaccgggagctttccaagctcaaaagcacctacctggaccccctgccccggctcgtccacccgcggacgggccggcttcacacccgcttcaaccagacggccacggccacgggaaggctttccagcaaagaccccaacctgcagaacatccccgtgcgcacccccttggggcagcgcatccgcaaggccttcgtggccgaggaggggtggctccttttggcggcggactactcccagatcgagcttcgggtcctggcccacctctcgggggacgagaacctgaagcgggtcttccgggaggggaaggacatccataccgaaaccgccgcctggatgttcggcttagaccccgctctagtggatccaaagatgcgccgggcggccaagacggtcaacttcggcgtcctctacgggatgtccgcccacaggctctcccaggagctcggcatagactacaaggaggcggaggcctttattgagcgctacttccagagcttccccaaggtgcgggcctggatagaaaggaccctggaggagggccggacgcggggctacgtggagaccctgttcggcaggaggcgctatgtgcccgacctggcctcccgggtccgctcggtgcgggaggcggcggagcggatggccttcaacatgcccgtgcagggcaccgccgccgacctgatgaagatcgccatggtcaagctcttccccaggctaaagcccctgggggcccacctcctcctccaggtgcacgacgagctggtcctggaggtgcccgaggaccgggccgaggaggccaaggccctggtcaaggaggtcatggagaacacctaccccttggacgtgcccctcgaggtggaggtgggcgtgggtcgggactggctggaggcgaagggggattgaagcggtcgac

SEQ ID NO: 3135 - DNA, 2605 bp, Artificial Sequence
  Description of Artificial Sequence: Synthetic DNA sequence of Thermus Rt41A DNA Polymerase S608E
atgaaatacctgctgccgaccgctgctgctggtctgctgctcctcgctgcccagccggcgatggccatggatatcggaattaattcggatccgaattccccactttttgacctggaggaaccccccaagcgggtgcttctggtggacggccaccacctggcctaccgcaccttctacgccctgagcctcaccacctcccggggggagccggtgcagatggtctacggcttcgcccggagcctcctcaaggccttgaaggaggacgggcaggcggtggtcgtggtctttgacgccaaggccccctccttccgccacgaggcctacgaggcctacaaggcgggccgggcccccaccccggaggacttcccccgccagctcgccttggtcaagcggctggtggaccttctgggcctggtccgcctcgaggccccgggttacgaggcggacgacgtcctgggcaccctggccaagaaggccgaaagggaggggatggaggtgcgcatcctcacgggagaccgggacttcttccagctcctctccgagaaggtctcggtcctcctgccggacgggaccctggtcaccccaaaggacgtccaggagaagtacggggtgccgccggagcgctgggtggacttccgcgccctcacgggggaccgctcggacaacatccccggggtggcggggataggggagaagaccgcccttcgactcctcgcggagtgggggagcgtggagaacctcctgaagaacctggaccgggtgaagccggactcggtccggcgcaagatagaggcgcaccttgaggacctccgcctctccttggacctggcccgcatccgcaccgacctccccttggaggtggactttaaggccctgcgccgcaggacccccgacctggagggcctgagggcctttttggaggagctggagttcggaagcctccttcatgagttcggcctcctgggaggggagaagccccgggaggaggccccctggcccccgcccgaaggggccttcgtaggcttcctcctctcccgcaaggagcccatgtgggcggagcttctggccctggcggccgccgcagagggccgggtccaccgggcaacaagcccggttgaggccctggccgacctcaaggaggcccgggggttcctggccaaggacctggccgttttggccctgcgggagggggtggccctggaccccacggacgaccccctcctggtggcctacctcctggacccggccaacaccaaccccgagggggtggcccggcgctacgggggcgagttcacggaggacgcagcggagagggccctcctctccgagaggctcttccagaacctctttccccggctttccgagaagctcctctggctctaccaggaggtggagcggcccctctcccgggtcttggcccacatggaggcccggggggtgaggctggacgtcccccttctggaggccctctcctttgagctggagaaggagatggagcgcctggagggggaggtcttccgcttggccggccaccccttcaacctcaactcccgcgaccagctggaaagggtcctctttgacgagctgggccttaccccggtgggtcggacggagaagacgggcaagcgctccaccgcccagggggccctggaggccctccggggggcccaccccatcgtggagctcatcctccagtaccgggagctttccaagctcaaaagcacctacctggaccccctgccccggctcgtccacccgcggacgggccggcttcacacccgcttcaaccagacggccacggccacgggaaggctttccagcgaagaccccaacctgcagaacatccccgtgcgcacccccttggggcagcgcatccgcaaggccttcgtggccgaggaggggtggctccttttggcggcggactactcccagatcgagcttcgggtcctggcccacctctcgggggacgagaacctgaagcgggtcttccgggaggggaaggacatccataccgaaaccgccgcctggatgttcggcttagaccccgctctagtggatccaaagatgcgccgggcggccaagacggtcaacttcggcgtcctctacgggatgtccgcccacaggctctcccaggagctcggcatagactacaaggaggcggaggcctttattgagcgctacttccagagcttccccaaggtgcgggcctggatagaaaggaccctggaggagggccggacgcggggctacgtggagaccctgttcggcaggaggcgctatgtgcccgacctggcctcccgggtccgctcggtgcgggaggcggcggagcggatggccttcaacatgcccgtgcagggcaccgccgccgacctgatgaagatcgccatggtcaagctcttccccaggctaaagcccctgggggcccacctcctcctccaggtgcacgacgagctggtcctggaggtgcccgaggaccgggccgaggaggccaaggccctggtcaaggaggtcatggagaacacctaccccttggacgtgcccctcgaggtggaggtgggcgtgggtcgggactggctggaggcgaagggggattgaagcggtcgac

SEQ ID NO: 3136 - DNA, 2605 bp, Artificial Sequence
  Description of Artificial Sequence: Synthetic DNA sequence of Thermus Rt41A DNA Polymerase S608D
atgaaatacctgctgccgaccgctgctgctggtctgctgctcctcgctgcccagccggcgatggccatggatatcggaattaattcggatccgaattccccactttttgacctggaggaaccccccaagcgggtgcttctggtggacggccaccacctggcctaccgcaccttctacgccctgagcctcaccacctcccggggggagccggtgcagatggtctacggcttcgcccggagcctcctcaaggccttgaaggaggacgggcaggcggtggtcgtggtctttgacgccaaggccccctccttccgccacgaggcctacgaggcctacaaggcgggccgggcccccaccccggaggacttcccccgccagctcgccttggtcaagcggctggtggaccttctgggcctggtccgcctcgaggccccgggttacgaggcggacgacgtcctgggcaccctggccaagaaggccgaaagggaggggatggaggtgcgcatcctcacgggagaccgggacttcttccagctcctctccgagaaggtctcggtcctcctgccggacgggaccctggtcaccccaaaggacgtccaggagaagtacggggtgccgccggagcgctgggtggacttccgcgccctcacgggggaccgctcggacaacatccccggggtggcggggataggggagaagaccgcccttcgactcctcgcggagtgggggagcgtggagaacctcctgaagaacctggaccgggtgaagccggactcggtccggcgcaagatagaggcgcaccttgaggacctccgcctctccttggacctggcccgcatccgcaccgacctccccttggaggtggactttaaggccctgcgccgcaggacccccgacctggagggcctgagggcctttttggaggagctggagttcggaagcctccttcatgagttcggcctcctgggaggggagaagccccgggaggaggccccctggcccccgcccgaaggggccttcgtaggcttcctcctctcccgcaaggagcccatgtgggcggagcttctggccctggcggccgccgcagagggccgggtccaccgggcaacaagcccggttgaggccctggccgacctcaaggaggcccgggggttcctggccaaggacctggccgttttggccctgcgggagggggtggccctggaccccacggacgaccccctcctggtggcctacctcctggacccggccaacaccaaccccgagggggtggcccggcgctacgggggcgagttcacggaggacgcagcggagagggccctcctctccgagaggctcttccagaacctctttccccggctttccgagaagctcctctggctctaccaggaggtggagcggcccctctcccgggtcttggcccacatggaggcccggggggtgaggctggacgtcccccttctggaggccctctcctttgagctggagaaggagatggagcgcctggagggggaggtcttccgcttggccggccaccccttcaacctcaactcccgcgaccagctggaaagggtcctctttgacgagctgggccttaccccggtgggtcggacggagaagacgggcaagcgctccaccgcccagggggccctggaggccctccggggggcccaccccatcgtggagctcatcctccagtaccgggagctttccaagctcaaaagcacctacctggaccccctgccccggctcgtccacccgcggacgggccggcttcacacccgcttcaaccagacggccacggccacgggaaggctttccagcgatgaccccaacctgcagaacatccccgtgcgcacccccttggggcagcgcatccgcaaggccttcgtggccgaggaggggtggctccttttggcggcggactactcccagatcgagcttcgggtcctggcccacctctcgggggacgagaacctgaagcgggtcttccgggaggggaaggacatccataccgaaaccgccgcctggatgttcggcttagaccccgctctagtggatccaaagatgcgccgggcggccaagacggtcaacttcggcgtcctctacgggatgtccgcccacaggctctcccaggagctcggcatagactacaaggaggcggaggcctttattgagcgctacttccagagcttccccaaggtgcgggcctggatagaaaggaccctggaggagggccggacgcggggctacgtggagaccctgttcggcaggaggcgctatgtgcccgacctggcctcccgggtccgctcggtgcgggaggcggcggagcggatggccttcaacatgcccgtgcagggcaccgccgccgacctgatgaagatcgccatggtcaagctcttccccaggctaaagcccctgggggcccacctcctcctccaggtgcacgacgagctggtcctggaggtgcccgaggaccgggccgaggaggccaaggccctggtcaaggaggtcatggagaacacctaccccttggacgtgcccctcgaggtggaggtgggcgtgggtcgggactggctggaggcgaagggggattgaagcggtcgac

SEQ ID NO: 3137 - DNA, 2605 bp, Artificial Sequence
  Description of Artificial Sequence: Synthetic DNA sequence of Thermus Rt41A DNA Polymerase S608F
atgaaatacctgctgccgaccgctgctgctggtctgctgctcctcgctgcccagccggcgatggccatggatatcggaattaattcggatccgaattccccactttttgacctggaggaaccccccaagcgggtgcttctggtggacggccaccacctggcctaccgcaccttctacgccctgagcctcaccacctcccggggggagccggtgcagatggtctacggcttcgcccggagcctcctcaaggccttgaaggaggacgggcaggcggtggtcgtggtctttgacgccaaggccccctccttccgccacgaggcctacgaggcctacaaggcgggccgggcccccaccccggaggacttcccccgccagctcgccttggtcaagcggctggtggaccttctgggcctggtccgcctcgaggccccgggttacgaggcggacgacgtcctgggcaccctggccaagaaggccgaaagggaggggatggaggtgcgcatcctcacgggagaccgggacttcttccagctcctctccgagaaggtctcggtcctcctgccggacgggaccctggtcaccccaaaggacgtccaggagaagtacggggtgccgccggagcgctgggtggacttccgcgccctcacgggggaccgctcggacaacatccccggggtggcggggataggggagaagaccgcccttcgactcctcgcggagtgggggagcgtggagaacctcctgaagaacctggaccgggtgaagccggactcggtccggcgcaagatagaggcgcaccttgaggacctccgcctctccttggacctggcccgcatccgcaccgacctccccttggaggtggactttaaggccctgcgccgcaggacccccgacctggagggcctgagggcctttttggaggagctggagttcggaagcctccttcatgagttcggcctcctgggaggggagaagccccgggaggaggccccctggcccccgcccgaaggggccttcgtaggcttcctcctctcccgcaaggagcccatgtgggcggagcttctggccctggcggccgccgcagagggccgggtccaccgggcaacaagcccggttgaggccctggccgacctcaaggaggcccgggggttcctggccaaggacctggccgttttggccctgcgggagggggtggccctggaccccacggacgaccccctcctggtggcctacctcctggacccggccaacaccaaccccgagggggtggcccggcgctacgggggcgagttcacggaggacgcagcggagagggccctcctctccgagaggctcttccagaacctctttccccggctttccgagaagctcctctggctctaccaggaggtggagcggcccctctcccgggtcttggcccacatggaggcccggggggtgaggctggacgtcccccttctggaggccctctcctttgagctggagaaggagatggagcgcctggagggggaggtcttccgcttggccggccaccccttcaacctcaactcccgcgaccagctggaaagggtcctctttgacgagctgggccttaccccggtgggtcggacggagaagacgggcaagcgctccaccgcccagggggccctggaggccctccggggggcccaccccatcgtggagctcatcctccagtaccgggagctttccaagctcaaaagcacctacctggaccccctgccccggctcgtccacccgcggacgggccggcttcacacccgcttcaaccagacggccacggccacgggaaggctttccagctttgaccccaacctgcagaacatccccgtgcgcacccccttggggcagcgcatccgcaaggccttcgtggccgaggaggggtggctccttttggcggcggactactcccagatcgagcttcgggtcctggcccacctctcgggggacgagaacctgaagcgggtcttccgggaggggaaggacatccataccgaaaccgccgcctggatgttcggcttagaccccgctctagtggatccaaagatgcgccgggcggccaagacggtcaacttcggcgtcctctacgggatgtccgcccacaggctctcccaggagctcggcatagactacaaggaggcggaggcctttattgagcgctacttccagagcttccccaaggtgcgggcctggatagaaaggaccctggaggagggccggacgcggggctacgtggagaccctgttcggcaggaggcgctatgtgcccgacctggcctcccgggtccgctcggtgcgggaggcggcggagcggatggccttcaacatgcccgtgcagggcaccgccgccgacctgatgaagatcgccatggtcaagctcttccccaggctaaagcccctgggggcccacctcctcctccaggtgcacgacgagctggtcctggaggtgcccgaggaccgggccgaggaggccaaggccctggtcaaggaggtcatggagaacacctaccccttggacgtgcccctcgaggtggaggtgggcgtgggtcgggactggctggaggcgaagggggattgaagcggtcgac

SEQ ID NO: 3138 - DNA, 2605 bp, Artificial Sequence
  Description of Artificial Sequence: Synthetic DNA sequence of Thermus Rt41A DNA Polymerase S608Y
atgaaatacctgctgccgaccgctgctgctggtctgctgctcctcgctgcccagccggcgatggccatggatatcggaattaattcggatccgaattccccactttttgacctggaggaaccccccaagcgggtgcttctggtggacggccaccacctggcctaccgcaccttctacgccctgagcctcaccacctcccggggggagccggtgcagatggtctacggcttcgcccggagcctcctcaaggccttgaaggaggacgggcaggcggtggtcgtggtctttgacgccaaggccccctccttccgccacgaggcctacgaggcctacaaggcgggccgggcccccaccccggaggacttcccccgccagctcgccttggtcaagcggctggtggaccttctgggcctggtccgcctcgaggccccgggttacgaggcggacgacgtcctgggcaccctggccaagaaggccgaaagggaggggatggaggtgcgcatcctcacgggagaccgggacttcttccagctcctctccgagaaggtctcggtcctcctgccggacgggaccctggtcaccccaaaggacgtccaggagaagtacggggtgccgccggagcgctgggtggacttccgcgccctcacgggggaccgctcggacaacatccccggggtggcggggataggggagaagaccgcccttcgactcctcgcggagtgggggagcgtggagaacctcctgaagaacctggaccgggtgaagccggactcggtccggcgcaagatagaggcgcaccttgaggacctccgcctctccttggacctggcccgcatccgcaccgacctccccttggaggtggactttaaggccctgcgccgcaggacccccgacctggagggcctgagggcctttttggaggagctggagttcggaagcctccttcatgagttcggcctcctgggaggggagaagccccgggaggaggccccctggcccccgcccgaaggggccttcgtaggcttcctcctctcccgcaaggagcccatgtgggcggagcttctggccctggcggccgccgcagagggccgggtccaccgggcaacaagcccggttgaggccctggccgacctcaaggaggcccgggggttcctggccaaggacctggccgttttggccctgcgggagggggtggccctggaccccacggacgaccccctcctggtggcctacctcctggacccggccaacaccaaccccgagggggtggcccggcgctacgggggcgagttcacggaggacgcagcggagagggccctcctctccgagaggctcttccagaacctctttccccggctttccgagaagctcctctggctctaccaggaggtggagcggcccctctcccgggtcttggcccacatggaggcccggggggtgaggctggacgtcccccttctggaggccctctcctttgagctggagaaggagatggagcgcctggagggggaggtcttccgcttggccggccaccccttcaacctcaactcccgcgaccagctggaaagggtcctctttgacgagctgggccttaccccggtgggtcggacggagaagacgggcaagcgctccaccgcccagggggccctggaggccctccggggggcccaccccatcgtggagctcatcctccagtaccgggagctttccaagctcaaaagcacctacctggaccccctgccccggctcgtccacccgcggacgggccggcttcacacccgcttcaaccagacggccacggccacgggaaggctttccagctatgaccccaacctgcagaacatccccgtgcgcacccccttggggcagcgcatccgcaaggccttcgtggccgaggaggggtggctccttttggcggcggactactcccagatcgagcttcgggtcctggcccacctctcgggggacgagaacctgaagcgggtcttccgggaggggaaggacatccataccgaaaccgccgcctggatgttcggcttagaccccgctctagtggatccaaagatgcgccgggcggccaagacggtcaacttcggcgtcctctacgggatgtccgcccacaggctctcccaggagctcggcatagactacaaggaggcggaggcctttattgagcgctacttccagagcttccccaaggtgcgggcctggatagaaaggaccctggaggagggccggacgcggggctacgtggagaccctgttcggcaggaggcgctatgtgcccgacctggcctcccgggtccgctcggtgcgggaggcggcggagcggatggccttcaacatgcccgtgcagggcaccgccgccgacctgatgaagatcgccatggtcaagctcttccccaggctaaagcccctgggggcccacctcctcctccaggtgcacgacgagctggtcctggaggtgcccgaggaccgggccgaggaggccaaggccctggtcaaggaggtcatggagaacacctaccccttggacgtgcccctcgaggtggaggtgggcgtgggtcgggactggctggaggcgaagggggattgaagcggtcgac

SEQ ID NO: 3139 - DNA, 2605 bp, Artificial Sequence
  Description of Artificial Sequence: Synthetic DNA sequence of Thermus Rt41A DNA Polymerase S608W
atgaaatacctgctgccgaccgctgctgctggtctgctgctcctcgctgcccagccggcgatggccatggatatcggaattaattcggatccgaattccccactttttgacctggaggaaccccccaagcgggtgcttctggtggacggccaccacctggcctaccgcaccttctacgccctgagcctcaccacctcccggggggagccggtgcagatggtctacggcttcgcccggagcctcctcaaggccttgaaggaggacgggcaggcggtggtcgtggtctttgacgccaaggccccctccttccgccacgaggcctacgaggcctacaaggcgggccgggcccccaccccggaggacttcccccgccagctcgccttggtcaagcggctggtggaccttctgggcctggtccgcctcgaggccccgggttacgaggcggacgacgtcctgggcaccctggccaagaaggccgaaagggaggggatggaggtgcgcatcctcacgggagaccgggacttcttccagctcctctccgagaaggtctcggtcctcctgccggacgggaccctggtcaccccaaaggacgtccaggagaagtacggggtgccgccggagcgctgggtggacttccgcgccctcacgggggaccgctcggacaacatccccggggtggcggggataggggagaagaccgcccttcgactcctcgcggagtgggggagcgtggagaacctcctgaagaacctggaccgggtgaagccggactcggtccggcgcaagatagaggcgcaccttgaggacctccgcctctccttggacctggcccgcatccgcaccgacctccccttggaggtggactttaaggccctgcgccgcaggacccccgacctggagggcctgagggcctttttggaggagctggagttcggaagcctccttcatgagttcggcctcctgggaggggagaagccccgggaggaggccccctggcccccgcccgaaggggccttcgtaggcttcctcctctcccgcaaggagcccatgtgggcggagcttctggccctggcggccgccgcagagggccgggtccaccgggcaacaagcccggttgaggccctggccgacctcaaggaggcccgggggttcctggccaaggacctggccgttttggccctgcgggagggggtggccctggaccccacggacgaccccctcctggtggcctacctcctggacccggccaacaccaaccccgagggggtggcccggcgctacgggggcgagttcacggaggacgcagcggagagggccctcctctccgagaggctcttccagaacctctttccccggctttccgagaagctcctctggctctaccaggaggtggagcggcccctctcccgggtcttggcccacatggaggcccggggggtgaggctggacgtcccccttctggaggccctctcctttgagctggagaaggagatggagcgcctggagggggaggtcttccgcttggccggccaccccttcaacctcaactcccgcgaccagctggaaagggtcctctttgacgagctgggccttaccccggtgggtcggacggagaagacgggcaagcgctccaccgcccagggggccctggaggccctccggggggcccaccccatcgtggagctcatcctccagtaccgggagctttccaagctcaaaagcacctacctggaccccctgccccggctcgtccacccgcggacgggccggcttcacacccgcttcaaccagacggccacggccacgggaaggctttccagctgggaccccaacctgcagaacatccccgtgcgcacccccttggggcagcgcatccgcaaggccttcgtggccgaggaggggtggctccttttggcggcggactactcccagatcgagcttcgggtcctggcccacctctcgggggacgagaacctgaagcgggtcttccgggaggggaaggacatccataccgaaaccgccgcctggatgttcggcttagaccccgctctagtggatccaaagatgcgccgggcggccaagacggtcaacttcggcgtcctctacgggatgtccgcccacaggctctcccaggagctcggcatagactacaaggaggcggaggcctttattgagcgctacttccagagcttccccaaggtgcgggcctggatagaaaggaccctggaggagggccggacgcggggctacgtggagaccctgttcggcaggaggcgctatgtgcccgacctggcctcccgggtccgctcggtgcgggaggcggcggagcggatggccttcaacatgcccgtgcagggcaccgccgccgacctgatgaagatcgccatggtcaagctcttccccaggctaaagcccctgggggcccacctcctcctccaggtgcacgacgagctggtcctggaggtgcccgaggaccgggccgaggaggccaaggccctggtcaaggaggtcatggagaacacctaccccttggacgtgcccctcgaggtggaggtgggcgtgggtcgggactggctggaggcgaagggggattgaagcggtcgac

SEQ ID NO: 3140 - DNA, 2605 bp, Artificial Sequence
  Description of Artificial Sequence: Synthetic DNA sequence of Thermus Rt41A DNA Polymerase S608P
atgaaatacctgctgccgaccgctgctgctggtctgctgctcctcgctgcccagccggcgatggccatggatatcggaattaattcggatccgaattccccactttttgacctggaggaaccccccaagcgggtgcttctggtggacggccaccacctggcctaccgcaccttctacgccctgagcctcaccacctcccggggggagccggtgcagatggtctacggcttcgcccggagcctcctcaaggccttgaaggaggacgggcaggcggtggtcgtggtctttgacgccaaggccccctccttccgccacgaggcctacgaggcctacaaggcgggccgggcccccaccccggaggacttcccccgccagctcgccttggtcaagcggctggtggaccttctgggcctggtccgcctcgaggccccgggttacgaggcggacgacgtcctgggcaccctggccaagaaggccgaaagggaggggatggaggtgcgcatcctcacgggagaccgggacttcttccagctcctctccgagaaggtctcggtcctcctgccggacgggaccctggtcaccccaaaggacgtccaggagaagtacggggtgccgccggagcgctgggtggacttccgcgccctcacgggggaccgctcggacaacatccccggggtggcggggataggggagaagaccgcccttcgactcctcgcggagtgggggagcgtggagaacctcctgaagaacctggaccgggtgaagccggactcggtccggcgcaagatagaggcgcaccttgaggacctccgcctctccttggacctggcccgcatccgcaccgacctccccttggaggtggactttaaggccctgcgccgcaggacccccgacctggagggcctgagggcctttttggaggagctggagttcggaagcctccttcatgagttcggcctcctgggaggggagaagccccgggaggaggccccctggcccccgcccgaaggggccttcgtaggcttcctcctctcccgcaaggagcccatgtgggcggagcttctggccctggcggccgccgcagagggccgggtccaccgggcaacaagcccggttgaggccctggccgacctcaaggaggcccgggggttcctggccaaggacctggccgttttggccctgcgggagggggtggccctggaccccacggacgaccccctcctggtggcctacctcctggacccggccaacaccaaccccgagggggtggcccggcgctacgggggcgagttcacggaggacgcagcggagagggccctcctctccgagaggctcttccagaacctctttccccggctttccgagaagctcctctggctctaccaggaggtggagcggcccctctcccgggtcttggcccacatggaggcccggggggtgaggctggacgtcccccttctggaggccctctcctttgagctggagaaggagatggagcgcctggagggggaggtcttccgcttggccggccaccccttcaacctcaactcccgcgaccagctggaaagggtcctctttgacgagctgggccttaccccggtgggtcggacggagaagacgggcaagcgctccaccgcccagggggccctggaggccctccggggggcccaccccatcgtggagctcatcctccagtaccgggagctttccaagctcaaaagcacctacctggaccccctgccccggctcgtccacccgcggacgggccggcttcacacccgcttcaaccagacggccacggccacgggaaggctttccagccctgaccccaacctgcagaacatccccgtgcgcacccccttggggcagcgcatccgcaaggccttcgtggccgaggaggggtggctccttttggcggcggactactcccagatcgagcttcgggtcctggcccacctctcgggggacgagaacctgaagcgggtcttccgggaggggaaggacatccataccgaaaccgccgcctggatgttcggcttagaccccgctctagtggatccaaagatgcgccgggcggccaagacggtcaacttcggcgtcctctacgggatgtccgcccacaggctctcccaggagctcggcatagactacaaggaggcggaggcctttattgagcgctacttccagagcttccccaaggtgcgggcctggatagaaaggaccctggaggagggccggacgcggggctacgtggagaccctgttcggcaggaggcgctatgtgcccgacctggcctcccgggtccgctcggtgcgggaggcggcggagcggatggccttcaacatgcccgtgcagggcaccgccgccgacctgatgaagatcgccatggtcaagctcttccccaggctaaagcccctgggggcccacctcctcctccaggtgcacgacgagctggtcctggaggtgcccgaggaccgggccgaggaggccaaggccctggtcaaggaggtcatggagaacacctaccccttggacgtgcccctcgaggtggaggtgggcgtgggtcgggactggctggaggcgaagggggattgaagcggtcgac

SEQ ID NO: 3141 - DNA, 2605 bp, Artificial Sequence
  Description of Artificial Sequence: Synthetic DNA sequence of Thermus Rt41A DNA Polymerase S608M
atgaaatacctgctgccgaccgctgctgctggtctgctgctcctcgctgcccagccggcgatggccatggatatcggaattaattcggatccgaattccccactttttgacctggaggaaccccccaagcgggtgcttctggtggacggccaccacctggcctaccgcaccttctacgccctgagcctcaccacctcccggggggagccggtgcagatggtctacggcttcgcccggagcctcctcaaggccttgaaggaggacgggcaggcggtggtcgtggtctttgacgccaaggccccctccttccgccacgaggcctacgaggcctacaaggcgggccgggcccccaccccggaggacttcccccgccagctcgccttggtcaagcggctggtggaccttctgggcctggtccgcctcgaggccccgggttacgaggcggacgacgtcctgggcaccctggccaagaaggccgaaagggaggggatggaggtgcgcatcctcacgggagaccgggacttcttccagctcctctccgagaaggtctcggtcctcctgccggacgggaccctggtcaccccaaaggacgtccaggagaagtacggggtgccgccggagcgctgggtggacttccgcgccctcacgggggaccgctcggacaacatccccggggtggcggggataggggagaagaccgcccttcgactcctcgcggagtgggggagcgtggagaacctcctgaagaacctggaccgggtgaagccggactcggtccggcgcaagatagaggcgcaccttgaggacctccgcctctccttggacctggcccgcatccgcaccgacctccccttggaggtggactttaaggccctgcgccgcaggacccccgacctggagggcctgagggcctttttggaggagctggagttcggaagcctccttcatgagttcggcctcctgggaggggagaagccccgggaggaggccccctggcccccgcccgaaggggccttcgtaggcttcctcctctcccgcaaggagcccatgtgggcggagcttctggccctggcggccgccgcagagggccgggtccaccgggcaacaagcccggttgaggccctggccgacctcaaggaggcccgggggttcctggccaaggacctggccgttttggccctgcgggagggggtggccctggaccccacggacgaccccctcctggtggcctacctcctggacccggccaacaccaaccccgagggggtggcccggcgctacgggggcgagttcacggaggacgcagcggagagggccctcctctccgagaggctcttccagaacctctttccccggctttccgagaagctcctctggctctaccaggaggtggagcggcccctctcccgggtcttggcccacatggaggcccggggggtgaggctggacgtcccccttctggaggccctctcctttgagctggagaaggagatggagcgcctggagggggaggtcttccgcttggccggccaccccttcaacctcaactcccgcgaccagctggaaagggtcctctttgacgagctgggccttaccccggtgggtcggacggagaagacgggcaagcgctccaccgcccagggggccctggaggccctccggggggcccaccccatcgtggagctcatcctccagtaccgggagctttccaagctcaaaagcacctacctggaccccctgccccggctcgtccacccgcggacgggccggcttcacacccgcttcaaccagacggccacggccacgggaaggctttccagcatggaccccaacctgcagaacatccccgtgcgcacccccttggggcagcgcatccgcaaggccttcgtggccgaggaggggtggctccttttggcggcggactactcccagatcgagcttcgggtcctggcccacctctcgggggacgagaacctgaagcgggtcttccgggaggggaaggacatccataccgaaaccgccgcctggatgttcggcttagaccccgctctagtggatccaaagatgcgccgggcggccaagacggtcaacttcggcgtcctctacgggatgtccgcccacaggctctcccaggagctcggcatagactacaaggaggcggaggcctttattgagcgctacttccagagcttccccaaggtgcgggcctggatagaaaggaccctggaggagggccggacgcggggctacgtggagaccctgttcggcaggaggcgctatgtgcccgacctggcctcccgggtccgctcggtgcgggaggcggcggagcggatggccttcaacatgcccgtgcagggcaccgccgccgacctgatgaagatcgccatggtcaagctcttccccaggctaaagcccctgggggcccacctcctcctccaggtgcacgacgagctggtcctggaggtgcccgaggaccgggccgaggaggccaaggccctggtcaaggaggtcatggagaacacctaccccttggacgtgcccctcgaggtggaggtgggcgtgggtcgggactggctggaggcgaagggggattgaagcggtcgac

SEQ ID NO: 3142 - DNA, 2605 bp, Artificial Sequence
  Description of Artificial Sequence: Synthetic DNA sequence of Thermus Rt41A DNA Polymerase S608T
atgaaatacctgctgccgaccgctgctgctggtctgctgctcctcgctgcccagccggcgatggccatggatatcggaattaattcggatccgaattccccactttttgacctggaggaaccccccaagcgggtgcttctggtggacggccaccacctggcctaccgcaccttctacgccctgagcctcaccacctcccggggggagccggtgcagatggtctacggcttcgcccggagcctcctcaaggccttgaaggaggacgggcaggcggtggtcgtggtctttgacgccaaggccccctccttccgccacgaggcctacgaggcctacaaggcgggccgggcccccaccccggaggacttcccccgccagctcgccttggtcaagcggctggtggaccttctgggcctggtccgcctcgaggccccgggttacgaggcggacgacgtcctgggcaccctggccaagaaggccgaaagggaggggatggaggtgcgcatcctcacgggagaccgggacttcttccagctcctctccgagaaggtctcggtcctcctgccggacgggaccctggtcaccccaaaggacgtccaggagaagtacggggtgccgccggagcgctgggtggacttccgcgccctcacgggggaccgctcggacaacatccccggggtggcggggataggggagaagaccgcccttcgactcctcgcggagtgggggagcgtggagaacctcctgaagaacctggaccgggtgaagccggactcggtccggcgcaagatagaggcgcaccttgaggacctccgcctctccttggacctggcccgcatccgcaccgacctccccttggaggtggactttaaggccctgcgccgcaggacccccgacctggagggcctgagggcctttttggaggagctggagttcggaagcctccttcatgagttcggcctcctgggaggggagaagccccgggaggaggccccctggcccccgcccgaaggggccttcgtaggcttcctcctctcccgcaaggagcccatgtgggcggagcttctggccctggcggccgccgcagagggccgggtccaccgggcaacaagcccggttgaggccctggccgacctcaaggaggcccgggggttcctggccaaggacctggccgttttggccctgcgggagggggtggccctggaccccacggacgaccccctcctggtggcctacctcctggacccggccaacaccaaccccgagggggtggcccggcgctacgggggcgagttcacggaggacgcagcggagagggccctcctctccgagaggctcttccagaacctctttccccggctttccgagaagctcctctggctctaccaggaggtggagcggcccctctcccgggtcttggcccacatggaggcccggggggtgaggctggacgtcccccttctggaggccctctcctttgagctggagaaggagatggagcgcctggagggggaggtcttccgcttggccggccaccccttcaacctcaactcccgcgaccagctggaaagggtcctctttgacgagctgggccttaccccggtgggtcggacggagaagacgggcaagcgctccaccgcccagggggccctggaggccctccggggggcccaccccatcgtggagctcatcctccagtaccgggagctttccaagctcaaaagcacctacctggaccccctgccccggctcgtccacccgcggacgggccggcttcacacccgcttcaaccagacggccacggccacgggaaggctttccagcactgaccccaacctgcagaacatccccgtgcgcacccccttggggcagcgcatccgcaaggccttcgtggccgaggaggggtggctccttttggcggcggactactcccagatcgagcttcgggtcctggcccacctctcgggggacgagaacctgaagcgggtcttccgggaggggaaggacatccataccgaaaccgccgcctggatgttcggcttagaccccgctctagtggatccaaagatgcgccgggcggccaagacggtcaacttcggcgtcctctacgggatgtccgcccacaggctctcccaggagctcggcatagactacaaggaggcggaggcctttattgagcgctacttccagagcttccccaaggtgcgggcctggatagaaaggaccctggaggagggccggacgcggggctacgtggagaccctgttcggcaggaggcgctatgtgcccgacctggcctcccgggtccgctcggtgcgggaggcggcggagcggatggccttcaacatgcccgtgcagggcaccgccgccgacctgatgaagatcgccatggtcaagctcttccccaggctaaagcccctgggggcccacctcctcctccaggtgcacgacgagctggtcctggaggtgcccgaggaccgggccgaggaggccaaggccctggtcaaggaggtcatggagaacacctaccccttggacgtgcccctcgaggtggaggtgggcgtgggtcgggactggctggaggcgaagggggattgaagcggtcgac

SEQ ID NO: 3143 - DNA, 2605 bp, Artificial Sequence
  Description of Artificial Sequence: Synthetic DNA sequence of Thermus Rt41A DNA Polymerase S608N
atgaaatacctgctgccgaccgctgctgctggtctgctgctcctcgctgcccagccggcgatggccatggatatcggaattaattcggatccgaattccccactttttgacctggaggaaccccccaagcgggtgcttctggtggacggccaccacctggcctaccgcaccttctacgccctgagcctcaccacctcccggggggagccggtgcagatggtctacggcttcgcccggagcctcctcaaggccttgaaggaggacgggcaggcggtggtcgtggtctttgacgccaaggccccctccttccgccacgaggcctacgaggcctacaaggcgggccgggcccccaccccggaggacttcccccgccagctcgccttggtcaagcggctggtggaccttctgggcctggtccgcctcgaggccccgggttacgaggcggacgacgtcctgggcaccctggccaagaaggccgaaagggaggggatggaggtgcgcatcctcacgggagaccgggacttcttccagctcctctccgagaaggtctcggtcctcctgccggacgggaccctggtcaccccaaaggacgtccaggagaagtacggggtgccgccggagcgctgggtggacttccgcgccctcacgggggaccgctcggacaacatccccggggtggcggggataggggagaagaccgcccttcgactcctcgcggagtgggggagcgtggagaacctcctgaagaacctggaccgggtgaagccggactcggtccggcgcaagatagaggcgcaccttgaggacctccgcctctccttggacctggcccgcatccgcaccgacctccccttggaggtggactttaaggccctgcgccgcaggacccccgacctggagggcctgagggcctttttggaggagctggagttcggaagcctccttcatgagttcggcctcctgggaggggagaagccccgggaggaggccccctggcccccgcccgaaggggccttcgtaggcttcctcctctcccgcaaggagcccatgtgggcggagcttctggccctggcggccgccgcagagggccgggtccaccgggcaacaagcccggttgaggccctggccgacctcaaggaggcccgggggttcctggccaaggacctggccgttttggccctgcgggagggggtggccctggaccccacggacgaccccctcctggtggcctacctcctggacccggccaacaccaaccccgagggggtggcccggcgctacgggggcgagttcacggaggacgcagcggagagggccctcctctccgagaggctcttccagaacctctttccccggctttccgagaagctcctctggctctaccaggaggtggagcggcccctctcccgggtcttggcccacatggaggcccggggggtgaggctggacgtcccccttctggaggccctctcctttgagctggagaaggagatggagcgcctggagggggaggtcttccgcttggccggccaccccttcaacctcaactcccgcgaccagctggaaagggtcctctttgacgagctgggccttaccccggtgggtcggacggagaagacgggcaagcgctccaccgcccagggggccctggaggccctccggggggcccaccccatcgtggagctcatcctccagtaccgggagctttccaagctcaaaagcacctacctggaccccctgccccggctcgtccacccgcggacgggccggcttcacacccgcttcaaccagacggccacggccacgggaaggctttccagcaatgaccccaacctgcagaacatccccgtgcgcacccccttggggcagcgcatccgcaaggccttcgtggccgaggaggggtggctccttttggcggcggactactcccagatcgagcttcgggtcctggcccacctctcgggggacgagaacctgaagcgggtcttccgggaggggaaggacatccataccgaaaccgccgcctggatgttcggcttagaccccgctctagtggatccaaagatgcgccgggcggccaagacggtcaacttcggcgtcctctacgggatgtccgcccacaggctctcccaggagctcggcatagactacaaggaggcggaggcctttattgagcgctacttccagagcttccccaaggtgcgggcctggatagaaaggaccctggaggagggccggacgcggggctacgtggagaccctgttcggcaggaggcgctatgtgcccgacctggcctcccgggtccgctcggtgcgggaggcggcggagcggatggccttcaacatgcccgtgcagggcaccgccgccgacctgatgaagatcgccatggtcaagctcttccccaggctaaagcccctgggggcccacctcctcctccaggtgcacgacgagctggtcctggaggtgcccgaggaccgggccgaggaggccaaggccctggtcaaggaggtcatggagaacacctaccccttggacgtgcccctcgaggtggaggtgggcgtgggtcgggactggctggaggcgaagggggattgaagcggtcgac

SEQ ID NO: 3144 - DNA, 2605 bp, Artificial Sequence
  Description of Artificial Sequence: Synthetic DNA sequence of Thermus Rt41A DNA Polymerase S608V
atgaaatacctgctgccgaccgctgctgctggtctgctgctcctcgctgcccagccggcgatggccatggatatcggaattaattcggatccgaattccccactttttgacctggaggaaccccccaagcgggtgcttctggtggacggccaccacctggcctaccgcaccttctacgccctgagcctcaccacctcccggggggagccggtgcagatggtctacggcttcgcccggagcctcctcaaggccttgaaggaggacgggcaggcggtggtcgtggtctttgacgccaaggccccctccttccgccacgaggcctacgaggcctacaaggcgggccgggcccccaccccggaggacttcccccgccagctcgccttggtcaagcggctggtggaccttctgggcctggtccgcctcgaggccccgggttacgaggcggacgacgtcctgggcaccctggccaagaaggccgaaagggaggggatggaggtgcgcatcctcacgggagaccgggacttcttccagctcctctccgagaaggtctcggtcctcctgccggacgggaccctggtcaccccaaaggacgtccaggagaagtacggggtgccgccggagcgctgggtggacttccgcgccctcacgggggaccgctcggacaacatccccggggtggcggggataggggagaagaccgcccttcgactcctcgcggagtgggggagcgtggagaacctcctgaagaacctggaccgggtgaagccggactcggtccggcgcaagatagaggcgcaccttgaggacctccgcctctccttggacctggcccgcatccgcaccgacctccccttggaggtggactttaaggccctgcgccgcaggacccccgacctggagggcctgagggcctttttggaggagctggagttcggaagcctccttcatgagttcggcctcctgggaggggagaagccccgggaggaggccccctggcccccgcccgaaggggccttcgtaggcttcctcctctcccgcaaggagcccatgtgggcggagcttctggccctggcggccgccgcagagggccgggtccaccgggcaacaagcccggttgaggccctggccgacctcaaggaggcccgggggttcctggccaaggacctggccgttttggccctgcgggagggggtggccctggaccccacggacgaccccctcctggtggcctacctcctggacccggccaacaccaaccccgagggggtggcccggcgctacgggggcgagttcacggaggacgcagcggagagggccctcctctccgagaggctcttccagaacctctttccccggctttccgagaagctcctctggctctaccaggaggtggagcggcccctctcccgggtcttggcccacatggaggcccggggggtgaggctggacgtcccccttctggaggccctctcctttgagctggagaaggagatggagcgcctggagggggaggtcttccgcttggccggccaccccttcaacctcaactcccgcgaccagctggaaagggtcctctttgacgagctgggccttaccccggtgggtcggacggagaagacgggcaagcgctccaccgcccagggggccctggaggccctccggggggcccaccccatcgtggagctcatcctccagtaccgggagctttccaagctcaaaagcacctacctggaccccctgccccggctcgtccacccgcggacgggccggcttcacacccgcttcaaccagacggccacggccacgggaaggctttccagcgtcgaccccaacctgcagaacatccccgtgcgcacccccttggggcagcgcatccgcaaggccttcgtggccgaggaggggtggctccttttggcggcggactactcccagatcgagcttcgggtcctggcccacctctcgggggacgagaacctgaagcgggtcttccgggaggggaaggacatccataccgaaaccgccgcctggatgttcggcttagaccccgctctagtggatccaaagatgcgccgggcggccaagacggtcaacttcggcgtcctctacgggatgtccgcccacaggctctcccaggagctcggcatagactacaaggaggcggaggcctttattgagcgctacttccagagcttccccaaggtgcgggcctggatagaaaggaccctggaggagggccggacgcggggctacgtggagaccctgttcggcaggaggcgctatgtgcccgacctggcctcccgggtccgctcggtgcgggaggcggcggagcggatggccttcaacatgcccgtgcagggcaccgccgccgacctgatgaagatcgccatggtcaagctcttccccaggctaaagcccctgggggcccacctcctcctccaggtgcacgacgagctggtcctggaggtgcccgaggaccgggccgaggaggccaaggccctggtcaaggaggtcatggagaacacctaccccttggacgtgcccctcgaggtggaggtgggcgtgggtcgggactggctggaggcgaagggggattgaagcggtcgac

SEQ ID NO: 3145 - DNA, 2605 bp, Artificial Sequence
  Description of Artificial Sequence: Synthetic DNA sequence of Thermus Rt41A DNA Polymerase D609A
atgaaatacctgctgccgaccgctgctgctggtctgctgctcctcgctgcccagccggcgatggccatggatatcggaattaattcggatccgaattccccactttttgacctggaggaaccccccaagcgggtgcttctggtggacggccaccacctggcctaccgcaccttctacgccctgagcctcaccacctcccggggggagccggtgcagatggtctacggcttcgcccggagcctcctcaaggccttgaaggaggacgggcaggcggtggtcgtggtctttgacgccaaggccccctccttccgccacgaggcctacgaggcctacaaggcgggccgggcccccaccccggaggacttcccccgccagctcgccttggtcaagcggctggtggaccttctgggcctggtccgcctcgaggccccgggttacgaggcggacgacgtcctgggcaccctggccaagaaggccgaaagggaggggatggaggtgcgcatcctcacgggagaccgggacttcttccagctcctctccgagaaggtctcggtcctcctgccggacgggaccctggtcaccccaaaggacgtccaggagaagtacggggtgccgccggagcgctgggtggacttccgcgccctcacgggggaccgctcggacaacatccccggggtggcggggataggggagaagaccgcccttcgactcctcgcggagtgggggagcgtggagaacctcctgaagaacctggaccgggtgaagccggactcggtccggcgcaagatagaggcgcaccttgaggacctccgcctctccttggacctggcccgcatccgcaccgacctccccttggaggtggactttaaggccctgcgccgcaggacccccgacctggagggcctgagggcctttttggaggagctggagttcggaagcctccttcatgagttcggcctcctgggaggggagaagccccgggaggaggccccctggcccccgcccgaaggggccttcgtaggcttcctcctctcccgcaaggagcccatgtgggcggagcttctggccctggcggccgccgcagagggccgggtccaccgggcaacaagcccggttgaggccctggccgacctcaaggaggcccgggggttcctggccaaggacctggccgttttggccctgcgggagggggtggccctggaccccacggacgaccccctcctggtggcctacctcctggacccggccaacaccaaccccgagggggtggcccggcgctacgggggcgagttcacggaggacgcagcggagagggccctcctctccgagaggctcttccagaacctctttccccggctttccgagaagctcctctggctctaccaggaggtggagcggcccctctcccgggtcttggcccacatggaggcccggggggtgaggctggacgtcccccttctggaggccctctcctttgagctggagaaggagatggagcgcctggagggggaggtcttccgcttggccggccaccccttcaacctcaactcccgcgaccagctggaaagggtcctctttgacgagctgggccttaccccggtgggtcggacggagaagacgggcaagcgctccaccgcccagggggccctggaggccctccggggggcccaccccatcgtggagctcatcctccagtaccgggagctttccaagctcaaaagcacctacctggaccccctgccccggctcgtccacccgcggacgggccggcttcacacccgcttcaaccagacggccacggccacgggaaggctttccagctccgctcccaacctgcagaacatccccgtgcgcacccccttggggcagcgcatccgcaaggccttcgtggccgaggaggggtggctccttttggcggcggactactcccagatcgagcttcgggtcctggcccacctctcgggggacgagaacctgaagcgggtcttccgggaggggaaggacatccataccgaaaccgccgcctggatgttcggcttagaccccgctctagtggatccaaagatgcgccgggcggccaagacggtcaacttcggcgtcctctacgggatgtccgcccacaggctctcccaggagctcggcatagactacaaggaggcggaggcctttattgagcgctacttccagagcttccccaaggtgcgggcctggatagaaaggaccctggaggagggccggacgcggggctacgtggagaccctgttcggcaggaggcgctatgtgcccgacctggcctcccgggtccgctcggtgcgggaggcggcggagcggatggccttcaacatgcccgtgcagggcaccgccgccgacctgatgaagatcgccatggtcaagctcttccccaggctaaagcccctgggggcccacctcctcctccaggtgcacgacgagctggtcctggaggtgcccgaggaccgggccgaggaggccaaggccctggtcaaggaggtcatggagaacacctaccccttggacgtgcccctcgaggtggaggtgggcgtgggtcgggactggctggaggcgaagggggattgaagcggtcgac

SEQ ID NO: 3146 - DNA, 2605 bp, Artificial Sequence
  Description of Artificial Sequence: Synthetic DNA sequence of Thermus Rt41A DNA Polymerase D609R
atgaaatacctgctgccgaccgctgctgctggtctgctgctcctcgctgcccagccggcgatggccatggatatcggaattaattcggatccgaattccccactttttgacctggaggaaccccccaagcgggtgcttctggtggacggccaccacctggcctaccgcaccttctacgccctgagcctcaccacctcccggggggagccggtgcagatggtctacggcttcgcccggagcctcctcaaggccttgaaggaggacgggcaggcggtggtcgtggtctttgacgccaaggccccctccttccgccacgaggcctacgaggcctacaaggcgggccgggcccccaccccggaggacttcccccgccagctcgccttggtcaagcggctggtggaccttctgggcctggtccgcctcgaggccccgggttacgaggcggacgacgtcctgggcaccctggccaagaaggccgaaagggaggggatggaggtgcgcatcctcacgggagaccgggacttcttccagctcctctccgagaaggtctcggtcctcctgccggacgggaccctggtcaccccaaaggacgtccaggagaagtacggggtgccgccggagcgctgggtggacttccgcgccctcacgggggaccgctcggacaacatccccggggtggcggggataggggagaagaccgcccttcgactcctcgcggagtgggggagcgtggagaacctcctgaagaacctggaccgggtgaagccggactcggtccggcgcaagatagaggcgcaccttgaggacctccgcctctccttggacctggcccgcatccgcaccgacctccccttggaggtggactttaaggccctgcgccgcaggacccccgacctggagggcctgagggcctttttggaggagctggagttcggaagcctccttcatgagttcggcctcctgggaggggagaagccccgggaggaggccccctggcccccgcccgaaggggccttcgtaggcttcctcctctcccgcaaggagcccatgtgggcggagcttctggccctggcggccgccgcagagggccgggtccaccgggcaacaagcccggttgaggccctggccgacctcaaggaggcccgggggttcctggccaaggacctggccgttttggccctgcgggagggggtggccctggaccccacggacgaccccctcctggtggcctacctcctggacccggccaacaccaaccccgagggggtggcccggcgctacgggggcgagttcacggaggacgcagcggagagggccctcctctccgagaggctcttccagaacctctttccccggctttccgagaagctcctctggctctaccaggaggtggagcggcccctctcccgggtcttggcccacatggaggcccggggggtgaggctggacgtcccccttctggaggccctctcctttgagctggagaaggagatggagcgcctggagggggaggtcttccgcttggccggccaccccttcaacctcaactcccgcgaccagctggaaagggtcctctttgacgagctgggccttaccccggtgggtcggacggagaagacgggcaagcgctccaccgcccagggggccctggaggccctccggggggcccaccccatcgtggagctcatcctccagtaccgggagctttccaagctcaaaagcacctacctggaccccctgccccggctcgtccacccgcggacgggccggcttcacacccgcttcaaccagacggccacggccacgggaaggctttccagctcccgacccaacctgcagaacatccccgtgcgcacccccttggggcagcgcatccgcaaggccttcgtggccgaggaggggtggctccttttggcggcggactactcccagatcgagcttcgggtcctggcccacctctcgggggacgagaacctgaagcgggtcttccgggaggggaaggacatccataccgaaaccgccgcctggatgttcggcttagaccccgctctagtggatccaaagatgcgccgggcggccaagacggtcaacttcggcgtcctctacgggatgtccgcccacaggctctcccaggagctcggcatagactacaaggaggcggaggcctttattgagcgctacttccagagcttccccaaggtgcgggcctggatagaaaggaccctggaggagggccggacgcggggctacgtggagaccctgttcggcaggaggcgctatgtgcccgacctggcctcccgggtccgctcggtgcgggaggcggcggagcggatggccttcaacatgcccgtgcagggcaccgccgccgacctgatgaagatcgccatggtcaagctcttccccaggctaaagcccctgggggcccacctcctcctccaggtgcacgacgagctggtcctggaggtgcccgaggaccgggccgaggaggccaaggccctggtcaaggaggtcatggagaacacctaccccttggacgtgcccctcgaggtggaggtgggcgtgggtcgggactggctggaggcgaagggggattgaagcggtcgac

SEQ ID NO: 3147 - DNA, 2605 bp, Artificial Sequence
  Description of Artificial Sequence: Synthetic DNA sequence of Thermus Rt41A DNA Polymerase D609C
atgaaatacctgctgccgaccgctgctgctggtctgctgctcctcgctgcccagccggcgatggccatggatatcggaattaattcggatccgaattccccactttttgacctggaggaaccccccaagcgggtgcttctggtggacggccaccacctggcctaccgcaccttctacgccctgagcctcaccacctcccggggggagccggtgcagatggtctacggcttcgcccggagcctcctcaaggccttgaaggaggacgggcaggcggtggtcgtggtctttgacgccaaggccccctccttccgccacgaggcctacgaggcctacaaggcgggccgggcccccaccccggaggacttcccccgccagctcgccttggtcaagcggctggtggaccttctgggcctggtccgcctcgaggccccgggttacgaggcggacgacgtcctgggcaccctggccaagaaggccgaaagggaggggatggaggtgcgcatcctcacgggagaccgggacttcttccagctcctctccgagaaggtctcggtcctcctgccggacgggaccctggtcaccccaaaggacgtccaggagaagtacggggtgccgccggagcgctgggtggacttccgcgccctcacgggggaccgctcggacaacatccccggggtggcggggataggggagaagaccgcccttcgactcctcgcggagtgggggagcgtggagaacctcctgaagaacctggaccgggtgaagccggactcggtccggcgcaagatagaggcgcaccttgaggacctccgcctctccttggacctggcccgcatccgcaccgacctccccttggaggtggactttaaggccctgcgccgcaggacccccgacctggagggcctgagggcctttttggaggagctggagttcggaagcctccttcatgagttcggcctcctgggaggggagaagccccgggaggaggccccctggcccccgcccgaaggggccttcgtaggcttcctcctctcccgcaaggagcccatgtgggcggagcttctggccctggcggccgccgcagagggccgggtccaccgggcaacaagcccggttgaggccctggccgacctcaaggaggcccgggggttcctggccaaggacctggccgttttggccctgcgggagggggtggccctggaccccacggacgaccccctcctggtggcctacctcctggacccggccaacaccaaccccgagggggtggcccggcgctacgggggcgagttcacggaggacgcagcggagagggccctcctctccgagaggctcttccagaacctctttccccggctttccgagaagctcctctggctctaccaggaggtggagcggcccctctcccgggtcttggcccacatggaggcccggggggtgaggctggacgtcccccttctggaggccctctcctttgagctggagaaggagatggagcgcctggagggggaggtcttccgcttggccggccaccccttcaacctcaactcccgcgaccagctggaaagggtcctctttgacgagctgggccttaccccggtgggtcggacggagaagacgggcaagcgctccaccgcccagggggccctggaggccctccggggggcccaccccatcgtggagctcatcctccagtaccgggagctttccaagctcaaaagcacctacctggaccccctgccccggctcgtccacccgcggacgggccggcttcacacccgcttcaaccagacggccacggccacgggaaggctttccagctcctgtcccaacctgcagaacatccccgtgcgcacccccttggggcagcgcatccgcaaggccttcgtggccgaggaggggtggctccttttggcggcggactactcccagatcgagcttcgggtcctggcccacctctcgggggacgagaacctgaagcgggtcttccgggaggggaaggacatccataccgaaaccgccgcctggatgttcggcttagaccccgctctagtggatccaaagatgcgccgggcggccaagacggtcaacttcggcgtcctctacgggatgtccgcccacaggctctcccaggagctcggcatagactacaaggaggcggaggcctttattgagcgctacttccagagcttccccaaggtgcgggcctggatagaaaggaccctggaggagggccggacgcggggctacgtggagaccctgttcggcaggaggcgctatgtgcccgacctggcctcccgggtccgctcggtgcgggaggcggcggagcggatggccttcaacatgcccgtgcagggcaccgccgccgacctgatgaagatcgccatggtcaagctcttccccaggctaaagcccctgggggcccacctcctcctccaggtgcacgacgagctggtcctggaggtgcccgaggaccgggccgaggaggccaaggccctggtcaaggaggtcatggagaacacctaccccttggacgtgcccctcgaggtggaggtgggcgtgggtcgggactggctggaggcgaagggggattgaagcggtcgac

SEQ ID NO: 3148 - DNA, 2605 bp, Artificial Sequence
  Description of Artificial Sequence: Synthetic DNA sequence of Thermus Rt41A DNA Polymerase D609G
atgaaatacctgctgccgaccgctgctgctggtctgctgctcctcgctgcccagccggcgatggccatggatatcggaattaattcggatccgaattccccactttttgacctggaggaaccccccaagcgggtgcttctggtggacggccaccacctggcctaccgcaccttctacgccctgagcctcaccacctcccggggggagccggtgcagatggtctacggcttcgcccggagcctcctcaaggccttgaaggaggacgggcaggcggtggtcgtggtctttgacgccaaggccccctccttccgccacgaggcctacgaggcctacaaggcgggccgggcccccaccccggaggacttcccccgccagctcgccttggtcaagcggctggtggaccttctgggcctggtccgcctcgaggccccgggttacgaggcggacgacgtcctgggcaccctggccaagaaggccgaaagggaggggatggaggtgcgcatcctcacgggagaccgggacttcttccagctcctctccgagaaggtctcggtcctcctgccggacgggaccctggtcaccccaaaggacgtccaggagaagtacggggtgccgccggagcgctgggtggacttccgcgccctcacgggggaccgctcggacaacatccccggggtggcggggataggggagaagaccgcccttcgactcctcgcggagtgggggagcgtggagaacctcctgaagaacctggaccgggtgaagccggactcggtccggcgcaagatagaggcgcaccttgaggacctccgcctctccttggacctggcccgcatccgcaccgacctccccttggaggtggactttaaggccctgcgccgcaggacccccgacctggagggcctgagggcctttttggaggagctggagttcggaagcctccttcatgagttcggcctcctgggaggggagaagccccgggaggaggccccctggcccccgcccgaaggggccttcgtaggcttcctcctctcccgcaaggagcccatgtgggcggagcttctggccctggcggccgccgcagagggccgggtccaccgggcaacaagcccggttgaggccctggccgacctcaaggaggcccgggggttcctggccaaggacctggccgttttggccctgcgggagggggtggccctggaccccacggacgaccccctcctggtggcctacctcctggacccggccaacaccaaccccgagggggtggcccggcgctacgggggcgagttcacggaggacgcagcggagagggccctcctctccgagaggctcttccagaacctctttccccggctttccgagaagctcctctggctctaccaggaggtggagcggcccctctcccgggtcttggcccacatggaggcccggggggtgaggctggacgtcccccttctggaggccctctcctttgagctggagaaggagatggagcgcctggagggggaggtcttccgcttggccggccaccccttcaacctcaactcccgcgaccagctggaaagggtcctctttgacgagctgggccttaccccggtgggtcggacggagaagacgggcaagcgctccaccgcccagggggccctggaggccctccggggggcccaccccatcgtggagctcatcctccagtaccgggagctttccaagctcaaaagcacctacctggaccccctgccccggctcgtccacccgcggacgggccggcttcacacccgcttcaaccagacggccacggccacgggaaggctttccagctccggtcccaacctgcagaacatccccgtgcgcacccccttggggcagcgcatccgcaaggccttcgtggccgaggaggggtggctccttttggcggcggactactcccagatcgagcttcgggtcctggcccacctctcgggggacgagaacctgaagcgggtcttccgggaggggaaggacatccataccgaaaccgccgcctggatgttcggcttagaccccgctctagtggatccaaagatgcgccgggcggccaagacggtcaacttcggcgtcctctacgggatgtccgcccacaggctctcccaggagctcggcatagactacaaggaggcggaggcctttattgagcgctacttccagagcttccccaaggtgcgggcctggatagaaaggaccctggaggagggccggacgcggggctacgtggagaccctgttcggcaggaggcgctatgtgcccgacctggcctcccgggtccgctcggtgcgggaggcggcggagcggatggccttcaacatgcccgtgcagggcaccgccgccgacctgatgaagatcgccatggtcaagctcttccccaggctaaagcccctgggggcccacctcctcctccaggtgcacgacgagctggtcctggaggtgcccgaggaccgggccgaggaggccaaggccctggtcaaggaggtcatggagaacacctaccccttggacgtgcccctcgaggtggaggtgggcgtgggtcgggactggctggaggcgaagggggattgaagcggtcgac

SEQ ID NO: 3149 - DNA, 2605 bp, Artificial Sequence
  Description of Artificial Sequence: Synthetic DNA sequence of Thermus Rt41A DNA Polymerase D609Q
atgaaatacctgctgccgaccgctgctgctggtctgctgctcctcgctgcccagccggcgatggccatggatatcggaattaattcggatccgaattccccactttttgacctggaggaaccccccaagcgggtgcttctggtggacggccaccacctggcctaccgcaccttctacgccctgagcctcaccacctcccggggggagccggtgcagatggtctacggcttcgcccggagcctcctcaaggccttgaaggaggacgggcaggcggtggtcgtggtctttgacgccaaggccccctccttccgccacgaggcctacgaggcctacaaggcgggccgggcccccaccccggaggacttcccccgccagctcgccttggtcaagcggctggtggaccttctgggcctggtccgcctcgaggccccgggttacgaggcggacgacgtcctgggcaccctggccaagaaggccgaaagggaggggatggaggtgcgcatcctcacgggagaccgggacttcttccagctcctctccgagaaggtctcggtcctcctgccggacgggaccctggtcaccccaaaggacgtccaggagaagtacggggtgccgccggagcgctgggtggacttccgcgccctcacgggggaccgctcggacaacatccccggggtggcggggataggggagaagaccgcccttcgactcctcgcggagtgggggagcgtggagaacctcctgaagaacctggaccgggtgaagccggactcggtccggcgcaagatagaggcgcaccttgaggacctccgcctctccttggacctggcccgcatccgcaccgacctccccttggaggtggactttaaggccctgcgccgcaggacccccgacctggagggcctgagggcctttttggaggagctggagttcggaagcctccttcatgagttcggcctcctgggaggggagaagccccgggaggaggccccctggcccccgcccgaaggggccttcgtaggcttcctcctctcccgcaaggagcccatgtgggcggagcttctggccctggcggccgccgcagagggccgggtccaccgggcaacaagcccggttgaggccctggccgacctcaaggaggcccgggggttcctggccaaggacctggccgttttggccctgcgggagggggtggccctggaccccacggacgaccccctcctggtggcctacctcctggacccggccaacaccaaccccgagggggtggcccggcgctacgggggcgagttcacggaggacgcagcggagagggccctcctctccgagaggctcttccagaacctctttccccggctttccgagaagctcctctggctctaccaggaggtggagcggcccctctcccgggtcttggcccacatggaggcccggggggtgaggctggacgtcccccttctggaggccctctcctttgagctggagaaggagatggagcgcctggagggggaggtcttccgcttggccggccaccccttcaacctcaactcccgcgaccagctggaaagggtcctctttgacgagctgggccttaccccggtgggtcggacggagaagacgggcaagcgctccaccgcccagggggccctggaggccctccggggggcccaccccatcgtggagctcatcctccagtaccgggagctttccaagctcaaaagcacctacctggaccccctgccccggctcgtccacccgcggacgggccggcttcacacccgcttcaaccagacggccacggccacgggaaggctttccagctcccaacccaacctgcagaacatccccgtgcgcacccccttggggcagcgcatccgcaaggccttcgtggccgaggaggggtggctccttttggcggcggactactcccagatcgagcttcgggtcctggcccacctctcgggggacgagaacctgaagcgggtcttccgggaggggaaggacatccataccgaaaccgccgcctggatgttcggcttagaccccgctctagtggatccaaagatgcgccgggcggccaagacggtcaacttcggcgtcctctacgggatgtccgcccacaggctctcccaggagctcggcatagactacaaggaggcggaggcctttattgagcgctacttccagagcttccccaaggtgcgggcctggatagaaaggaccctggaggagggccggacgcggggctacgtggagaccctgttcggcaggaggcgctatgtgcccgacctggcctcccgggtccgctcggtgcgggaggcggcggagcggatggccttcaacatgcccgtgcagggcaccgccgccgacctgatgaagatcgccatggtcaagctcttccccaggctaaagcccctgggggcccacctcctcctccaggtgcacgacgagctggtcctggaggtgcccgaggaccgggccgaggaggccaaggccctggtcaaggaggtcatggagaacacctaccccttggacgtgcccctcgaggtggaggtgggcgtgggtcgggactggctggaggcgaagggggattgaagcggtcgac

SEQ ID NO: 3150 - DNA, 2605 bp, Artificial Sequence
  Description of Artificial Sequence: Synthetic DNA sequence of Thermus Rt41A DNA Polymerase D609H
atgaaatacctgctgccgaccgctgctgctggtctgctgctcctcgctgcccagccggcgatggccatggatatcggaattaattcggatccgaattccccactttttgacctggaggaaccccccaagcgggtgcttctggtggacggccaccacctggcctaccgcaccttctacgccctgagcctcaccacctcccggggggagccggtgcagatggtctacggcttcgcccggagcctcctcaaggccttgaaggaggacgggcaggcggtggtcgtggtctttgacgccaaggccccctccttccgccacgaggcctacgaggcctacaaggcgggccgggcccccaccccggaggacttcccccgccagctcgccttggtcaagcggctggtggaccttctgggcctggtccgcctcgaggccccgggttacgaggcggacgacgtcctgggcaccctggccaagaaggccgaaagggaggggatggaggtgcgcatcctcacgggagaccgggacttcttccagctcctctccgagaaggtctcggtcctcctgccggacgggaccctggtcaccccaaaggacgtccaggagaagtacggggtgccgccggagcgctgggtggacttccgcgccctcacgggggaccgctcggacaacatccccggggtggcggggataggggagaagaccgcccttcgactcctcgcggagtgggggagcgtggagaacctcctgaagaacctggaccgggtgaagccggactcggtccggcgcaagatagaggcgcaccttgaggacctccgcctctccttggacctggcccgcatccgcaccgacctccccttggaggtggactttaaggccctgcgccgcaggacccccgacctggagggcctgagggcctttttggaggagctggagttcggaagcctccttcatgagttcggcctcctgggaggggagaagccccgggaggaggccccctggcccccgcccgaaggggccttcgtaggcttcctcctctcccgcaaggagcccatgtgggcggagcttctggccctggcggccgccgcagagggccgggtccaccgggcaacaagcccggttgaggccctggccgacctcaaggaggcccgggggttcctggccaaggacctggccgttttggccctgcgggagggggtggccctggaccccacggacgaccccctcctggtggcctacctcctggacccggccaacaccaaccccgagggggtggcccggcgctacgggggcgagttcacggaggacgcagcggagagggccctcctctccgagaggctcttccagaacctctttccccggctttccgagaagctcctctggctctaccaggaggtggagcggcccctctcccgggtcttggcccacatggaggcccggggggtgaggctggacgtcccccttctggaggccctctcctttgagctggagaaggagatggagcgcctggagggggaggtcttccgcttggccggccaccccttcaacctcaactcccgcgaccagctggaaagggtcctctttgacgagctgggccttaccccggtgggtcggacggagaagacgggcaagcgctccaccgcccagggggccctggaggccctccggggggcccaccccatcgtggagctcatcctccagtaccgggagctttccaagctcaaaagcacctacctggaccccctgccccggctcgtccacccgcggacgggccggcttcacacccgcttcaaccagacggccacggccacgggaaggctttccagctcccatcccaacctgcagaacatccccgtgcgcacccccttggggcagcgcatccgcaaggccttcgtggccgaggaggggtggctccttttggcggcggactactcccagatcgagcttcgggtcctggcccacctctcgggggacgagaacctgaagcgggtcttccgggaggggaaggacatccataccgaaaccgccgcctggatgttcggcttagaccccgctctagtggatccaaagatgcgccgggcggccaagacggtcaacttcggcgtcctctacgggatgtccgcccacaggctctcccaggagctcggcatagactacaaggaggcggaggcctttattgagcgctacttccagagcttccccaaggtgcgggcctggatagaaaggaccctggaggagggccggacgcggggctacgtggagaccctgttcggcaggaggcgctatgtgcccgacctggcctcccgggtccgctcggtgcgggaggcggcggagcggatggccttcaacatgcccgtgcagggcaccgccgccgacctgatgaagatcgccatggtcaagctcttccccaggctaaagcccctgggggcccacctcctcctccaggtgcacgacgagctggtcctggaggtgcccgaggaccgggccgaggaggccaaggccctggtcaaggaggtcatggagaacacctaccccttggacgtgcccctcgaggtggaggtgggcgtgggtcgggactggctggaggcgaagggggattgaagcggtcgac

SEQ ID NO: 3151 - DNA, 2605 bp, Artificial Sequence
  Description of Artificial Sequence: Synthetic DNA sequence of Thermus Rt41A DNA Polymerase D609I
atgaaatacctgctgccgaccgctgctgctggtctgctgctcctcgctgcccagccggcgatggccatggatatcggaattaattcggatccgaattccccactttttgacctggaggaaccccccaagcgggtgcttctggtggacggccaccacctggcctaccgcaccttctacgccctgagcctcaccacctcccggggggagccggtgcagatggtctacggcttcgcccggagcctcctcaaggccttgaaggaggacgggcaggcggtggtcgtggtctttgacgccaaggccccctccttccgccacgaggcctacgaggcctacaaggcgggccgggcccccaccccggaggacttcccccgccagctcgccttggtcaagcggctggtggaccttctgggcctggtccgcctcgaggccccgggttacgaggcggacgacgtcctgggcaccctggccaagaaggccgaaagggaggggatggaggtgcgcatcctcacgggagaccgggacttcttccagctcctctccgagaaggtctcggtcctcctgccggacgggaccctggtcaccccaaaggacgtccaggagaagtacggggtgccgccggagcgctgggtggacttccgcgccctcacgggggaccgctcggacaacatccccggggtggcggggataggggagaagaccgcccttcgactcctcgcggagtgggggagcgtggagaacctcctgaagaacctggaccgggtgaagccggactcggtccggcgcaagatagaggcgcaccttgaggacctccgcctctccttggacctggcccgcatccgcaccgacctccccttggaggtggactttaaggccctgcgccgcaggacccccgacctggagggcctgagggcctttttggaggagctggagttcggaagcctccttcatgagttcggcctcctgggaggggagaagccccgggaggaggccccctggcccccgcccgaaggggccttcgtaggcttcctcctctcccgcaaggagcccatgtgggcggagcttctggccctggcggccgccgcagagggccgggtccaccgggcaacaagcccggttgaggccctggccgacctcaaggaggcccgggggttcctggccaaggacctggccgttttggccctgcgggagggggtggccctggaccccacggacgaccccctcctggtggcctacctcctggacccggccaacaccaaccccgagggggtggcccggcgctacgggggcgagttcacggaggacgcagcggagagggccctcctctccgagaggctcttccagaacctctttccccggctttccgagaagctcctctggctctaccaggaggtggagcggcccctctcccgggtcttggcccacatggaggcccggggggtgaggctggacgtcccccttctggaggccctctcctttgagctggagaaggagatggagcgcctggagggggaggtcttccgcttggccggccaccccttcaacctcaactcccgcgaccagctggaaagggtcctctttgacgagctgggccttaccccggtgggtcggacggagaagacgggcaagcgctccaccgcccagggggccctggaggccctccggggggcccaccccatcgtggagctcatcctccagtaccgggagctttccaagctcaaaagcacctacctggaccccctgccccggctcgtccacccgcggacgggccggcttcacacccgcttcaaccagacggccacggccacgggaaggctttccagctccattcccaacctgcagaacatccccgtgcgcacccccttggggcagcgcatccgcaaggccttcgtggccgaggaggggtggctccttttggcggcggactactcccagatcgagcttcgggtcctggcccacctctcgggggacgagaacctgaagcgggtcttccgggaggggaaggacatccataccgaaaccgccgcctggatgttcggcttagaccccgctctagtggatccaaagatgcgccgggcggccaagacggtcaacttcggcgtcctctacgggatgtccgcccacaggctctcccaggagctcggcatagactacaaggaggcggaggcctttattgagcgctacttccagagcttccccaaggtgcgggcctggatagaaaggaccctggaggagggccggacgcggggctacgtggagaccctgttcggcaggaggcgctatgtgcccgacctggcctcccgggtccgctcggtgcgggaggcggcggagcggatggccttcaacatgcccgtgcagggcaccgccgccgacctgatgaagatcgccatggtcaagctcttccccaggctaaagcccctgggggcccacctcctcctccaggtgcacgacgagctggtcctggaggtgcccgaggaccgggccgaggaggccaaggccctggtcaaggaggtcatggagaacacctaccccttggacgtgcccctcgaggtggaggtgggcgtgggtcgggactggctggaggcgaagggggattgaagcggtcgac

SEQ ID NO: 3152 - DNA, 2605 bp, Artificial Sequence
  Description of Artificial Sequence: Synthetic DNA sequence of Thermus Rt41A DNA Polymerase D609L
atgaaatacctgctgccgaccgctgctgctggtctgctgctcctcgctgcccagccggcgatggccatggatatcggaattaattcggatccgaattccccactttttgacctggaggaaccccccaagcgggtgcttctggtggacggccaccacctggcctaccgcaccttctacgccctgagcctcaccacctcccggggggagccggtgcagatggtctacggcttcgcccggagcctcctcaaggccttgaaggaggacgggcaggcggtggtcgtggtctttgacgccaaggccccctccttccgccacgaggcctacgaggcctacaaggcgggccgggcccccaccccggaggacttcccccgccagctcgccttggtcaagcggctggtggaccttctgggcctggtccgcctcgaggccccgggttacgaggcggacgacgtcctgggcaccctggccaagaaggccgaaagggaggggatggaggtgcgcatcctcacgggagaccgggacttcttccagctcctctccgagaaggtctcggtcctcctgccggacgggaccctggtcaccccaaaggacgtccaggagaagtacggggtgccgccggagcgctgggtggacttccgcgccctcacgggggaccgctcggacaacatccccggggtggcggggataggggagaagaccgcccttcgactcctcgcggagtgggggagcgtggagaacctcctgaagaacctggaccgggtgaagccggactcggtccggcgcaagatagaggcgcaccttgaggacctccgcctctccttggacctggcccgcatccgcaccgacctccccttggaggtggactttaaggccctgcgccgcaggacccccgacctggagggcctgagggcctttttggaggagctggagttcggaagcctccttcatgagttcggcctcctgggaggggagaagccccgggaggaggccccctggcccccgcccgaaggggccttcgtaggcttcctcctctcccgcaaggagcccatgtgggcggagcttctggccctggcggccgccgcagagggccgggtccaccgggcaacaagcccggttgaggccctggccgacctcaaggaggcccgggggttcctggccaaggacctggccgttttggccctgcgggagggggtggccctggaccccacggacgaccccctcctggtggcctacctcctggacccggccaacaccaaccccgagggggtggcccggcgctacgggggcgagttcacggaggacgcagcggagagggccctcctctccgagaggctcttccagaacctctttccccggctttccgagaagctcctctggctctaccaggaggtggagcggcccctctcccgggtcttggcccacatggaggcccggggggtgaggctggacgtcccccttctggaggccctctcctttgagctggagaaggagatggagcgcctggagggggaggtcttccgcttggccggccaccccttcaacctcaactcccgcgaccagctggaaagggtcctctttgacgagctgggccttaccccggtgggtcggacggagaagacgggcaagcgctccaccgcccagggggccctggaggccctccggggggcccaccccatcgtggagctcatcctccagtaccgggagctttccaagctcaaaagcacctacctggaccccctgccccggctcgtccacccgcggacgggccggcttcacacccgcttcaaccagacggccacggccacgggaaggctttccagctccttacccaacctgcagaacatccccgtgcgcacccccttggggcagcgcatccgcaaggccttcgtggccgaggaggggtggctccttttggcggcggactactcccagatcgagcttcgggtcctggcccacctctcgggggacgagaacctgaagcgggtcttccgggaggggaaggacatccataccgaaaccgccgcctggatgttcggcttagaccccgctctagtggatccaaagatgcgccgggcggccaagacggtcaacttcggcgtcctctacgggatgtccgcccacaggctctcccaggagctcggcatagactacaaggaggcggaggcctttattgagcgctacttccagagcttccccaaggtgcgggcctggatagaaaggaccctggaggagggccggacgcggggctacgtggagaccctgttcggcaggaggcgctatgtgcccgacctggcctcccgggtccgctcggtgcgggaggcggcggagcggatggccttcaacatgcccgtgcagggcaccgccgccgacctgatgaagatcgccatggtcaagctcttccccaggctaaagcccctgggggcccacctcctcctccaggtgcacgacgagctggtcctggaggtgcccgaggaccgggccgaggaggccaaggccctggtcaaggaggtcatggagaacacctaccccttggacgtgcccctcgaggtggaggtgggcgtgggtcgggactggctggaggcgaagggggattgaagcggtcgac

SEQ ID NO: 3153 - DNA, 2605 bp, Artificial Sequence
  Description of Artificial Sequence: Synthetic DNA sequence of Thermus Rt41A DNA Polymerase D609K
atgaaatacctgctgccgaccgctgctgctggtctgctgctcctcgctgcccagccggcgatggccatggatatcggaattaattcggatccgaattccccactttttgacctggaggaaccccccaagcgggtgcttctggtggacggccaccacctggcctaccgcaccttctacgccctgagcctcaccacctcccggggggagccggtgcagatggtctacggcttcgcccggagcctcctcaaggccttgaaggaggacgggcaggcggtggtcgtggtctttgacgccaaggccccctccttccgccacgaggcctacgaggcctacaaggcgggccgggcccccaccccggaggacttcccccgccagctcgccttggtcaagcggctggtggaccttctgggcctggtccgcctcgaggccccgggttacgaggcggacgacgtcctgggcaccctggccaagaaggccgaaagggaggggatggaggtgcgcatcctcacgggagaccgggacttcttccagctcctctccgagaaggtctcggtcctcctgccggacgggaccctggtcaccccaaaggacgtccaggagaagtacggggtgccgccggagcgctgggtggacttccgcgccctcacgggggaccgctcggacaacatccccggggtggcggggataggggagaagaccgcccttcgactcctcgcggagtgggggagcgtggagaacctcctgaagaacctggaccgggtgaagccggactcggtccggcgcaagatagaggcgcaccttgaggacctccgcctctccttggacctggcccgcatccgcaccgacctccccttggaggtggactttaaggccctgcgccgcaggacccccgacctggagggcctgagggcctttttggaggagctggagttcggaagcctccttcatgagttcggcctcctgggaggggagaagccccgggaggaggccccctggcccccgcccgaaggggccttcgtaggcttcctcctctcccgcaaggagcccatgtgggcggagcttctggccctggcggccgccgcagagggccgggtccaccgggcaacaagcccggttgaggccctggccgacctcaaggaggcccgggggttcctggccaaggacctggccgttttggccctgcgggagggggtggccctggaccccacggacgaccccctcctggtggcctacctcctggacccggccaacaccaaccccgagggggtggcccggcgctacgggggcgagttcacggaggacgcagcggagagggccctcctctccgagaggctcttccagaacctctttccccggctttccgagaagctcctctggctctaccaggaggtggagcggcccctctcccgggtcttggcccacatggaggcccggggggtgaggctggacgtcccccttctggaggccctctcctttgagctggagaaggagatggagcgcctggagggggaggtcttccgcttggccggccaccccttcaacctcaactcccgcgaccagctggaaagggtcctctttgacgagctgggccttaccccggtgggtcggacggagaagacgggcaagcgctccaccgcccagggggccctggaggccctccggggggcccaccccatcgtggagctcatcctccagtaccgggagctttccaagctcaaaagcacctacctggaccccctgccccggctcgtccacccgcggacgggccggcttcacacccgcttcaaccagacggccacggccacgggaaggctttccagctccaaacccaacctgcagaacatccccgtgcgcacccccttggggcagcgcatccgcaaggccttcgtggccgaggaggggtggctccttttggcggcggactactcccagatcgagcttcgggtcctggcccacctctcgggggacgagaacctgaagcgggtcttccgggaggggaaggacatccataccgaaaccgccgcctggatgttcggcttagaccccgctctagtggatccaaagatgcgccgggcggccaagacggtcaacttcggcgtcctctacgggatgtccgcccacaggctctcccaggagctcggcatagactacaaggaggcggaggcctttattgagcgctacttccagagcttccccaaggtgcgggcctggatagaaaggaccctggaggagggccggacgcggggctacgtggagaccctgttcggcaggaggcgctatgtgcccgacctggcctcccgggtccgctcggtgcgggaggcggcggagcggatggccttcaacatgcccgtgcagggcaccgccgccgacctgatgaagatcgccatggtcaagctcttccccaggctaaagcccctgggggcccacctcctcctccaggtgcacgacgagctggtcctggaggtgcccgaggaccgggccgaggaggccaaggccctggtcaaggaggtcatggagaacacctaccccttggacgtgcccctcgaggtggaggtgggcgtgggtcgggactggctggaggcgaagggggattgaagcggtcgac

SEQ ID NO: 3154 - DNA, 2605 bp, Artificial Sequence
  Description of Artificial Sequence: Synthetic DNA sequence of Thermus Rt41A DNA Polymerase D609E
atgaaatacctgctgccgaccgctgctgctggtctgctgctcctcgctgcccagccggcgatggccatggatatcggaattaattcggatccgaattccccactttttgacctggaggaaccccccaagcgggtgcttctggtggacggccaccacctggcctaccgcaccttctacgccctgagcctcaccacctcccggggggagccggtgcagatggtctacggcttcgcccggagcctcctcaaggccttgaaggaggacgggcaggcggtggtcgtggtctttgacgccaaggccccctccttccgccacgaggcctacgaggcctacaaggcgggccgggcccccaccccggaggacttcccccgccagctcgccttggtcaagcggctggtggaccttctgggcctggtccgcctcgaggccccgggttacgaggcggacgacgtcctgggcaccctggccaagaaggccgaaagggaggggatggaggtgcgcatcctcacgggagaccgggacttcttccagctcctctccgagaaggtctcggtcctcctgccggacgggaccctggtcaccccaaaggacgtccaggagaagtacggggtgccgccggagcgctgggtggacttccgcgccctcacgggggaccgctcggacaacatccccggggtggcggggataggggagaagaccgcccttcgactcctcgcggagtgggggagcgtggagaacctcctgaagaacctggaccgggtgaagccggactcggtccggcgcaagatagaggcgcaccttgaggacctccgcctctccttggacctggcccgcatccgcaccgacctccccttggaggtggactttaaggccctgcgccgcaggacccccgacctggagggcctgagggcctttttggaggagctggagttcggaagcctccttcatgagttcggcctcctgggaggggagaagccccgggaggaggccccctggcccccgcccgaaggggccttcgtaggcttcctcctctcccgcaaggagcccatgtgggcggagcttctggccctggcggccgccgcagagggccgggtccaccgggcaacaagcccggttgaggccctggccgacctcaaggaggcccgggggttcctggccaaggacctggccgttttggccctgcgggagggggtggccctggaccccacggacgaccccctcctggtggcctacctcctggacccggccaacaccaaccccgagggggtggcccggcgctacgggggcgagttcacggaggacgcagcggagagggccctcctctccgagaggctcttccagaacctctttccccggctttccgagaagctcctctggctctaccaggaggtggagcggcccctctcccgggtcttggcccacatggaggcccggggggtgaggctggacgtcccccttctggaggccctctcctttgagctggagaaggagatggagcgcctggagggggaggtcttccgcttggccggccaccccttcaacctcaactcccgcgaccagctggaaagggtcctctttgacgagctgggccttaccccggtgggtcggacggagaagacgggcaagcgctccaccgcccagggggccctggaggccctccggggggcccaccccatcgtggagctcatcctccagtaccgggagctttccaagctcaaaagcacctacctggaccccctgccccggctcgtccacccgcggacgggccggcttcacacccgcttcaaccagacggccacggccacgggaaggctttccagctccgaacccaacctgcagaacatccccgtgcgcacccccttggggcagcgcatccgcaaggccttcgtggccgaggaggggtggctccttttggcggcggactactcccagatcgagcttcgggtcctggcccacctctcgggggacgagaacctgaagcgggtcttccgggaggggaaggacatccataccgaaaccgccgcctggatgttcggcttagaccccgctctagtggatccaaagatgcgccgggcggccaagacggtcaacttcggcgtcctctacgggatgtccgcccacaggctctcccaggagctcggcatagactacaaggaggcggaggcctttattgagcgctacttccagagcttccccaaggtgcgggcctggatagaaaggaccctggaggagggccggacgcggggctacgtggagaccctgttcggcaggaggcgctatgtgcccgacctggcctcccgggtccgctcggtgcgggaggcggcggagcggatggccttcaacatgcccgtgcagggcaccgccgccgacctgatgaagatcgccatggtcaagctcttccccaggctaaagcccctgggggcccacctcctcctccaggtgcacgacgagctggtcctggaggtgcccgaggaccgggccgaggaggccaaggccctggtcaaggaggtcatggagaacacctaccccttggacgtgcccctcgaggtggaggtgggcgtgggtcgggactggctggaggcgaagggggattgaagcggtcgac

SEQ ID NO: 3155 - DNA, 2605 bp, Artificial Sequence
  Description of Artificial Sequence: Synthetic DNA sequence of Thermus Rt41A DNA Polymerase D609F
atgaaatacctgctgccgaccgctgctgctggtctgctgctcctcgctgcccagccggcgatggccatggatatcggaattaattcggatccgaattccccactttttgacctggaggaaccccccaagcgggtgcttctggtggacggccaccacctggcctaccgcaccttctacgccctgagcctcaccacctcccggggggagccggtgcagatggtctacggcttcgcccggagcctcctcaaggccttgaaggaggacgggcaggcggtggtcgtggtctttgacgccaaggccccctccttccgccacgaggcctacgaggcctacaaggcgggccgggcccccaccccggaggacttcccccgccagctcgccttggtcaagcggctggtggaccttctgggcctggtccgcctcgaggccccgggttacgaggcggacgacgtcctgggcaccctggccaagaaggccgaaagggaggggatggaggtgcgcatcctcacgggagaccgggacttcttccagctcctctccgagaaggtctcggtcctcctgccggacgggaccctggtcaccccaaaggacgtccaggagaagtacggggtgccgccggagcgctgggtggacttccgcgccctcacgggggaccgctcggacaacatccccggggtggcggggataggggagaagaccgcccttcgactcctcgcggagtgggggagcgtggagaacctcctgaagaacctggaccgggtgaagccggactcggtccggcgcaagatagaggcgcaccttgaggacctccgcctctccttggacctggcccgcatccgcaccgacctccccttggaggtggactttaaggccctgcgccgcaggacccccgacctggagggcctgagggcctttttggaggagctggagttcggaagcctccttcatgagttcggcctcctgggaggggagaagccccgggaggaggccccctggcccccgcccgaaggggccttcgtaggcttcctcctctcccgcaaggagcccatgtgggcggagcttctggccctggcggccgccgcagagggccgggtccaccgggcaacaagcccggttgaggccctggccgacctcaaggaggcccgggggttcctggccaaggacctggccgttttggccctgcgggagggggtggccctggaccccacggacgaccccctcctggtggcctacctcctggacccggccaacaccaaccccgagggggtggcccggcgctacgggggcgagttcacggaggacgcagcggagagggccctcctctccgagaggctcttccagaacctctttccccggctttccgagaagctcctctggctctaccaggaggtggagcggcccctctcccgggtcttggcccacatggaggcccggggggtgaggctggacgtcccccttctggaggccctctcctttgagctggagaaggagatggagcgcctggagggggaggtcttccgcttggccggccaccccttcaacctcaactcccgcgaccagctggaaagggtcctctttgacgagctgggccttaccccggtgggtcggacggagaagacgggcaagcgctccaccgcccagggggccctggaggccctccggggggcccaccccatcgtggagctcatcctccagtaccgggagctttccaagctcaaaagcacctacctggaccccctgccccggctcgtccacccgcggacgggccggcttcacacccgcttcaaccagacggccacggccacgggaaggctttccagctcctttcccaacctgcagaacatccccgtgcgcacccccttggggcagcgcatccgcaaggccttcgtggccgaggaggggtggctccttttggcggcggactactcccagatcgagcttcgggtcctggcccacctctcgggggacgagaacctgaagcgggtcttccgggaggggaaggacatccataccgaaaccgccgcctggatgttcggcttagaccccgctctagtggatccaaagatgcgccgggcggccaagacggtcaacttcggcgtcctctacgggatgtccgcccacaggctctcccaggagctcggcatagactacaaggaggcggaggcctttattgagcgctacttccagagcttccccaaggtgcgggcctggatagaaaggaccctggaggagggccggacgcggggctacgtggagaccctgttcggcaggaggcgctatgtgcccgacctggcctcccgggtccgctcggtgcgggaggcggcggagcggatggccttcaacatgcccgtgcagggcaccgccgccgacctgatgaagatcgccatggtcaagctcttccccaggctaaagcccctgggggcccacctcctcctccaggtgcacgacgagctggtcctggaggtgcccgaggaccgggccgaggaggccaaggccctggtcaaggaggtcatggagaacacctaccccttggacgtgcccctcgaggtggaggtgggcgtgggtcgggactggctggaggcgaagggggattgaagcggtcgac

SEQ ID NO: 3156 - DNA, 2605 bp, Artificial Sequence
  Description of Artificial Sequence: Synthetic DNA sequence of Thermus Rt41A DNA Polymerase D609S
atgaaatacctgctgccgaccgctgctgctggtctgctgctcctcgctgcccagccggcgatggccatggatatcggaattaattcggatccgaattccccactttttgacctggaggaaccccccaagcgggtgcttctggtggacggccaccacctggcctaccgcaccttctacgccctgagcctcaccacctcccggggggagccggtgcagatggtctacggcttcgcccggagcctcctcaaggccttgaaggaggacgggcaggcggtggtcgtggtctttgacgccaaggccccctccttccgccacgaggcctacgaggcctacaaggcgggccgggcccccaccccggaggacttcccccgccagctcgccttggtcaagcggctggtggaccttctgggcctggtccgcctcgaggccccgggttacgaggcggacgacgtcctgggcaccctggccaagaaggccgaaagggaggggatggaggtgcgcatcctcacgggagaccgggacttcttccagctcctctccgagaaggtctcggtcctcctgccggacgggaccctggtcaccccaaaggacgtccaggagaagtacggggtgccgccggagcgctgggtggacttccgcgccctcacgggggaccgctcggacaacatccccggggtggcggggataggggagaagaccgcccttcgactcctcgcggagtgggggagcgtggagaacctcctgaagaacctggaccgggtgaagccggactcggtccggcgcaagatagaggcgcaccttgaggacctccgcctctccttggacctggcccgcatccgcaccgacctccccttggaggtggactttaaggccctgcgccgcaggacccccgacctggagggcctgagggcctttttggaggagctggagttcggaagcctccttcatgagttcggcctcctgggaggggagaagccccgggaggaggccccctggcccccgcccgaaggggccttcgtaggcttcctcctctcccgcaaggagcccatgtgggcggagcttctggccctggcggccgccgcagagggccgggtccaccgggcaacaagcccggttgaggccctggccgacctcaaggaggcccgggggttcctggccaaggacctggccgttttggccctgcgggagggggtggccctggaccccacggacgaccccctcctggtggcctacctcctggacccggccaacaccaaccccgagggggtggcccggcgctacgggggcgagttcacggaggacgcagcggagagggccctcctctccgagaggctcttccagaacctctttccccggctttccgagaagctcctctggctctaccaggaggtggagcggcccctctcccgggtcttggcccacatggaggcccggggggtgaggctggacgtcccccttctggaggccctctcctttgagctggagaaggagatggagcgcctggagggggaggtcttccgcttggccggccaccccttcaacctcaactcccgcgaccagctggaaagggtcctctttgacgagctgggccttaccccggtgggtcggacggagaagacgggcaagcgctccaccgcccagggggccctggaggccctccggggggcccaccccatcgtggagctcatcctccagtaccgggagctttccaagctcaaaagcacctacctggaccccctgccccggctcgtccacccgcggacgggccggcttcacacccgcttcaaccagacggccacggccacgggaaggctttccagctcctctcccaacctgcagaacatccccgtgcgcacccccttggggcagcgcatccgcaaggccttcgtggccgaggaggggtggctccttttggcggcggactactcccagatcgagcttcgggtcctggcccacctctcgggggacgagaacctgaagcgggtcttccgggaggggaaggacatccataccgaaaccgccgcctggatgttcggcttagaccccgctctagtggatccaaagatgcgccgggcggccaagacggtcaacttcggcgtcctctacgggatgtccgcccacaggctctcccaggagctcggcatagactacaaggaggcggaggcctttattgagcgctacttccagagcttccccaaggtgcgggcctggatagaaaggaccctggaggagggccggacgcggggctacgtggagaccctgttcggcaggaggcgctatgtgcccgacctggcctcccgggtccgctcggtgcgggaggcggcggagcggatggccttcaacatgcccgtgcagggcaccgccgccgacctgatgaagatcgccatggtcaagctcttccccaggctaaagcccctgggggcccacctcctcctccaggtgcacgacgagctggtcctggaggtgcccgaggaccgggccgaggaggccaaggccctggtcaaggaggtcatggagaacacctaccccttggacgtgcccctcgaggtggaggtgggcgtgggtcgggactggctggaggcgaagggggattgaagcggtcgac

SEQ ID NO: 3157 - DNA, 2605 bp, Artificial Sequence
  Description of Artificial Sequence: Synthetic DNA sequence of Thermus Rt41A DNA Polymerase D609Y
atgaaatacctgctgccgaccgctgctgctggtctgctgctcctcgctgcccagccggcgatggccatggatatcggaattaattcggatccgaattccccactttttgacctggaggaaccccccaagcgggtgcttctggtggacggccaccacctggcctaccgcaccttctacgccctgagcctcaccacctcccggggggagccggtgcagatggtctacggcttcgcccggagcctcctcaaggccttgaaggaggacgggcaggcggtggtcgtggtctttgacgccaaggccccctccttccgccacgaggcctacgaggcctacaaggcgggccgggcccccaccccggaggacttcccccgccagctcgccttggtcaagcggctggtggaccttctgggcctggtccgcctcgaggccccgggttacgaggcggacgacgtcctgggcaccctggccaagaaggccgaaagggaggggatggaggtgcgcatcctcacgggagaccgggacttcttccagctcctctccgagaaggtctcggtcctcctgccggacgggaccctggtcaccccaaaggacgtccaggagaagtacggggtgccgccggagcgctgggtggacttccgcgccctcacgggggaccgctcggacaacatccccggggtggcggggataggggagaagaccgcccttcgactcctcgcggagtgggggagcgtggagaacctcctgaagaacctggaccgggtgaagccggactcggtccggcgcaagatagaggcgcaccttgaggacctccgcctctccttggacctggcccgcatccgcaccgacctccccttggaggtggactttaaggccctgcgccgcaggacccccgacctggagggcctgagggcctttttggaggagctggagttcggaagcctccttcatgagttcggcctcctgggaggggagaagccccgggaggaggccccctggcccccgcccgaaggggccttcgtaggcttcctcctctcccgcaaggagcccatgtgggcggagcttctggccctggcggccgccgcagagggccgggtccaccgggcaacaagcccggttgaggccctggccgacctcaaggaggcccgggggttcctggccaaggacctggccgttttggccctgcgggagggggtggccctggaccccacggacgaccccctcctggtggcctacctcctggacccggccaacaccaaccccgagggggtggcccggcgctacgggggcgagttcacggaggacgcagcggagagggccctcctctccgagaggctcttccagaacctctttccccggctttccgagaagctcctctggctctaccaggaggtggagcggcccctctcccgggtcttggcccacatggaggcccggggggtgaggctggacgtcccccttctggaggccctctcctttgagctggagaaggagatggagcgcctggagggggaggtcttccgcttggccggccaccccttcaacctcaactcccgcgaccagctggaaagggtcctctttgacgagctgggccttaccccggtgggtcggacggagaagacgggcaagcgctccaccgcccagggggccctggaggccctccggggggcccaccccatcgtggagctcatcctccagtaccgggagctttccaagctcaaaagcacctacctggaccccctgccccggctcgtccacccgcggacgggccggcttcacacccgcttcaaccagacggccacggccacgggaaggctttccagctcctatcccaacctgcagaacatccccgtgcgcacccccttggggcagcgcatccgcaaggccttcgtggccgaggaggggtggctccttttggcggcggactactcccagatcgagcttcgggtcctggcccacctctcgggggacgagaacctgaagcgggtcttccgggaggggaaggacatccataccgaaaccgccgcctggatgttcggcttagaccccgctctagtggatccaaagatgcgccgggcggccaagacggtcaacttcggcgtcctctacgggatgtccgcccacaggctctcccaggagctcggcatagactacaaggaggcggaggcctttattgagcgctacttccagagcttccccaaggtgcgggcctggatagaaaggaccctggaggagggccggacgcggggctacgtggagaccctgttcggcaggaggcgctatgtgcccgacctggcctcccgggtccgctcggtgcgggaggcggcggagcggatggccttcaacatgcccgtgcagggcaccgccgccgacctgatgaagatcgccatggtcaagctcttccccaggctaaagcccctgggggcccacctcctcctccaggtgcacgacgagctggtcctggaggtgcccgaggaccgggccgaggaggccaaggccctggtcaaggaggtcatggagaacacctaccccttggacgtgcccctcgaggtggaggtgggcgtgggtcgggactggctggaggcgaagggggattgaagcggtcgac

SEQ ID NO: 3158 - DNA, 2605 bp, Artificial Sequence
  Description of Artificial Sequence: Synthetic DNA sequence of Thermus Rt41A DNA Polymerase D609W
atgaaatacctgctgccgaccgctgctgctggtctgctgctcctcgctgcccagccggcgatggccatggatatcggaattaattcggatccgaattccccactttttgacctggaggaaccccccaagcgggtgcttctggtggacggccaccacctggcctaccgcaccttctacgccctgagcctcaccacctcccggggggagccggtgcagatggtctacggcttcgcccggagcctcctcaaggccttgaaggaggacgggcaggcggtggtcgtggtctttgacgccaaggccccctccttccgccacgaggcctacgaggcctacaaggcgggccgggcccccaccccggaggacttcccccgccagctcgccttggtcaagcggctggtggaccttctgggcctggtccgcctcgaggccccgggttacgaggcggacgacgtcctgggcaccctggccaagaaggccgaaagggaggggatggaggtgcgcatcctcacgggagaccgggacttcttccagctcctctccgagaaggtctcggtcctcctgccggacgggaccctggtcaccccaaaggacgtccaggagaagtacggggtgccgccggagcgctgggtggacttccgcgccctcacgggggaccgctcggacaacatccccggggtggcggggataggggagaagaccgcccttcgactcctcgcggagtgggggagcgtggagaacctcctgaagaacctggaccgggtgaagccggactcggtccggcgcaagatagaggcgcaccttgaggacctccgcctctccttggacctggcccgcatccgcaccgacctccccttggaggtggactttaaggccctgcgccgcaggacccccgacctggagggcctgagggcctttttggaggagctggagttcggaagcctccttcatgagttcggcctcctgggaggggagaagccccgggaggaggccccctggcccccgcccgaaggggccttcgtaggcttcctcctctcccgcaaggagcccatgtgggcggagcttctggccctggcggccgccgcagagggccgggtccaccgggcaacaagcccggttgaggccctggccgacctcaaggaggcccgggggttcctggccaaggacctggccgttttggccctgcgggagggggtggccctggaccccacggacgaccccctcctggtggcctacctcctggacccggccaacaccaaccccgagggggtggcccggcgctacgggggcgagttcacggaggacgcagcggagagggccctcctctccgagaggctcttccagaacctctttccccggctttccgagaagctcctctggctctaccaggaggtggagcggcccctctcccgggtcttggcccacatggaggcccggggggtgaggctggacgtcccccttctggaggccctctcctttgagctggagaaggagatggagcgcctggagggggaggtcttccgcttggccggccaccccttcaacctcaactcccgcgaccagctggaaagggtcctctttgacgagctgggccttaccccggtgggtcggacggagaagacgggcaagcgctccaccgcccagggggccctggaggccctccggggggcccaccccatcgtggagctcatcctccagtaccgggagctttccaagctcaaaagcacctacctggaccccctgccccggctcgtccacccgcggacgggccggcttcacacccgcttcaaccagacggccacggccacgggaaggctttccagctcctggcccaacctgcagaacatccccgtgcgcacccccttggggcagcgcatccgcaaggccttcgtggccgaggaggggtggctccttttggcggcggactactcccagatcgagcttcgggtcctggcccacctctcgggggacgagaacctgaagcgggtcttccgggaggggaaggacatccataccgaaaccgccgcctggatgttcggcttagaccccgctctagtggatccaaagatgcgccgggcggccaagacggtcaacttcggcgtcctctacgggatgtccgcccacaggctctcccaggagctcggcatagactacaaggaggcggaggcctttattgagcgctacttccagagcttccccaaggtgcgggcctggatagaaaggaccctggaggagggccggacgcggggctacgtggagaccctgttcggcaggaggcgctatgtgcccgacctggcctcccgggtccgctcggtgcgggaggcggcggagcggatggccttcaacatgcccgtgcagggcaccgccgccgacctgatgaagatcgccatggtcaagctcttccccaggctaaagcccctgggggcccacctcctcctccaggtgcacgacgagctggtcctggaggtgcccgaggaccgggccgaggaggccaaggccctggtcaaggaggtcatggagaacacctaccccttggacgtgcccctcgaggtggaggtgggcgtgggtcgggactggctggaggcgaagggggattgaagcggtcgac

SEQ ID NO: 3159 - DNA, 2605 bp, Artificial Sequence
  Description of Artificial Sequence: Synthetic DNA sequence of Thermus Rt41A DNA Polymerase D609P
atgaaatacctgctgccgaccgctgctgctggtctgctgctcctcgctgcccagccggcgatggccatggatatcggaattaattcggatccgaattccccactttttgacctggaggaaccccccaagcgggtgcttctggtggacggccaccacctggcctaccgcaccttctacgccctgagcctcaccacctcccggggggagccggtgcagatggtctacggcttcgcccggagcctcctcaaggccttgaaggaggacgggcaggcggtggtcgtggtctttgacgccaaggccccctccttccgccacgaggcctacgaggcctacaaggcgggccgggcccccaccccggaggacttcccccgccagctcgccttggtcaagcggctggtggaccttctgggcctggtccgcctcgaggccccgggttacgaggcggacgacgtcctgggcaccctggccaagaaggccgaaagggaggggatggaggtgcgcatcctcacgggagaccgggacttcttccagctcctctccgagaaggtctcggtcctcctgccggacgggaccctggtcaccccaaaggacgtccaggagaagtacggggtgccgccggagcgctgggtggacttccgcgccctcacgggggaccgctcggacaacatccccggggtggcggggataggggagaagaccgcccttcgactcctcgcggagtgggggagcgtggagaacctcctgaagaacctggaccgggtgaagccggactcggtccggcgcaagatagaggcgcaccttgaggacctccgcctctccttggacctggcccgcatccgcaccgacctccccttggaggtggactttaaggccctgcgccgcaggacccccgacctggagggcctgagggcctttttggaggagctggagttcggaagcctccttcatgagttcggcctcctgggaggggagaagccccgggaggaggccccctggcccccgcccgaaggggccttcgtaggcttcctcctctcccgcaaggagcccatgtgggcggagcttctggccctggcggccgccgcagagggccgggtccaccgggcaacaagcccggttgaggccctggccgacctcaaggaggcccgggggttcctggccaaggacctggccgttttggccctgcgggagggggtggccctggaccccacggacgaccccctcctggtggcctacctcctggacccggccaacaccaaccccgagggggtggcccggcgctacgggggcgagttcacggaggacgcagcggagagggccctcctctccgagaggctcttccagaacctctttccccggctttccgagaagctcctctggctctaccaggaggtggagcggcccctctcccgggtcttggcccacatggaggcccggggggtgaggctggacgtcccccttctggaggccctctcctttgagctggagaaggagatggagcgcctggagggggaggtcttccgcttggccggccaccccttcaacctcaactcccgcgaccagctggaaagggtcctctttgacgagctgggccttaccccggtgggtcggacggagaagacgggcaagcgctccaccgcccagggggccctggaggccctccggggggcccaccccatcgtggagctcatcctccagtaccgggagctttccaagctcaaaagcacctacctggaccccctgccccggctcgtccacccgcggacgggccggcttcacacccgcttcaaccagacggccacggccacgggaaggctttccagctcccctcccaacctgcagaacatccccgtgcgcacccccttggggcagcgcatccgcaaggccttcgtggccgaggaggggtggctccttttggcggcggactactcccagatcgagcttcgggtcctggcccacctctcgggggacgagaacctgaagcgggtcttccgggaggggaaggacatccataccgaaaccgccgcctggatgttcggcttagaccccgctctagtggatccaaagatgcgccgggcggccaagacggtcaacttcggcgtcctctacgggatgtccgcccacaggctctcccaggagctcggcatagactacaaggaggcggaggcctttattgagcgctacttccagagcttccccaaggtgcgggcctggatagaaaggaccctggaggagggccggacgcggggctacgtggagaccctgttcggcaggaggcgctatgtgcccgacctggcctcccgggtccgctcggtgcgggaggcggcggagcggatggccttcaacatgcccgtgcagggcaccgccgccgacctgatgaagatcgccatggtcaagctcttccccaggctaaagcccctgggggcccacctcctcctccaggtgcacgacgagctggtcctggaggtgcccgaggaccgggccgaggaggccaaggccctggtcaaggaggtcatggagaacacctaccccttggacgtgcccctcgaggtggaggtgggcgtgggtcgggactggctggaggcgaagggggattgaagcggtcgac

SEQ ID NO: 3160 - DNA, 2605 bp, Artificial Sequence
  Description of Artificial Sequence: Synthetic DNA sequence of Thermus Rt41A DNA Polymerase D609M
atgaaatacctgctgccgaccgctgctgctggtctgctgctcctcgctgcccagccggcgatggccatggatatcggaattaattcggatccgaattccccactttttgacctggaggaaccccccaagcgggtgcttctggtggacggccaccacctggcctaccgcaccttctacgccctgagcctcaccacctcccggggggagccggtgcagatggtctacggcttcgcccggagcctcctcaaggccttgaaggaggacgggcaggcggtggtcgtggtctttgacgccaaggccccctccttccgccacgaggcctacgaggcctacaaggcgggccgggcccccaccccggaggacttcccccgccagctcgccttggtcaagcggctggtggaccttctgggcctggtccgcctcgaggccccgggttacgaggcggacgacgtcctgggcaccctggccaagaaggccgaaagggaggggatggaggtgcgcatcctcacgggagaccgggacttcttccagctcctctccgagaaggtctcggtcctcctgccggacgggaccctggtcaccccaaaggacgtccaggagaagtacggggtgccgccggagcgctgggtggacttccgcgccctcacgggggaccgctcggacaacatccccggggtggcggggataggggagaagaccgcccttcgactcctcgcggagtgggggagcgtggagaacctcctgaagaacctggaccgggtgaagccggactcggtccggcgcaagatagaggcgcaccttgaggacctccgcctctccttggacctggcccgcatccgcaccgacctccccttggaggtggactttaaggccctgcgccgcaggacccccgacctggagggcctgagggcctttttggaggagctggagttcggaagcctccttcatgagttcggcctcctgggaggggagaagccccgggaggaggccccctggcccccgcccgaaggggccttcgtaggcttcctcctctcccgcaaggagcccatgtgggcggagcttctggccctggcggccgccgcagagggccgggtccaccgggcaacaagcccggttgaggccctggccgacctcaaggaggcccgggggttcctggccaaggacctggccgttttggccctgcgggagggggtggccctggaccccacggacgaccccctcctggtggcctacctcctggacccggccaacaccaaccccgagggggtggcccggcgctacgggggcgagttcacggaggacgcagcggagagggccctcctctccgagaggctcttccagaacctctttccccggctttccgagaagctcctctggctctaccaggaggtggagcggcccctctcccgggtcttggcccacatggaggcccggggggtgaggctggacgtcccccttctggaggccctctcctttgagctggagaaggagatggagcgcctggagggggaggtcttccgcttggccggccaccccttcaacctcaactcccgcgaccagctggaaagggtcctctttgacgagctgggccttaccccggtgggtcggacggagaagacgggcaagcgctccaccgcccagggggccctggaggccctccggggggcccaccccatcgtggagctcatcctccagtaccgggagctttccaagctcaaaagcacctacctggaccccctgccccggctcgtccacccgcggacgggccggcttcacacccgcttcaaccagacggccacggccacgggaaggctttccagctccatgcccaacctgcagaacatccccgtgcgcacccccttggggcagcgcatccgcaaggccttcgtggccgaggaggggtggctccttttggcggcggactactcccagatcgagcttcgggtcctggcccacctctcgggggacgagaacctgaagcgggtcttccgggaggggaaggacatccataccgaaaccgccgcctggatgttcggcttagaccccgctctagtggatccaaagatgcgccgggcggccaagacggtcaacttcggcgtcctctacgggatgtccgcccacaggctctcccaggagctcggcatagactacaaggaggcggaggcctttattgagcgctacttccagagcttccccaaggtgcgggcctggatagaaaggaccctggaggagggccggacgcggggctacgtggagaccctgttcggcaggaggcgctatgtgcccgacctggcctcccgggtccgctcggtgcgggaggcggcggagcggatggccttcaacatgcccgtgcagggcaccgccgccgacctgatgaagatcgccatggtcaagctcttccccaggctaaagcccctgggggcccacctcctcctccaggtgcacgacgagctggtcctggaggtgcccgaggaccgggccgaggaggccaaggccctggtcaaggaggtcatggagaacacctaccccttggacgtgcccctcgaggtggaggtgggcgtgggtcgggactggctggaggcgaagggggattgaagcggtcgac

SEQ ID NO: 3161 - DNA, 2605 bp, Artificial Sequence
  Description of Artificial Sequence: Synthetic DNA sequence of Thermus Rt41A DNA Polymerase D609T
atgaaatacctgctgccgaccgctgctgctggtctgctgctcctcgctgcccagccggcgatggccatggatatcggaattaattcggatccgaattccccactttttgacctggaggaaccccccaagcgggtgcttctggtggacggccaccacctggcctaccgcaccttctacgccctgagcctcaccacctcccggggggagccggtgcagatggtctacggcttcgcccggagcctcctcaaggccttgaaggaggacgggcaggcggtggtcgtggtctttgacgccaaggccccctccttccgccacgaggcctacgaggcctacaaggcgggccgggcccccaccccggaggacttcccccgccagctcgccttggtcaagcggctggtggaccttctgggcctggtccgcctcgaggccccgggttacgaggcggacgacgtcctgggcaccctggccaagaaggccgaaagggaggggatggaggtgcgcatcctcacgggagaccgggacttcttccagctcctctccgagaaggtctcggtcctcctgccggacgggaccctggtcaccccaaaggacgtccaggagaagtacggggtgccgccggagcgctgggtggacttccgcgccctcacgggggaccgctcggacaacatccccggggtggcggggataggggagaagaccgcccttcgactcctcgcggagtgggggagcgtggagaacctcctgaagaacctggaccgggtgaagccggactcggtccggcgcaagatagaggcgcaccttgaggacctccgcctctccttggacctggcccgcatccgcaccgacctccccttggaggtggactttaaggccctgcgccgcaggacccccgacctggagggcctgagggcctttttggaggagctggagttcggaagcctccttcatgagttcggcctcctgggaggggagaagccccgggaggaggccccctggcccccgcccgaaggggccttcgtaggcttcctcctctcccgcaaggagcccatgtgggcggagcttctggccctggcggccgccgcagagggccgggtccaccgggcaacaagcccggttgaggccctggccgacctcaaggaggcccgggggttcctggccaaggacctggccgttttggccctgcgggagggggtggccctggaccccacggacgaccccctcctggtggcctacctcctggacccggccaacaccaaccccgagggggtggcccggcgctacgggggcgagttcacggaggacgcagcggagagggccctcctctccgagaggctcttccagaacctctttccccggctttccgagaagctcctctggctctaccaggaggtggagcggcccctctcccgggtcttggcccacatggaggcccggggggtgaggctggacgtcccccttctggaggccctctcctttgagctggagaaggagatggagcgcctggagggggaggtcttccgcttggccggccaccccttcaacctcaactcccgcgaccagctggaaagggtcctctttgacgagctgggccttaccccggtgggtcggacggagaagacgggcaagcgctccaccgcccagggggccctggaggccctccggggggcccaccccatcgtggagctcatcctccagtaccgggagctttccaagctcaaaagcacctacctggaccccctgccccggctcgtccacccgcggacgggccggcttcacacccgcttcaaccagacggccacggccacgggaaggctttccagctccactcccaacctgcagaacatccccgtgcgcacccccttggggcagcgcatccgcaaggccttcgtggccgaggaggggtggctccttttggcggcggactactcccagatcgagcttcgggtcctggcccacctctcgggggacgagaacctgaagcgggtcttccgggaggggaaggacatccataccgaaaccgccgcctggatgttcggcttagaccccgctctagtggatccaaagatgcgccgggcggccaagacggtcaacttcggcgtcctctacgggatgtccgcccacaggctctcccaggagctcggcatagactacaaggaggcggaggcctttattgagcgctacttccagagcttccccaaggtgcgggcctggatagaaaggaccctggaggagggccggacgcggggctacgtggagaccctgttcggcaggaggcgctatgtgcccgacctggcctcccgggtccgctcggtgcgggaggcggcggagcggatggccttcaacatgcccgtgcagggcaccgccgccgacctgatgaagatcgccatggtcaagctcttccccaggctaaagcccctgggggcccacctcctcctccaggtgcacgacgagctggtcctggaggtgcccgaggaccgggccgaggaggccaaggccctggtcaaggaggtcatggagaacacctaccccttggacgtgcccctcgaggtggaggtgggcgtgggtcgggactggctggaggcgaagggggattgaagcggtcgac

SEQ ID NO: 3162 - DNA, 2605 bp, Artificial Sequence
  Description of Artificial Sequence: Synthetic DNA sequence of Thermus Rt41A DNA Polymerase D609N
atgaaatacctgctgccgaccgctgctgctggtctgctgctcctcgctgcccagccggcgatggccatggatatcggaattaattcggatccgaattccccactttttgacctggaggaaccccccaagcgggtgcttctggtggacggccaccacctggcctaccgcaccttctacgccctgagcctcaccacctcccggggggagccggtgcagatggtctacggcttcgcccggagcctcctcaaggccttgaaggaggacgggcaggcggtggtcgtggtctttgacgccaaggccccctccttccgccacgaggcctacgaggcctacaaggcgggccgggcccccaccccggaggacttcccccgccagctcgccttggtcaagcggctggtggaccttctgggcctggtccgcctcgaggccccgggttacgaggcggacgacgtcctgggcaccctggccaagaaggccgaaagggaggggatggaggtgcgcatcctcacgggagaccgggacttcttccagctcctctccgagaaggtctcggtcctcctgccggacgggaccctggtcaccccaaaggacgtccaggagaagtacggggtgccgccggagcgctgggtggacttccgcgccctcacgggggaccgctcggacaacatccccggggtggcggggataggggagaagaccgcccttcgactcctcgcggagtgggggagcgtggagaacctcctgaagaacctggaccgggtgaagccggactcggtccggcgcaagatagaggcgcaccttgaggacctccgcctctccttggacctggcccgcatccgcaccgacctccccttggaggtggactttaaggccctgcgccgcaggacccccgacctggagggcctgagggcctttttggaggagctggagttcggaagcctccttcatgagttcggcctcctgggaggggagaagccccgggaggaggccccctggcccccgcccgaaggggccttcgtaggcttcctcctctcccgcaaggagcccatgtgggcggagcttctggccctggcggccgccgcagagggccgggtccaccgggcaacaagcccggttgaggccctggccgacctcaaggaggcccgggggttcctggccaaggacctggccgttttggccctgcgggagggggtggccctggaccccacggacgaccccctcctggtggcctacctcctggacccggccaacaccaaccccgagggggtggcccggcgctacgggggcgagttcacggaggacgcagcggagagggccctcctctccgagaggctcttccagaacctctttccccggctttccgagaagctcctctggctctaccaggaggtggagcggcccctctcccgggtcttggcccacatggaggcccggggggtgaggctggacgtcccccttctggaggccctctcctttgagctggagaaggagatggagcgcctggagggggaggtcttccgcttggccggccaccccttcaacctcaactcccgcgaccagctggaaagggtcctctttgacgagctgggccttaccccggtgggtcggacggagaagacgggcaagcgctccaccgcccagggggccctggaggccctccggggggcccaccccatcgtggagctcatcctccagtaccgggagctttccaagctcaaaagcacctacctggaccccctgccccggctcgtccacccgcggacgggccggcttcacacccgcttcaaccagacggccacggccacgggaaggctttccagctccaatcccaacctgcagaacatccccgtgcgcacccccttggggcagcgcatccgcaaggccttcgtggccgaggaggggtggctccttttggcggcggactactcccagatcgagcttcgggtcctggcccacctctcgggggacgagaacctgaagcgggtcttccgggaggggaaggacatccataccgaaaccgccgcctggatgttcggcttagaccccgctctagtggatccaaagatgcgccgggcggccaagacggtcaacttcggcgtcctctacgggatgtccgcccacaggctctcccaggagctcggcatagactacaaggaggcggaggcctttattgagcgctacttccagagcttccccaaggtgcgggcctggatagaaaggaccctggaggagggccggacgcggggctacgtggagaccctgttcggcaggaggcgctatgtgcccgacctggcctcccgggtccgctcggtgcgggaggcggcggagcggatggccttcaacatgcccgtgcagggcaccgccgccgacctgatgaagatcgccatggtcaagctcttccccaggctaaagcccctgggggcccacctcctcctccaggtgcacgacgagctggtcctggaggtgcccgaggaccgggccgaggaggccaaggccctggtcaaggaggtcatggagaacacctaccccttggacgtgcccctcgaggtggaggtgggcgtgggtcgggactggctggaggcgaagggggattgaagcggtcgac

SEQ ID NO: 3163 - DNA, 2605 bp, Artificial Sequence
  Description of Artificial Sequence: Synthetic DNA sequence of Thermus Rt41A DNA Polymerase D609V
atgaaatacctgctgccgaccgctgctgctggtctgctgctcctcgctgcccagccggcgatggccatggatatcggaattaattcggatccgaattccccactttttgacctggaggaaccccccaagcgggtgcttctggtggacggccaccacctggcctaccgcaccttctacgccctgagcctcaccacctcccggggggagccggtgcagatggtctacggcttcgcccggagcctcctcaaggccttgaaggaggacgggcaggcggtggtcgtggtctttgacgccaaggccccctccttccgccacgaggcctacgaggcctacaaggcgggccgggcccccaccccggaggacttcccccgccagctcgccttggtcaagcggctggtggaccttctgggcctggtccgcctcgaggccccgggttacgaggcggacgacgtcctgggcaccctggccaagaaggccgaaagggaggggatggaggtgcgcatcctcacgggagaccgggacttcttccagctcctctccgagaaggtctcggtcctcctgccggacgggaccctggtcaccccaaaggacgtccaggagaagtacggggtgccgccggagcgctgggtggacttccgcgccctcacgggggaccgctcggacaacatccccggggtggcggggataggggagaagaccgcccttcgactcctcgcggagtgggggagcgtggagaacctcctgaagaacctggaccgggtgaagccggactcggtccggcgcaagatagaggcgcaccttgaggacctccgcctctccttggacctggcccgcatccgcaccgacctccccttggaggtggactttaaggccctgcgccgcaggacccccgacctggagggcctgagggcctttttggaggagctggagttcggaagcctccttcatgagttcggcctcctgggaggggagaagccccgggaggaggccccctggcccccgcccgaaggggccttcgtaggcttcctcctctcccgcaaggagcccatgtgggcggagcttctggccctggcggccgccgcagagggccgggtccaccgggcaacaagcccggttgaggccctggccgacctcaaggaggcccgggggttcctggccaaggacctggccgttttggccctgcgggagggggtggccctggaccccacggacgaccccctcctggtggcctacctcctggacccggccaacaccaaccccgagggggtggcccggcgctacgggggcgagttcacggaggacgcagcggagagggccctcctctccgagaggctcttccagaacctctttccccggctttccgagaagctcctctggctctaccaggaggtggagcggcccctctcccgggtcttggcccacatggaggcccggggggtgaggctggacgtcccccttctggaggccctctcctttgagctggagaaggagatggagcgcctggagggggaggtcttccgcttggccggccaccccttcaacctcaactcccgcgaccagctggaaagggtcctctttgacgagctgggccttaccccggtgggtcggacggagaagacgggcaagcgctccaccgcccagggggccctggaggccctccggggggcccaccccatcgtggagctcatcctccagtaccgggagctttccaagctcaaaagcacctacctggaccccctgccccggctcgtccacccgcggacgggccggcttcacacccgcttcaaccagacggccacggccacgggaaggctttccagctccgtccccaacctgcagaacatccccgtgcgcacccccttggggcagcgcatccgcaaggccttcgtggccgaggaggggtggctccttttggcggcggactactcccagatcgagcttcgggtcctggcccacctctcgggggacgagaacctgaagcgggtcttccgggaggggaaggacatccataccgaaaccgccgcctggatgttcggcttagaccccgctctagtggatccaaagatgcgccgggcggccaagacggtcaacttcggcgtcctctacgggatgtccgcccacaggctctcccaggagctcggcatagactacaaggaggcggaggcctttattgagcgctacttccagagcttccccaaggtgcgggcctggatagaaaggaccctggaggagggccggacgcggggctacgtggagaccctgttcggcaggaggcgctatgtgcccgacctggcctcccgggtccgctcggtgcgggaggcggcggagcggatggccttcaacatgcccgtgcagggcaccgccgccgacctgatgaagatcgccatggtcaagctcttccccaggctaaagcccctgggggcccacctcctcctccaggtgcacgacgagctggtcctggaggtgcccgaggaccgggccgaggaggccaaggccctggtcaaggaggtcatggagaacacctaccccttggacgtgcccctcgaggtggaggtgggcgtgggtcgggactggctggaggcgaagggggattgaagcggtcgac

SEQ ID NO: 3164 - DNA, 2605 bp, Artificial Sequence
  Description of Artificial Sequence: Synthetic DNA sequence of Thermus Rt41A DNA Polymerase A692R
atgaaatacctgctgccgaccgctgctgctggtctgctgctcctcgctgcccagccggcgatggccatggatatcggaattaattcggatccgaattccccactttttgacctggaggaaccccccaagcgggtgcttctggtggacggccaccacctggcctaccgcaccttctacgccctgagcctcaccacctcccggggggagccggtgcagatggtctacggcttcgcccggagcctcctcaaggccttgaaggaggacgggcaggcggtggtcgtggtctttgacgccaaggccccctccttccgccacgaggcctacgaggcctacaaggcgggccgggcccccaccccggaggacttcccccgccagctcgccttggtcaagcggctggtggaccttctgggcctggtccgcctcgaggccccgggttacgaggcggacgacgtcctgggcaccctggccaagaaggccgaaagggaggggatggaggtgcgcatcctcacgggagaccgggacttcttccagctcctctccgagaaggtctcggtcctcctgccggacgggaccctggtcaccccaaaggacgtccaggagaagtacggggtgccgccggagcgctgggtggacttccgcgccctcacgggggaccgctcggacaacatccccggggtggcggggataggggagaagaccgcccttcgactcctcgcggagtgggggagcgtggagaacctcctgaagaacctggaccgggtgaagccggactcggtccggcgcaagatagaggcgcaccttgaggacctccgcctctccttggacctggcccgcatccgcaccgacctccccttggaggtggactttaaggccctgcgccgcaggacccccgacctggagggcctgagggcctttttggaggagctggagttcggaagcctccttcatgagttcggcctcctgggaggggagaagccccgggaggaggccccctggcccccgcccgaaggggccttcgtaggcttcctcctctcccgcaaggagcccatgtgggcggagcttctggccctggcggccgccgcagagggccgggtccaccgggcaacaagcccggttgaggccctggccgacctcaaggaggcccgggggttcctggccaaggacctggccgttttggccctgcgggagggggtggccctggaccccacggacgaccccctcctggtggcctacctcctggacccggccaacaccaaccccgagggggtggcccggcgctacgggggcgagttcacggaggacgcagcggagagggccctcctctccgagaggctcttccagaacctctttccccggctttccgagaagctcctctggctctaccaggaggtggagcggcccctctcccgggtcttggcccacatggaggcccggggggtgaggctggacgtcccccttctggaggccctctcctttgagctggagaaggagatggagcgcctggagggggaggtcttccgcttggccggccaccccttcaacctcaactcccgcgaccagctggaaagggtcctctttgacgagctgggccttaccccggtgggtcggacggagaagacgggcaagcgctccaccgcccagggggccctggaggccctccggggggcccaccccatcgtggagctcatcctccagtaccgggagctttccaagctcaaaagcacctacctggaccccctgccccggctcgtccacccgcggacgggccggcttcacacccgcttcaaccagacggccacggccacgggaaggctttccagctccgaccccaacctgcagaacatccccgtgcgcacccccttggggcagcgcatccgcaaggccttcgtggccgaggaggggtggctccttttggcggcggactactcccagatcgagcttcgggtcctggcccacctctcgggggacgagaacctgaagcgggtcttccgggaggggaaggacatccataccgaaaccgccgcctggatgttcggcttagaccccgctctagtggatccaaagatgcgccggcgagccaagacggtcaacttcggcgtcctctacgggatgtccgcccacaggctctcccaggagctcggcatagactacaaggaggcggaggcctttattgagcgctacttccagagcttccccaaggtgcgggcctggatagaaaggaccctggaggagggccggacgcggggctacgtggagaccctgttcggcaggaggcgctatgtgcccgacctggcctcccgggtccgctcggtgcgggaggcggcggagcggatggccttcaacatgcccgtgcagggcaccgccgccgacctgatgaagatcgccatggtcaagctcttccccaggctaaagcccctgggggcccacctcctcctccaggtgcacgacgagctggtcctggaggtgcccgaggaccgggccgaggaggccaaggccctggtcaaggaggtcatggagaacacctaccccttggacgtgcccctcgaggtggaggtgggcgtgggtcgggactggctggaggcgaagggggattgaagcggtcgac

SEQ ID NO: 3165 - DNA, 2605 bp, Artificial Sequence
  Description of Artificial Sequence: Synthetic DNA sequence of Thermus Rt41A DNA Polymerase A692C
atgaaatacctgctgccgaccgctgctgctggtctgctgctcctcgctgcccagccggcgatggccatggatatcggaattaattcggatccgaattccccactttttgacctggaggaaccccccaagcgggtgcttctggtggacggccaccacctggcctaccgcaccttctacgccctgagcctcaccacctcccggggggagccggtgcagatggtctacggcttcgcccggagcctcctcaaggccttgaaggaggacgggcaggcggtggtcgtggtctttgacgccaaggccccctccttccgccacgaggcctacgaggcctacaaggcgggccgggcccccaccccggaggacttcccccgccagctcgccttggtcaagcggctggtggaccttctgggcctggtccgcctcgaggccccgggttacgaggcggacgacgtcctgggcaccctggccaagaaggccgaaagggaggggatggaggtgcgcatcctcacgggagaccgggacttcttccagctcctctccgagaaggtctcggtcctcctgccggacgggaccctggtcaccccaaaggacgtccaggagaagtacggggtgccgccggagcgctgggtggacttccgcgccctcacgggggaccgctcggacaacatccccggggtggcggggataggggagaagaccgcccttcgactcctcgcggagtgggggagcgtggagaacctcctgaagaacctggaccgggtgaagccggactcggtccggcgcaagatagaggcgcaccttgaggacctccgcctctccttggacctggcccgcatccgcaccgacctccccttggaggtggactttaaggccctgcgccgcaggacccccgacctggagggcctgagggcctttttggaggagctggagttcggaagcctccttcatgagttcggcctcctgggaggggagaagccccgggaggaggccccctggcccccgcccgaaggggccttcgtaggcttcctcctctcccgcaaggagcccatgtgggcggagcttctggccctggcggccgccgcagagggccgggtccaccgggcaacaagcccggttgaggccctggccgacctcaaggaggcccgggggttcctggccaaggacctggccgttttggccctgcgggagggggtggccctggaccccacggacgaccccctcctggtggcctacctcctggacccggccaacaccaaccccgagggggtggcccggcgctacgggggcgagttcacggaggacgcagcggagagggccctcctctccgagaggctcttccagaacctctttccccggctttccgagaagctcctctggctctaccaggaggtggagcggcccctctcccgggtcttggcccacatggaggcccggggggtgaggctggacgtcccccttctggaggccctctcctttgagctggagaaggagatggagcgcctggagggggaggtcttccgcttggccggccaccccttcaacctcaactcccgcgaccagctggaaagggtcctctttgacgagctgggccttaccccggtgggtcggacggagaagacgggcaagcgctccaccgcccagggggccctggaggccctccggggggcccaccccatcgtggagctcatcctccagtaccgggagctttccaagctcaaaagcacctacctggaccccctgccccggctcgtccacccgcggacgggccggcttcacacccgcttcaaccagacggccacggccacgggaaggctttccagctccgaccccaacctgcagaacatccccgtgcgcacccccttggggcagcgcatccgcaaggccttcgtggccgaggaggggtggctccttttggcggcggactactcccagatcgagcttcgggtcctggcccacctctcgggggacgagaacctgaagcgggtcttccgggaggggaaggacatccataccgaaaccgccgcctggatgttcggcttagaccccgctctagtggatccaaagatgcgccggtgtgccaagacggtcaacttcggcgtcctctacgggatgtccgcccacaggctctcccaggagctcggcatagactacaaggaggcggaggcctttattgagcgctacttccagagcttccccaaggtgcgggcctggatagaaaggaccctggaggagggccggacgcggggctacgtggagaccctgttcggcaggaggcgctatgtgcccgacctggcctcccgggtccgctcggtgcgggaggcggcggagcggatggccttcaacatgcccgtgcagggcaccgccgccgacctgatgaagatcgccatggtcaagctcttccccaggctaaagcccctgggggcccacctcctcctccaggtgcacgacgagctggtcctggaggtgcccgaggaccgggccgaggaggccaaggccctggtcaaggaggtcatggagaacacctaccccttggacgtgcccctcgaggtggaggtgggcgtgggtcgggactggctggaggcgaagggggattgaagcggtcgac

SEQ ID NO: 3166 - DNA, 2605 bp, Artificial Sequence
  Description of Artificial Sequence: Synthetic DNA sequence of Thermus Rt41A DNA Polymerase A692G
atgaaatacctgctgccgaccgctgctgctggtctgctgctcctcgctgcccagccggcgatggccatggatatcggaattaattcggatccgaattccccactttttgacctggaggaaccccccaagcgggtgcttctggtggacggccaccacctggcctaccgcaccttctacgccctgagcctcaccacctcccggggggagccggtgcagatggtctacggcttcgcccggagcctcctcaaggccttgaaggaggacgggcaggcggtggtcgtggtctttgacgccaaggccccctccttccgccacgaggcctacgaggcctacaaggcgggccgggcccccaccccggaggacttcccccgccagctcgccttggtcaagcggctggtggaccttctgggcctggtccgcctcgaggccccgggttacgaggcggacgacgtcctgggcaccctggccaagaaggccgaaagggaggggatggaggtgcgcatcctcacgggagaccgggacttcttccagctcctctccgagaaggtctcggtcctcctgccggacgggaccctggtcaccccaaaggacgtccaggagaagtacggggtgccgccggagcgctgggtggacttccgcgccctcacgggggaccgctcggacaacatccccggggtggcggggataggggagaagaccgcccttcgactcctcgcggagtgggggagcgtggagaacctcctgaagaacctggaccgggtgaagccggactcggtccggcgcaagatagaggcgcaccttgaggacctccgcctctccttggacctggcccgcatccgcaccgacctccccttggaggtggactttaaggccctgcgccgcaggacccccgacctggagggcctgagggcctttttggaggagctggagttcggaagcctccttcatgagttcggcctcctgggaggggagaagccccgggaggaggccccctggcccccgcccgaaggggccttcgtaggcttcctcctctcccgcaaggagcccatgtgggcggagcttctggccctggcggccgccgcagagggccgggtccaccgggcaacaagcccggttgaggccctggccgacctcaaggaggcccgggggttcctggccaaggacctggccgttttggccctgcgggagggggtggccctggaccccacggacgaccccctcctggtggcctacctcctggacccggccaacaccaaccccgagggggtggcccggcgctacgggggcgagttcacggaggacgcagcggagagggccctcctctccgagaggctcttccagaacctctttccccggctttccgagaagctcctctggctctaccaggaggtggagcggcccctctcccgggtcttggcccacatggaggcccggggggtgaggctggacgtcccccttctggaggccctctcctttgagctggagaaggagatggagcgcctggagggggaggtcttccgcttggccggccaccccttcaacctcaactcccgcgaccagctggaaagggtcctctttgacgagctgggccttaccccggtgggtcggacggagaagacgggcaagcgctccaccgcccagggggccctggaggccctccggggggcccaccccatcgtggagctcatcctccagtaccgggagctttccaagctcaaaagcacctacctggaccccctgccccggctcgtccacccgcggacgggccggcttcacacccgcttcaaccagacggccacggccacgggaaggctttccagctccgaccccaacctgcagaacatccccgtgcgcacccccttggggcagcgcatccgcaaggccttcgtggccgaggaggggtggctccttttggcggcggactactcccagatcgagcttcgggtcctggcccacctctcgggggacgagaacctgaagcgggtcttccgggaggggaaggacatccataccgaaaccgccgcctggatgttcggcttagaccccgctctagtggatccaaagatgcgccggggtgccaagacggtcaacttcggcgtcctctacgggatgtccgcccacaggctctcccaggagctcggcatagactacaaggaggcggaggcctttattgagcgctacttccagagcttccccaaggtgcgggcctggatagaaaggaccctggaggagggccggacgcggggctacgtggagaccctgttcggcaggaggcgctatgtgcccgacctggcctcccgggtccgctcggtgcgggaggcggcggagcggatggccttcaacatgcccgtgcagggcaccgccgccgacctgatgaagatcgccatggtcaagctcttccccaggctaaagcccctgggggcccacctcctcctccaggtgcacgacgagctggtcctggaggtgcccgaggaccgggccgaggaggccaaggccctggtcaaggaggtcatggagaacacctaccccttggacgtgcccctcgaggtggaggtgggcgtgggtcgggactggctggaggcgaagggggattgaagcggtcgac

SEQ ID NO: 3167 - DNA, 2605 bp, Artificial Sequence
  Description of Artificial Sequence: Synthetic DNA sequence of Thermus Rt41A DNA Polymerase A692Q
atgaaatacctgctgccgaccgctgctgctggtctgctgctcctcgctgcccagccggcgatggccatggatatcggaattaattcggatccgaattccccactttttgacctggaggaaccccccaagcgggtgcttctggtggacggccaccacctggcctaccgcaccttctacgccctgagcctcaccacctcccggggggagccggtgcagatggtctacggcttcgcccggagcctcctcaaggccttgaaggaggacgggcaggcggtggtcgtggtctttgacgccaaggccccctccttccgccacgaggcctacgaggcctacaaggcgggccgggcccccaccccggaggacttcccccgccagctcgccttggtcaagcggctggtggaccttctgggcctggtccgcctcgaggccccgggttacgaggcggacgacgtcctgggcaccctggccaagaaggccgaaagggaggggatggaggtgcgcatcctcacgggagaccgggacttcttccagctcctctccgagaaggtctcggtcctcctgccggacgggaccctggtcaccccaaaggacgtccaggagaagtacggggtgccgccggagcgctgggtggacttccgcgccctcacgggggaccgctcggacaacatccccggggtggcggggataggggagaagaccgcccttcgactcctcgcggagtgggggagcgtggagaacctcctgaagaacctggaccgggtgaagccggactcggtccggcgcaagatagaggcgcaccttgaggacctccgcctctccttggacctggcccgcatccgcaccgacctccccttggaggtggactttaaggccctgcgccgcaggacccccgacctggagggcctgagggcctttttggaggagctggagttcggaagcctccttcatgagttcggcctcctgggaggggagaagccccgggaggaggccccctggcccccgcccgaaggggccttcgtaggcttcctcctctcccgcaaggagcccatgtgggcggagcttctggccctggcggccgccgcagagggccgggtccaccgggcaacaagcccggttgaggccctggccgacctcaaggaggcccgggggttcctggccaaggacctggccgttttggccctgcgggagggggtggccctggaccccacggacgaccccctcctggtggcctacctcctggacccggccaacaccaaccccgagggggtggcccggcgctacgggggcgagttcacggaggacgcagcggagagggccctcctctccgagaggctcttccagaacctctttccccggctttccgagaagctcctctggctctaccaggaggtggagcggcccctctcccgggtcttggcccacatggaggcccggggggtgaggctggacgtcccccttctggaggccctctcctttgagctggagaaggagatggagcgcctggagggggaggtcttccgcttggccggccaccccttcaacctcaactcccgcgaccagctggaaagggtcctctttgacgagctgggccttaccccggtgggtcggacggagaagacgggcaagcgctccaccgcccagggggccctggaggccctccggggggcccaccccatcgtggagctcatcctccagtaccgggagctttccaagctcaaaagcacctacctggaccccctgccccggctcgtccacccgcggacgggccggcttcacacccgcttcaaccagacggccacggccacgggaaggctttccagctccgaccccaacctgcagaacatccccgtgcgcacccccttggggcagcgcatccgcaaggccttcgtggccgaggaggggtggctccttttggcggcggactactcccagatcgagcttcgggtcctggcccacctctcgggggacgagaacctgaagcgggtcttccgggaggggaaggacatccataccgaaaccgccgcctggatgttcggcttagaccccgctctagtggatccaaagatgcgccggcaagccaagacggtcaacttcggcgtcctctacgggatgtccgcccacaggctctcccaggagctcggcatagactacaaggaggcggaggcctttattgagcgctacttccagagcttccccaaggtgcgggcctggatagaaaggaccctggaggagggccggacgcggggctacgtggagaccctgttcggcaggaggcgctatgtgcccgacctggcctcccgggtccgctcggtgcgggaggcggcggagcggatggccttcaacatgcccgtgcagggcaccgccgccgacctgatgaagatcgccatggtcaagctcttccccaggctaaagcccctgggggcccacctcctcctccaggtgcacgacgagctggtcctggaggtgcccgaggaccgggccgaggaggccaaggccctggtcaaggaggtcatggagaacacctaccccttggacgtgcccctcgaggtggaggtgggcgtgggtcgggactggctggaggcgaagggggattgaagcggtcgac

SEQ ID NO: 3168 - DNA, 2605 bp, Artificial Sequence
  Description of Artificial Sequence: Synthetic DNA sequence of Thermus Rt41A DNA Polymerase A692H
atgaaatacctgctgccgaccgctgctgctggtctgctgctcctcgctgcccagccggcgatggccatggatatcggaattaattcggatccgaattccccactttttgacctggaggaaccccccaagcgggtgcttctggtggacggccaccacctggcctaccgcaccttctacgccctgagcctcaccacctcccggggggagccggtgcagatggtctacggcttcgcccggagcctcctcaaggccttgaaggaggacgggcaggcggtggtcgtggtctttgacgccaaggccccctccttccgccacgaggcctacgaggcctacaaggcgggccgggcccccaccccggaggacttcccccgccagctcgccttggtcaagcggctggtggaccttctgggcctggtccgcctcgaggccccgggttacgaggcggacgacgtcctgggcaccctggccaagaaggccgaaagggaggggatggaggtgcgcatcctcacgggagaccgggacttcttccagctcctctccgagaaggtctcggtcctcctgccggacgggaccctggtcaccccaaaggacgtccaggagaagtacggggtgccgccggagcgctgggtggacttccgcgccctcacgggggaccgctcggacaacatccccggggtggcggggataggggagaagaccgcccttcgactcctcgcggagtgggggagcgtggagaacctcctgaagaacctggaccgggtgaagccggactcggtccggcgcaagatagaggcgcaccttgaggacctccgcctctccttggacctggcccgcatccgcaccgacctccccttggaggtggactttaaggccctgcgccgcaggacccccgacctggagggcctgagggcctttttggaggagctggagttcggaagcctccttcatgagttcggcctcctgggaggggagaagccccgggaggaggccccctggcccccgcccgaaggggccttcgtaggcttcctcctctcccgcaaggagcccatgtgggcggagcttctggccctggcggccgccgcagagggccgggtccaccgggcaacaagcccggttgaggccctggccgacctcaaggaggcccgggggttcctggccaaggacctggccgttttggccctgcgggagggggtggccctggaccccacggacgaccccctcctggtggcctacctcctggacccggccaacaccaaccccgagggggtggcccggcgctacgggggcgagttcacggaggacgcagcggagagggccctcctctccgagaggctcttccagaacctctttccccggctttccgagaagctcctctggctctaccaggaggtggagcggcccctctcccgggtcttggcccacatggaggcccggggggtgaggctggacgtcccccttctggaggccctctcctttgagctggagaaggagatggagcgcctggagggggaggtcttccgcttggccggccaccccttcaacctcaactcccgcgaccagctggaaagggtcctctttgacgagctgggccttaccccggtgggtcggacggagaagacgggcaagcgctccaccgcccagggggccctggaggccctccggggggcccaccccatcgtggagctcatcctccagtaccgggagctttccaagctcaaaagcacctacctggaccccctgccccggctcgtccacccgcggacgggccggcttcacacccgcttcaaccagacggccacggccacgggaaggctttccagctccgaccccaacctgcagaacatccccgtgcgcacccccttggggcagcgcatccgcaaggccttcgtggccgaggaggggtggctccttttggcggcggactactcccagatcgagcttcgggtcctggcccacctctcgggggacgagaacctgaagcgggtcttccgggaggggaaggacatccataccgaaaccgccgcctggatgttcggcttagaccccgctctagtggatccaaagatgcgccggcatgccaagacggtcaacttcggcgtcctctacgggatgtccgcccacaggctctcccaggagctcggcatagactacaaggaggcggaggcctttattgagcgctacttccagagcttccccaaggtgcgggcctggatagaaaggaccctggaggagggccggacgcggggctacgtggagaccctgttcggcaggaggcgctatgtgcccgacctggcctcccgggtccgctcggtgcgggaggcggcggagcggatggccttcaacatgcccgtgcagggcaccgccgccgacctgatgaagatcgccatggtcaagctcttccccaggctaaagcccctgggggcccacctcctcctccaggtgcacgacgagctggtcctggaggtgcccgaggaccgggccgaggaggccaaggccctggtcaaggaggtcatggagaacacctaccccttggacgtgcccctcgaggtggaggtgggcgtgggtcgggactggctggaggcgaagggggattgaagcggtcgac

SEQ ID NO: 3169 - DNA, 2605 bp, Artificial Sequence
  Description of Artificial Sequence: Synthetic DNA sequence of Thermus Rt41A DNA Polymerase A692I
atgaaatacctgctgccgaccgctgctgctggtctgctgctcctcgctgcccagccggcgatggccatggatatcggaattaattcggatccgaattccccactttttgacctggaggaaccccccaagcgggtgcttctggtggacggccaccacctggcctaccgcaccttctacgccctgagcctcaccacctcccggggggagccggtgcagatggtctacggcttcgcccggagcctcctcaaggccttgaaggaggacgggcaggcggtggtcgtggtctttgacgccaaggccccctccttccgccacgaggcctacgaggcctacaaggcgggccgggcccccaccccggaggacttcccccgccagctcgccttggtcaagcggctggtggaccttctgggcctggtccgcctcgaggccccgggttacgaggcggacgacgtcctgggcaccctggccaagaaggccgaaagggaggggatggaggtgcgcatcctcacgggagaccgggacttcttccagctcctctccgagaaggtctcggtcctcctgccggacgggaccctggtcaccccaaaggacgtccaggagaagtacggggtgccgccggagcgctgggtggacttccgcgccctcacgggggaccgctcggacaacatccccggggtggcggggataggggagaagaccgcccttcgactcctcgcggagtgggggagcgtggagaacctcctgaagaacctggaccgggtgaagccggactcggtccggcgcaagatagaggcgcaccttgaggacctccgcctctccttggacctggcccgcatccgcaccgacctccccttggaggtggactttaaggccctgcgccgcaggacccccgacctggagggcctgagggcctttttggaggagctggagttcggaagcctccttcatgagttcggcctcctgggaggggagaagccccgggaggaggccccctggcccccgcccgaaggggccttcgtaggcttcctcctctcccgcaaggagcccatgtgggcggagcttctggccctggcggccgccgcagagggccgggtccaccgggcaacaagcccggttgaggccctggccgacctcaaggaggcccgggggttcctggccaaggacctggccgttttggccctgcgggagggggtggccctggaccccacggacgaccccctcctggtggcctacctcctggacccggccaacaccaaccccgagggggtggcccggcgctacgggggcgagttcacggaggacgcagcggagagggccctcctctccgagaggctcttccagaacctctttccccggctttccgagaagctcctctggctctaccaggaggtggagcggcccctctcccgggtcttggcccacatggaggcccggggggtgaggctggacgtcccccttctggaggccctctcctttgagctggagaaggagatggagcgcctggagggggaggtcttccgcttggccggccaccccttcaacctcaactcccgcgaccagctggaaagggtcctctttgacgagctgggccttaccccggtgggtcggacggagaagacgggcaagcgctccaccgcccagggggccctggaggccctccggggggcccaccccatcgtggagctcatcctccagtaccgggagctttccaagctcaaaagcacctacctggaccccctgccccggctcgtccacccgcggacgggccggcttcacacccgcttcaaccagacggccacggccacgggaaggctttccagctccgaccccaacctgcagaacatccccgtgcgcacccccttggggcagcgcatccgcaaggccttcgtggccgaggaggggtggctccttttggcggcggactactcccagatcgagcttcgggtcctggcccacctctcgggggacgagaacctgaagcgggtcttccgggaggggaaggacatccataccgaaaccgccgcctggatgttcggcttagaccccgctctagtggatccaaagatgcgccggattgccaagacggtcaacttcggcgtcctctacgggatgtccgcccacaggctctcccaggagctcggcatagactacaaggaggcggaggcctttattgagcgctacttccagagcttccccaaggtgcgggcctggatagaaaggaccctggaggagggccggacgcggggctacgtggagaccctgttcggcaggaggcgctatgtgcccgacctggcctcccgggtccgctcggtgcgggaggcggcggagcggatggccttcaacatgcccgtgcagggcaccgccgccgacctgatgaagatcgccatggtcaagctcttccccaggctaaagcccctgggggcccacctcctcctccaggtgcacgacgagctggtcctggaggtgcccgaggaccgggccgaggaggccaaggccctggtcaaggaggtcatggagaacacctaccccttggacgtgcccctcgaggtggaggtgggcgtgggtcgggactggctggaggcgaagggggattgaagcggtcgac

SEQ ID NO: 3170 - DNA, 2605 bp, Artificial Sequence
  Description of Artificial Sequence: Synthetic DNA sequence of Thermus Rt41A DNA Polymerase A692L
atgaaatacctgctgccgaccgctgctgctggtctgctgctcctcgctgcccagccggcgatggccatggatatcggaattaattcggatccgaattccccactttttgacctggaggaaccccccaagcgggtgcttctggtggacggccaccacctggcctaccgcaccttctacgccctgagcctcaccacctcccggggggagccggtgcagatggtctacggcttcgcccggagcctcctcaaggccttgaaggaggacgggcaggcggtggtcgtggtctttgacgccaaggccccctccttccgccacgaggcctacgaggcctacaaggcgggccgggcccccaccccggaggacttcccccgccagctcgccttggtcaagcggctggtggaccttctgggcctggtccgcctcgaggccccgggttacgaggcggacgacgtcctgggcaccctggccaagaaggccgaaagggaggggatggaggtgcgcatcctcacgggagaccgggacttcttccagctcctctccgagaaggtctcggtcctcctgccggacgggaccctggtcaccccaaaggacgtccaggagaagtacggggtgccgccggagcgctgggtggacttccgcgccctcacgggggaccgctcggacaacatccccggggtggcggggataggggagaagaccgcccttcgactcctcgcggagtgggggagcgtggagaacctcctgaagaacctggaccgggtgaagccggactcggtccggcgcaagatagaggcgcaccttgaggacctccgcctctccttggacctggcccgcatccgcaccgacctccccttggaggtggactttaaggccctgcgccgcaggacccccgacctggagggcctgagggcctttttggaggagctggagttcggaagcctccttcatgagttcggcctcctgggaggggagaagccccgggaggaggccccctggcccccgcccgaaggggccttcgtaggcttcctcctctcccgcaaggagcccatgtgggcggagcttctggccctggcggccgccgcagagggccgggtccaccgggcaacaagcccggttgaggccctggccgacctcaaggaggcccgggggttcctggccaaggacctggccgttttggccctgcgggagggggtggccctggaccccacggacgaccccctcctggtggcctacctcctggacccggccaacaccaaccccgagggggtggcccggcgctacgggggcgagttcacggaggacgcagcggagagggccctcctctccgagaggctcttccagaacctctttccccggctttccgagaagctcctctggctctaccaggaggtggagcggcccctctcccgggtcttggcccacatggaggcccggggggtgaggctggacgtcccccttctggaggccctctcctttgagctggagaaggagatggagcgcctggagggggaggtcttccgcttggccggccaccccttcaacctcaactcccgcgaccagctggaaagggtcctctttgacgagctgggccttaccccggtgggtcggacggagaagacgggcaagcgctccaccgcccagggggccctggaggccctccggggggcccaccccatcgtggagctcatcctccagtaccgggagctttccaagctcaaaagcacctacctggaccccctgccccggctcgtccacccgcggacgggccggcttcacacccgcttcaaccagacggccacggccacgggaaggctttccagctccgaccccaacctgcagaacatccccgtgcgcacccccttggggcagcgcatccgcaaggccttcgtggccgaggaggggtggctccttttggcggcggactactcccagatcgagcttcgggtcctggcccacctctcgggggacgagaacctgaagcgggtcttccgggaggggaaggacatccataccgaaaccgccgcctggatgttcggcttagaccccgctctagtggatccaaagatgcgccggttagccaagacggtcaacttcggcgtcctctacgggatgtccgcccacaggctctcccaggagctcggcatagactacaaggaggcggaggcctttattgagcgctacttccagagcttccccaaggtgcgggcctggatagaaaggaccctggaggagggccggacgcggggctacgtggagaccctgttcggcaggaggcgctatgtgcccgacctggcctcccgggtccgctcggtgcgggaggcggcggagcggatggccttcaacatgcccgtgcagggcaccgccgccgacctgatgaagatcgccatggtcaagctcttccccaggctaaagcccctgggggcccacctcctcctccaggtgcacgacgagctggtcctggaggtgcccgaggaccgggccgaggaggccaaggccctggtcaaggaggtcatggagaacacctaccccttggacgtgcccctcgaggtggaggtgggcgtgggtcgggactggctggaggcgaagggggattgaagcggtcgac

SEQ ID NO: 3171 - DNA, 2605 bp, Artificial Sequence
  Description of Artificial Sequence: Synthetic DNA sequence of Thermus Rt41A DNA Polymerase A692K
atgaaatacctgctgccgaccgctgctgctggtctgctgctcctcgctgcccagccggcgatggccatggatatcggaattaattcggatccgaattccccactttttgacctggaggaaccccccaagcgggtgcttctggtggacggccaccacctggcctaccgcaccttctacgccctgagcctcaccacctcccggggggagccggtgcagatggtctacggcttcgcccggagcctcctcaaggccttgaaggaggacgggcaggcggtggtcgtggtctttgacgccaaggccccctccttccgccacgaggcctacgaggcctacaaggcgggccgggcccccaccccggaggacttcccccgccagctcgccttggtcaagcggctggtggaccttctgggcctggtccgcctcgaggccccgggttacgaggcggacgacgtcctgggcaccctggccaagaaggccgaaagggaggggatggaggtgcgcatcctcacgggagaccgggacttcttccagctcctctccgagaaggtctcggtcctcctgccggacgggaccctggtcaccccaaaggacgtccaggagaagtacggggtgccgccggagcgctgggtggacttccgcgccctcacgggggaccgctcggacaacatccccggggtggcggggataggggagaagaccgcccttcgactcctcgcggagtgggggagcgtggagaacctcctgaagaacctggaccgggtgaagccggactcggtccggcgcaagatagaggcgcaccttgaggacctccgcctctccttggacctggcccgcatccgcaccgacctccccttggaggtggactttaaggccctgcgccgcaggacccccgacctggagggcctgagggcctttttggaggagctggagttcggaagcctccttcatgagttcggcctcctgggaggggagaagccccgggaggaggccccctggcccccgcccgaaggggccttcgtaggcttcctcctctcccgcaaggagcccatgtgggcggagcttctggccctggcggccgccgcagagggccgggtccaccgggcaacaagcccggttgaggccctggccgacctcaaggaggcccgggggttcctggccaaggacctggccgttttggccctgcgggagggggtggccctggaccccacggacgaccccctcctggtggcctacctcctggacccggccaacaccaaccccgagggggtggcccggcgctacgggggcgagttcacggaggacgcagcggagagggccctcctctccgagaggctcttccagaacctctttccccggctttccgagaagctcctctggctctaccaggaggtggagcggcccctctcccgggtcttggcccacatggaggcccggggggtgaggctggacgtcccccttctggaggccctctcctttgagctggagaaggagatggagcgcctggagggggaggtcttccgcttggccggccaccccttcaacctcaactcccgcgaccagctggaaagggtcctctttgacgagctgggccttaccccggtgggtcggacggagaagacgggcaagcgctccaccgcccagggggccctggaggccctccggggggcccaccccatcgtggagctcatcctccagtaccgggagctttccaagctcaaaagcacctacctggaccccctgccccggctcgtccacccgcggacgggccggcttcacacccgcttcaaccagacggccacggccacgggaaggctttccagctccgaccccaacctgcagaacatccccgtgcgcacccccttggggcagcgcatccgcaaggccttcgtggccgaggaggggtggctccttttggcggcggactactcccagatcgagcttcgggtcctggcccacctctcgggggacgagaacctgaagcgggtcttccgggaggggaaggacatccataccgaaaccgccgcctggatgttcggcttagaccccgctctagtggatccaaagatgcgccggaaagccaagacggtcaacttcggcgtcctctacgggatgtccgcccacaggctctcccaggagctcggcatagactacaaggaggcggaggcctttattgagcgctacttccagagcttccccaaggtgcgggcctggatagaaaggaccctggaggagggccggacgcggggctacgtggagaccctgttcggcaggaggcgctatgtgcccgacctggcctcccgggtccgctcggtgcgggaggcggcggagcggatggccttcaacatgcccgtgcagggcaccgccgccgacctgatgaagatcgccatggtcaagctcttccccaggctaaagcccctgggggcccacctcctcctccaggtgcacgacgagctggtcctggaggtgcccgaggaccgggccgaggaggccaaggccctggtcaaggaggtcatggagaacacctaccccttggacgtgcccctcgaggtggaggtgggcgtgggtcgggactggctggaggcgaagggggattgaagcggtcgac

SEQ ID NO: 3172 - DNA, 2605 bp, Artificial Sequence
  Description of Artificial Sequence: Synthetic DNA sequence of Thermus Rt41A DNA Polymerase A692E
atgaaatacctgctgccgaccgctgctgctggtctgctgctcctcgctgcccagccggcgatggccatggatatcggaattaattcggatccgaattccccactttttgacctggaggaaccccccaagcgggtgcttctggtggacggccaccacctggcctaccgcaccttctacgccctgagcctcaccacctcccggggggagccggtgcagatggtctacggcttcgcccggagcctcctcaaggccttgaaggaggacgggcaggcggtggtcgtggtctttgacgccaaggccccctccttccgccacgaggcctacgaggcctacaaggcgggccgggcccccaccccggaggacttcccccgccagctcgccttggtcaagcggctggtggaccttctgggcctggtccgcctcgaggccccgggttacgaggcggacgacgtcctgggcaccctggccaagaaggccgaaagggaggggatggaggtgcgcatcctcacgggagaccgggacttcttccagctcctctccgagaaggtctcggtcctcctgccggacgggaccctggtcaccccaaaggacgtccaggagaagtacggggtgccgccggagcgctgggtggacttccgcgccctcacgggggaccgctcggacaacatccccggggtggcggggataggggagaagaccgcccttcgactcctcgcggagtgggggagcgtggagaacctcctgaagaacctggaccgggtgaagccggactcggtccggcgcaagatagaggcgcaccttgaggacctccgcctctccttggacctggcccgcatccgcaccgacctccccttggaggtggactttaaggccctgcgccgcaggacccccgacctggagggcctgagggcctttttggaggagctggagttcggaagcctccttcatgagttcggcctcctgggaggggagaagccccgggaggaggccccctggcccccgcccgaaggggccttcgtaggcttcctcctctcccgcaaggagcccatgtgggcggagcttctggccctggcggccgccgcagagggccgggtccaccgggcaacaagcccggttgaggccctggccgacctcaaggaggcccgggggttcctggccaaggacctggccgttttggccctgcgggagggggtggccctggaccccacggacgaccccctcctggtggcctacctcctggacccggccaacaccaaccccgagggggtggcccggcgctacgggggcgagttcacggaggacgcagcggagagggccctcctctccgagaggctcttccagaacctctttccccggctttccgagaagctcctctggctctaccaggaggtggagcggcccctctcccgggtcttggcccacatggaggcccggggggtgaggctggacgtcccccttctggaggccctctcctttgagctggagaaggagatggagcgcctggagggggaggtcttccgcttggccggccaccccttcaacctcaactcccgcgaccagctggaaagggtcctctttgacgagctgggccttaccccggtgggtcggacggagaagacgggcaagcgctccaccgcccagggggccctggaggccctccggggggcccaccccatcgtggagctcatcctccagtaccgggagctttccaagctcaaaagcacctacctggaccccctgccccggctcgtccacccgcggacgggccggcttcacacccgcttcaaccagacggccacggccacgggaaggctttccagctccgaccccaacctgcagaacatccccgtgcgcacccccttggggcagcgcatccgcaaggccttcgtggccgaggaggggtggctccttttggcggcggactactcccagatcgagcttcgggtcctggcccacctctcgggggacgagaacctgaagcgggtcttccgggaggggaaggacatccataccgaaaccgccgcctggatgttcggcttagaccccgctctagtggatccaaagatgcgccgggaagccaagacggtcaacttcggcgtcctctacgggatgtccgcccacaggctctcccaggagctcggcatagactacaaggaggcggaggcctttattgagcgctacttccagagcttccccaaggtgcgggcctggatagaaaggaccctggaggagggccggacgcggggctacgtggagaccctgttcggcaggaggcgctatgtgcccgacctggcctcccgggtccgctcggtgcgggaggcggcggagcggatggccttcaacatgcccgtgcagggcaccgccgccgacctgatgaagatcgccatggtcaagctcttccccaggctaaagcccctgggggcccacctcctcctccaggtgcacgacgagctggtcctggaggtgcccgaggaccgggccgaggaggccaaggccctggtcaaggaggtcatggagaacacctaccccttggacgtgcccctcgaggtggaggtgggcgtgggtcgggactggctggaggcgaagggggattgaagcggtcgac

SEQ ID NO: 3173 - DNA, 2605 bp, Artificial Sequence
  Description of Artificial Sequence: Synthetic DNA sequence of Thermus Rt41A DNA Polymerase A692D
atgaaatacctgctgccgaccgctgctgctggtctgctgctcctcgctgcccagccggcgatggccatggatatcggaattaattcggatccgaattccccactttttgacctggaggaaccccccaagcgggtgcttctggtggacggccaccacctggcctaccgcaccttctacgccctgagcctcaccacctcccggggggagccggtgcagatggtctacggcttcgcccggagcctcctcaaggccttgaaggaggacgggcaggcggtggtcgtggtctttgacgccaaggccccctccttccgccacgaggcctacgaggcctacaaggcgggccgggcccccaccccggaggacttcccccgccagctcgccttggtcaagcggctggtggaccttctgggcctggtccgcctcgaggccccgggttacgaggcggacgacgtcctgggcaccctggccaagaaggccgaaagggaggggatggaggtgcgcatcctcacgggagaccgggacttcttccagctcctctccgagaaggtctcggtcctcctgccggacgggaccctggtcaccccaaaggacgtccaggagaagtacggggtgccgccggagcgctgggtggacttccgcgccctcacgggggaccgctcggacaacatccccggggtggcggggataggggagaagaccgcccttcgactcctcgcggagtgggggagcgtggagaacctcctgaagaacctggaccgggtgaagccggactcggtccggcgcaagatagaggcgcaccttgaggacctccgcctctccttggacctggcccgcatccgcaccgacctccccttggaggtggactttaaggccctgcgccgcaggacccccgacctggagggcctgagggcctttttggaggagctggagttcggaagcctccttcatgagttcggcctcctgggaggggagaagccccgggaggaggccccctggcccccgcccgaaggggccttcgtaggcttcctcctctcccgcaaggagcccatgtgggcggagcttctggccctggcggccgccgcagagggccgggtccaccgggcaacaagcccggttgaggccctggccgacctcaaggaggcccgggggttcctggccaaggacctggccgttttggccctgcgggagggggtggccctggaccccacggacgaccccctcctggtggcctacctcctggacccggccaacaccaaccccgagggggtggcccggcgctacgggggcgagttcacggaggacgcagcggagagggccctcctctccgagaggctcttccagaacctctttccccggctttccgagaagctcctctggctctaccaggaggtggagcggcccctctcccgggtcttggcccacatggaggcccggggggtgaggctggacgtcccccttctggaggccctctcctttgagctggagaaggagatggagcgcctggagggggaggtcttccgcttggccggccaccccttcaacctcaactcccgcgaccagctggaaagggtcctctttgacgagctgggccttaccccggtgggtcggacggagaagacgggcaagcgctccaccgcccagggggccctggaggccctccggggggcccaccccatcgtggagctcatcctccagtaccgggagctttccaagctcaaaagcacctacctggaccccctgccccggctcgtccacccgcggacgggccggcttcacacccgcttcaaccagacggccacggccacgggaaggctttccagctccgaccccaacctgcagaacatccccgtgcgcacccccttggggcagcgcatccgcaaggccttcgtggccgaggaggggtggctccttttggcggcggactactcccagatcgagcttcgggtcctggcccacctctcgggggacgagaacctgaagcgggtcttccgggaggggaaggacatccataccgaaaccgccgcctggatgttcggcttagaccccgctctagtggatccaaagatgcgccgggatgccaagacggtcaacttcggcgtcctctacgggatgtccgcccacaggctctcccaggagctcggcatagactacaaggaggcggaggcctttattgagcgctacttccagagcttccccaaggtgcgggcctggatagaaaggaccctggaggagggccggacgcggggctacgtggagaccctgttcggcaggaggcgctatgtgcccgacctggcctcccgggtccgctcggtgcgggaggcggcggagcggatggccttcaacatgcccgtgcagggcaccgccgccgacctgatgaagatcgccatggtcaagctcttccccaggctaaagcccctgggggcccacctcctcctccaggtgcacgacgagctggtcctggaggtgcccgaggaccgggccgaggaggccaaggccctggtcaaggaggtcatggagaacacctaccccttggacgtgcccctcgaggtggaggtgggcgtgggtcgggactggctggaggcgaagggggattgaagcggtcgac

SEQ ID NO: 3174 - DNA, 2605 bp, Artificial Sequence
  Description of Artificial Sequence: Synthetic DNA sequence of Thermus Rt41A DNA Polymerase A692F
atgaaatacctgctgccgaccgctgctgctggtctgctgctcctcgctgcccagccggcgatggccatggatatcggaattaattcggatccgaattccccactttttgacctggaggaaccccccaagcgggtgcttctggtggacggccaccacctggcctaccgcaccttctacgccctgagcctcaccacctcccggggggagccggtgcagatggtctacggcttcgcccggagcctcctcaaggccttgaaggaggacgggcaggcggtggtcgtggtctttgacgccaaggccccctccttccgccacgaggcctacgaggcctacaaggcgggccgggcccccaccccggaggacttcccccgccagctcgccttggtcaagcggctggtggaccttctgggcctggtccgcctcgaggccccgggttacgaggcggacgacgtcctgggcaccctggccaagaaggccgaaagggaggggatggaggtgcgcatcctcacgggagaccgggacttcttccagctcctctccgagaaggtctcggtcctcctgccggacgggaccctggtcaccccaaaggacgtccaggagaagtacggggtgccgccggagcgctgggtggacttccgcgccctcacgggggaccgctcggacaacatccccggggtggcggggataggggagaagaccgcccttcgactcctcgcggagtgggggagcgtggagaacctcctgaagaacctggaccgggtgaagccggactcggtccggcgcaagatagaggcgcaccttgaggacctccgcctctccttggacctggcccgcatccgcaccgacctccccttggaggtggactttaaggccctgcgccgcaggacccccgacctggagggcctgagggcctttttggaggagctggagttcggaagcctccttcatgagttcggcctcctgggaggggagaagccccgggaggaggccccctggcccccgcccgaaggggccttcgtaggcttcctcctctcccgcaaggagcccatgtgggcggagcttctggccctggcggccgccgcagagggccgggtccaccgggcaacaagcccggttgaggccctggccgacctcaaggaggcccgggggttcctggccaaggacctggccgttttggccctgcgggagggggtggccctggaccccacggacgaccccctcctggtggcctacctcctggacccggccaacaccaaccccgagggggtggcccggcgctacgggggcgagttcacggaggacgcagcggagagggccctcctctccgagaggctcttccagaacctctttccccggctttccgagaagctcctctggctctaccaggaggtggagcggcccctctcccgggtcttggcccacatggaggcccggggggtgaggctggacgtcccccttctggaggccctctcctttgagctggagaaggagatggagcgcctggagggggaggtcttccgcttggccggccaccccttcaacctcaactcccgcgaccagctggaaagggtcctctttgacgagctgggccttaccccggtgggtcggacggagaagacgggcaagcgctccaccgcccagggggccctggaggccctccggggggcccaccccatcgtggagctcatcctccagtaccgggagctttccaagctcaaaagcacctacctggaccccctgccccggctcgtccacccgcggacgggccggcttcacacccgcttcaaccagacggccacggccacgggaaggctttccagctccgaccccaacctgcagaacatccccgtgcgcacccccttggggcagcgcatccgcaaggccttcgtggccgaggaggggtggctccttttggcggcggactactcccagatcgagcttcgggtcctggcccacctctcgggggacgagaacctgaagcgggtcttccgggaggggaaggacatccataccgaaaccgccgcctggatgttcggcttagaccccgctctagtggatccaaagatgcgccggtttgccaagacggtcaacttcggcgtcctctacgggatgtccgcccacaggctctcccaggagctcggcatagactacaaggaggcggaggcctttattgagcgctacttccagagcttccccaaggtgcgggcctggatagaaaggaccctggaggagggccggacgcggggctacgtggagaccctgttcggcaggaggcgctatgtgcccgacctggcctcccgggtccgctcggtgcgggaggcggcggagcggatggccttcaacatgcccgtgcagggcaccgccgccgacctgatgaagatcgccatggtcaagctcttccccaggctaaagcccctgggggcccacctcctcctccaggtgcacgacgagctggtcctggaggtgcccgaggaccgggccgaggaggccaaggccctggtcaaggaggtcatggagaacacctaccccttggacgtgcccctcgaggtggaggtgggcgtgggtcgggactggctggaggcgaagggggattgaagcggtcgac

SEQ ID NO: 3175 - DNA, 2605 bp, Artificial Sequence
  Description of Artificial Sequence: Synthetic DNA sequence of Thermus Rt41A DNA Polymerase A692S
atgaaatacctgctgccgaccgctgctgctggtctgctgctcctcgctgcccagccggcgatggccatggatatcggaattaattcggatccgaattccccactttttgacctggaggaaccccccaagcgggtgcttctggtggacggccaccacctggcctaccgcaccttctacgccctgagcctcaccacctcccggggggagccggtgcagatggtctacggcttcgcccggagcctcctcaaggccttgaaggaggacgggcaggcggtggtcgtggtctttgacgccaaggccccctccttccgccacgaggcctacgaggcctacaaggcgggccgggcccccaccccggaggacttcccccgccagctcgccttggtcaagcggctggtggaccttctgggcctggtccgcctcgaggccccgggttacgaggcggacgacgtcctgggcaccctggccaagaaggccgaaagggaggggatggaggtgcgcatcctcacgggagaccgggacttcttccagctcctctccgagaaggtctcggtcctcctgccggacgggaccctggtcaccccaaaggacgtccaggagaagtacggggtgccgccggagcgctgggtggacttccgcgccctcacgggggaccgctcggacaacatccccggggtggcggggataggggagaagaccgcccttcgactcctcgcggagtgggggagcgtggagaacctcctgaagaacctggaccgggtgaagccggactcggtccggcgcaagatagaggcgcaccttgaggacctccgcctctccttggacctggcccgcatccgcaccgacctccccttggaggtggactttaaggccctgcgccgcaggacccccgacctggagggcctgagggcctttttggaggagctggagttcggaagcctccttcatgagttcggcctcctgggaggggagaagccccgggaggaggccccctggcccccgcccgaaggggccttcgtaggcttcctcctctcccgcaaggagcccatgtgggcggagcttctggccctggcggccgccgcagagggccgggtccaccgggcaacaagcccggttgaggccctggccgacctcaaggaggcccgggggttcctggccaaggacctggccgttttggccctgcgggagggggtggccctggaccccacggacgaccccctcctggtggcctacctcctggacccggccaacaccaaccccgagggggtggcccggcgctacgggggcgagttcacggaggacgcagcggagagggccctcctctccgagaggctcttccagaacctctttccccggctttccgagaagctcctctggctctaccaggaggtggagcggcccctctcccgggtcttggcccacatggaggcccggggggtgaggctggacgtcccccttctggaggccctctcctttgagctggagaaggagatggagcgcctggagggggaggtcttccgcttggccggccaccccttcaacctcaactcccgcgaccagctggaaagggtcctctttgacgagctgggccttaccccggtgggtcggacggagaagacgggcaagcgctccaccgcccagggggccctggaggccctccggggggcccaccccatcgtggagctcatcctccagtaccgggagctttccaagctcaaaagcacctacctggaccccctgccccggctcgtccacccgcggacgggccggcttcacacccgcttcaaccagacggccacggccacgggaaggctttccagctccgaccccaacctgcagaacatccccgtgcgcacccccttggggcagcgcatccgcaaggccttcgtggccgaggaggggtggctccttttggcggcggactactcccagatcgagcttcgggtcctggcccacctctcgggggacgagaacctgaagcgggtcttccgggaggggaaggacatccataccgaaaccgccgcctggatgttcggcttagaccccgctctagtggatccaaagatgcgccggtctgccaagacggtcaacttcggcgtcctctacgggatgtccgcccacaggctctcccaggagctcggcatagactacaaggaggcggaggcctttattgagcgctacttccagagcttccccaaggtgcgggcctggatagaaaggaccctggaggagggccggacgcggggctacgtggagaccctgttcggcaggaggcgctatgtgcccgacctggcctcccgggtccgctcggtgcgggaggcggcggagcggatggccttcaacatgcccgtgcagggcaccgccgccgacctgatgaagatcgccatggtcaagctcttccccaggctaaagcccctgggggcccacctcctcctccaggtgcacgacgagctggtcctggaggtgcccgaggaccgggccgaggaggccaaggccctggtcaaggaggtcatggagaacacctaccccttggacgtgcccctcgaggtggaggtgggcgtgggtcgggactggctggaggcgaagggggattgaagcggtcgac

SEQ ID NO: 3176 - DNA, 2605 bp, Artificial Sequence
  Description of Artificial Sequence: Synthetic DNA sequence of Thermus Rt41A DNA Polymerase A692T
atgaaatacctgctgccgaccgctgctgctggtctgctgctcctcgctgcccagccggcgatggccatggatatcggaattaattcggatccgaattccccactttttgacctggaggaaccccccaagcgggtgcttctggtggacggccaccacctggcctaccgcaccttctacgccctgagcctcaccacctcccggggggagccggtgcagatggtctacggcttcgcccggagcctcctcaaggccttgaaggaggacgggcaggcggtggtcgtggtctttgacgccaaggccccctccttccgccacgaggcctacgaggcctacaaggcgggccgggcccccaccccggaggacttcccccgccagctcgccttggtcaagcggctggtggaccttctgggcctggtccgcctcgaggccccgggttacgaggcggacgacgtcctgggcaccctggccaagaaggccgaaagggaggggatggaggtgcgcatcctcacgggagaccgggacttcttccagctcctctccgagaaggtctcggtcctcctgccggacgggaccctggtcaccccaaaggacgtccaggagaagtacggggtgccgccggagcgctgggtggacttccgcgccctcacgggggaccgctcggacaacatccccggggtggcggggataggggagaagaccgcccttcgactcctcgcggagtgggggagcgtggagaacctcctgaagaacctggaccgggtgaagccggactcggtccggcgcaagatagaggcgcaccttgaggacctccgcctctccttggacctggcccgcatccgcaccgacctccccttggaggtggactttaaggccctgcgccgcaggacccccgacctggagggcctgagggcctttttggaggagctggagttcggaagcctccttcatgagttcggcctcctgggaggggagaagccccgggaggaggccccctggcccccgcccgaaggggccttcgtaggcttcctcctctcccgcaaggagcccatgtgggcggagcttctggccctggcggccgccgcagagggccgggtccaccgggcaacaagcccggttgaggccctggccgacctcaaggaggcccgggggttcctggccaaggacctggccgttttggccctgcgggagggggtggccctggaccccacggacgaccccctcctggtggcctacctcctggacccggccaacaccaaccccgagggggtggcccggcgctacgggggcgagttcacggaggacgcagcggagagggccctcctctccgagaggctcttccagaacctctttccccggctttccgagaagctcctctggctctaccaggaggtggagcggcccctctcccgggtcttggcccacatggaggcccggggggtgaggctggacgtcccccttctggaggccctctcctttgagctggagaaggagatggagcgcctggagggggaggtcttccgcttggccggccaccccttcaacctcaactcccgcgaccagctggaaagggtcctctttgacgagctgggccttaccccggtgggtcggacggagaagacgggcaagcgctccaccgcccagggggccctggaggccctccggggggcccaccccatcgtggagctcatcctccagtaccgggagctttccaagctcaaaagcacctacctggaccccctgccccggctcgtccacccgcggacgggccggcttcacacccgcttcaaccagacggccacggccacgggaaggctttccagctccgaccccaacctgcagaacatccccgtgcgcacccccttggggcagcgcatccgcaaggccttcgtggccgaggaggggtggctccttttggcggcggactactcccagatcgagcttcgggtcctggcccacctctcgggggacgagaacctgaagcgggtcttccgggaggggaaggacatccataccgaaaccgccgcctggatgttcggcttagaccccgctctagtggatccaaagatgcgccggtatgccaagacggtcaacttcggcgtcctctacgggatgtccgcccacaggctctcccaggagctcggcatagactacaaggaggcggaggcctttattgagcgctacttccagagcttccccaaggtgcgggcctggatagaaaggaccctggaggagggccggacgcggggctacgtggagaccctgttcggcaggaggcgctatgtgcccgacctggcctcccgggtccgctcggtgcgggaggcggcggagcggatggccttcaacatgcccgtgcagggcaccgccgccgacctgatgaagatcgccatggtcaagctcttccccaggctaaagcccctgggggcccacctcctcctccaggtgcacgacgagctggtcctggaggtgcccgaggaccgggccgaggaggccaaggccctggtcaaggaggtcatggagaacacctaccccttggacgtgcccctcgaggtggaggtgggcgtgggtcgggactggctggaggcgaagggggattgaagcggtcgac

SEQ ID NO: 3177 - DNA, 2605 bp, Artificial Sequence
  Description of Artificial Sequence: Synthetic DNA sequence of Thermus Rt41A DNA Polymerase A692W
atgaaatacctgctgccgaccgctgctgctggtctgctgctcctcgctgcccagccggcgatggccatggatatcggaattaattcggatccgaattccccactttttgacctggaggaaccccccaagcgggtgcttctggtggacggccaccacctggcctaccgcaccttctacgccctgagcctcaccacctcccggggggagccggtgcagatggtctacggcttcgcccggagcctcctcaaggccttgaaggaggacgggcaggcggtggtcgtggtctttgacgccaaggccccctccttccgccacgaggcctacgaggcctacaaggcgggccgggcccccaccccggaggacttcccccgccagctcgccttggtcaagcggctggtggaccttctgggcctggtccgcctcgaggccccgggttacgaggcggacgacgtcctgggcaccctggccaagaaggccgaaagggaggggatggaggtgcgcatcctcacgggagaccgggacttcttccagctcctctccgagaaggtctcggtcctcctgccggacgggaccctggtcaccccaaaggacgtccaggagaagtacggggtgccgccggagcgctgggtggacttccgcgccctcacgggggaccgctcggacaacatccccggggtggcggggataggggagaagaccgcccttcgactcctcgcggagtgggggagcgtggagaacctcctgaagaacctggaccgggtgaagccggactcggtccggcgcaagatagaggcgcaccttgaggacctccgcctctccttggacctggcccgcatccgcaccgacctccccttggaggtggactttaaggccctgcgccgcaggacccccgacctggagggcctgagggcctttttggaggagctggagttcggaagcctccttcatgagttcggcctcctgggaggggagaagccccgggaggaggccccctggcccccgcccgaaggggccttcgtaggcttcctcctctcccgcaaggagcccatgtgggcggagcttctggccctggcggccgccgcagagggccgggtccaccgggcaacaagcccggttgaggccctggccgacctcaaggaggcccgggggttcctggccaaggacctggccgttttggccctgcgggagggggtggccctggaccccacggacgaccccctcctggtggcctacctcctggacccggccaacaccaaccccgagggggtggcccggcgctacgggggcgagttcacggaggacgcagcggagagggccctcctctccgagaggctcttccagaacctctttccccggctttccgagaagctcctctggctctaccaggaggtggagcggcccctctcccgggtcttggcccacatggaggcccggggggtgaggctggacgtcccccttctggaggccctctcctttgagctggagaaggagatggagcgcctggagggggaggtcttccgcttggccggccaccccttcaacctcaactcccgcgaccagctggaaagggtcctctttgacgagctgggccttaccccggtgggtcggacggagaagacgggcaagcgctccaccgcccagggggccctggaggccctccggggggcccaccccatcgtggagctcatcctccagtaccgggagctttccaagctcaaaagcacctacctggaccccctgccccggctcgtccacccgcggacgggccggcttcacacccgcttcaaccagacggccacggccacgggaaggctttccagctccgaccccaacctgcagaacatccccgtgcgcacccccttggggcagcgcatccgcaaggccttcgtggccgaggaggggtggctccttttggcggcggactactcccagatcgagcttcgggtcctggcccacctctcgggggacgagaacctgaagcgggtcttccgggaggggaaggacatccataccgaaaccgccgcctggatgttcggcttagaccccgctctagtggatccaaagatgcgccggtgggccaagacggtcaacttcggcgtcctctacgggatgtccgcccacaggctctcccaggagctcggcatagactacaaggaggcggaggcctttattgagcgctacttccagagcttccccaaggtgcgggcctggatagaaaggaccctggaggagggccggacgcggggctacgtggagaccctgttcggcaggaggcgctatgtgcccgacctggcctcccgggtccgctcggtgcgggaggcggcggagcggatggccttcaacatgcccgtgcagggcaccgccgccgacctgatgaagatcgccatggtcaagctcttccccaggctaaagcccctgggggcccacctcctcctccaggtgcacgacgagctggtcctggaggtgcccgaggaccgggccgaggaggccaaggccctggtcaaggaggtcatggagaacacctaccccttggacgtgcccctcgaggtggaggtgggcgtgggtcgggactggctggaggcgaagggggattgaagcggtcgac

SEQ ID NO: 3178 - DNA, 2605 bp, Artificial Sequence
  Description of Artificial Sequence: Synthetic DNA sequence of Thermus Rt41A DNA Polymerase A692P
atgaaatacctgctgccgaccgctgctgctggtctgctgctcctcgctgcccagccggcgatggccatggatatcggaattaattcggatccgaattccccactttttgacctggaggaaccccccaagcgggtgcttctggtggacggccaccacctggcctaccgcaccttctacgccctgagcctcaccacctcccggggggagccggtgcagatggtctacggcttcgcccggagcctcctcaaggccttgaaggaggacgggcaggcggtggtcgtggtctttgacgccaaggccccctccttccgccacgaggcctacgaggcctacaaggcgggccgggcccccaccccggaggacttcccccgccagctcgccttggtcaagcggctggtggaccttctgggcctggtccgcctcgaggccccgggttacgaggcggacgacgtcctgggcaccctggccaagaaggccgaaagggaggggatggaggtgcgcatcctcacgggagaccgggacttcttccagctcctctccgagaaggtctcggtcctcctgccggacgggaccctggtcaccccaaaggacgtccaggagaagtacggggtgccgccggagcgctgggtggacttccgcgccctcacgggggaccgctcggacaacatccccggggtggcggggataggggagaagaccgcccttcgactcctcgcggagtgggggagcgtggagaacctcctgaagaacctggaccgggtgaagccggactcggtccggcgcaagatagaggcgcaccttgaggacctccgcctctccttggacctggcccgcatccgcaccgacctccccttggaggtggactttaaggccctgcgccgcaggacccccgacctggagggcctgagggcctttttggaggagctggagttcggaagcctccttcatgagttcggcctcctgggaggggagaagccccgggaggaggccccctggcccccgcccgaaggggccttcgtaggcttcctcctctcccgcaaggagcccatgtgggcggagcttctggccctggcggccgccgcagagggccgggtccaccgggcaacaagcccggttgaggccctggccgacctcaaggaggcccgggggttcctggccaaggacctggccgttttggccctgcgggagggggtggccctggaccccacggacgaccccctcctggtggcctacctcctggacccggccaacaccaaccccgagggggtggcccggcgctacgggggcgagttcacggaggacgcagcggagagggccctcctctccgagaggctcttccagaacctctttccccggctttccgagaagctcctctggctctaccaggaggtggagcggcccctctcccgggtcttggcccacatggaggcccggggggtgaggctggacgtcccccttctggaggccctctcctttgagctggagaaggagatggagcgcctggagggggaggtcttccgcttggccggccaccccttcaacctcaactcccgcgaccagctggaaagggtcctctttgacgagctgggccttaccccggtgggtcggacggagaagacgggcaagcgctccaccgcccagggggccctggaggccctccggggggcccaccccatcgtggagctcatcctccagtaccgggagctttccaagctcaaaagcacctacctggaccccctgccccggctcgtccacccgcggacgggccggcttcacacccgcttcaaccagacggccacggccacgggaaggctttccagctccgaccccaacctgcagaacatccccgtgcgcacccccttggggcagcgcatccgcaaggccttcgtggccgaggaggggtggctccttttggcggcggactactcccagatcgagcttcgggtcctggcccacctctcgggggacgagaacctgaagcgggtcttccgggaggggaaggacatccataccgaaaccgccgcctggatgttcggcttagaccccgctctagtggatccaaagatgcgccggcctgccaagacggtcaacttcggcgtcctctacgggatgtccgcccacaggctctcccaggagctcggcatagactacaaggaggcggaggcctttattgagcgctacttccagagcttccccaaggtgcgggcctggatagaaaggaccctggaggagggccggacgcggggctacgtggagaccctgttcggcaggaggcgctatgtgcccgacctggcctcccgggtccgctcggtgcgggaggcggcggagcggatggccttcaacatgcccgtgcagggcaccgccgccgacctgatgaagatcgccatggtcaagctcttccccaggctaaagcccctgggggcccacctcctcctccaggtgcacgacgagctggtcctggaggtgcccgaggaccgggccgaggaggccaaggccctggtcaaggaggtcatggagaacacctaccccttggacgtgcccctcgaggtggaggtgggcgtgggtcgggactggctggaggcgaagggggattgaagcggtcgac

SEQ ID NO: 3179 - DNA, 2605 bp, Artificial Sequence
  Description of Artificial Sequence: Synthetic DNA sequence of Thermus Rt41A DNA Polymerase A692M
atgaaatacctgctgccgaccgctgctgctggtctgctgctcctcgctgcccagccggcgatggccatggatatcggaattaattcggatccgaattccccactttttgacctggaggaaccccccaagcgggtgcttctggtggacggccaccacctggcctaccgcaccttctacgccctgagcctcaccacctcccggggggagccggtgcagatggtctacggcttcgcccggagcctcctcaaggccttgaaggaggacgggcaggcggtggtcgtggtctttgacgccaaggccccctccttccgccacgaggcctacgaggcctacaaggcgggccgggcccccaccccggaggacttcccccgccagctcgccttggtcaagcggctggtggaccttctgggcctggtccgcctcgaggccccgggttacgaggcggacgacgtcctgggcaccctggccaagaaggccgaaagggaggggatggaggtgcgcatcctcacgggagaccgggacttcttccagctcctctccgagaaggtctcggtcctcctgccggacgggaccctggtcaccccaaaggacgtccaggagaagtacggggtgccgccggagcgctgggtggacttccgcgccctcacgggggaccgctcggacaacatccccggggtggcggggataggggagaagaccgcccttcgactcctcgcggagtgggggagcgtggagaacctcctgaagaacctggaccgggtgaagccggactcggtccggcgcaagatagaggcgcaccttgaggacctccgcctctccttggacctggcccgcatccgcaccgacctccccttggaggtggactttaaggccctgcgccgcaggacccccgacctggagggcctgagggcctttttggaggagctggagttcggaagcctccttcatgagttcggcctcctgggaggggagaagccccgggaggaggccccctggcccccgcccgaaggggccttcgtaggcttcctcctctcccgcaaggagcccatgtgggcggagcttctggccctggcggccgccgcagagggccgggtccaccgggcaacaagcccggttgaggccctggccgacctcaaggaggcccgggggttcctggccaaggacctggccgttttggccctgcgggagggggtggccctggaccccacggacgaccccctcctggtggcctacctcctggacccggccaacaccaaccccgagggggtggcccggcgctacgggggcgagttcacggaggacgcagcggagagggccctcctctccgagaggctcttccagaacctctttccccggctttccgagaagctcctctggctctaccaggaggtggagcggcccctctcccgggtcttggcccacatggaggcccggggggtgaggctggacgtcccccttctggaggccctctcctttgagctggagaaggagatggagcgcctggagggggaggtcttccgcttggccggccaccccttcaacctcaactcccgcgaccagctggaaagggtcctctttgacgagctgggccttaccccggtgggtcggacggagaagacgggcaagcgctccaccgcccagggggccctggaggccctccggggggcccaccccatcgtggagctcatcctccagtaccgggagctttccaagctcaaaagcacctacctggaccccctgccccggctcgtccacccgcggacgggccggcttcacacccgcttcaaccagacggccacggccacgggaaggctttccagctccgaccccaacctgcagaacatccccgtgcgcacccccttggggcagcgcatccgcaaggccttcgtggccgaggaggggtggctccttttggcggcggactactcccagatcgagcttcgggtcctggcccacctctcgggggacgagaacctgaagcgggtcttccgggaggggaaggacatccataccgaaaccgccgcctggatgttcggcttagaccccgctctagtggatccaaagatgcgccggatggccaagacggtcaacttcggcgtcctctacgggatgtccgcccacaggctctcccaggagctcggcatagactacaaggaggcggaggcctttattgagcgctacttccagagcttccccaaggtgcgggcctggatagaaaggaccctggaggagggccggacgcggggctacgtggagaccctgttcggcaggaggcgctatgtgcccgacctggcctcccgggtccgctcggtgcgggaggcggcggagcggatggccttcaacatgcccgtgcagggcaccgccgccgacctgatgaagatcgccatggtcaagctcttccccaggctaaagcccctgggggcccacctcctcctccaggtgcacgacgagctggtcctggaggtgcccgaggaccgggccgaggaggccaaggccctggtcaaggaggtcatggagaacacctaccccttggacgtgcccctcgaggtggaggtgggcgtgggtcgggactggctggaggcgaagggggattgaagcggtcgac

SEQ ID NO: 3180 - DNA, 2605 bp, Artificial Sequence
  Description of Artificial Sequence: Synthetic DNA sequence of Thermus Rt41A DNA Polymerase A692T
atgaaatacctgctgccgaccgctgctgctggtctgctgctcctcgctgcccagccggcgatggccatggatatcggaattaattcggatccgaattccccactttttgacctggaggaaccccccaagcgggtgcttctggtggacggccaccacctggcctaccgcaccttctacgccctgagcctcaccacctcccggggggagccggtgcagatggtctacggcttcgcccggagcctcctcaaggccttgaaggaggacgggcaggcggtggtcgtggtctttgacgccaaggccccctccttccgccacgaggcctacgaggcctacaaggcgggccgggcccccaccccggaggacttcccccgccagctcgccttggtcaagcggctggtggaccttctgggcctggtccgcctcgaggccccgggttacgaggcggacgacgtcctgggcaccctggccaagaaggccgaaagggaggggatggaggtgcgcatcctcacgggagaccgggacttcttccagctcctctccgagaaggtctcggtcctcctgccggacgggaccctggtcaccccaaaggacgtccaggagaagtacggggtgccgccggagcgctgggtggacttccgcgccctcacgggggaccgctcggacaacatccccggggtggcggggataggggagaagaccgcccttcgactcctcgcggagtgggggagcgtggagaacctcctgaagaacctggaccgggtgaagccggactcggtccggcgcaagatagaggcgcaccttgaggacctccgcctctccttggacctggcccgcatccgcaccgacctccccttggaggtggactttaaggccctgcgccgcaggacccccgacctggagggcctgagggcctttttggaggagctggagttcggaagcctccttcatgagttcggcctcctgggaggggagaagccccgggaggaggccccctggcccccgcccgaaggggccttcgtaggcttcctcctctcccgcaaggagcccatgtgggcggagcttctggccctggcggccgccgcagagggccgggtccaccgggcaacaagcccggttgaggccctggccgacctcaaggaggcccgggggttcctggccaaggacctggccgttttggccctgcgggagggggtggccctggaccccacggacgaccccctcctggtggcctacctcctggacccggccaacaccaaccccgagggggtggcccggcgctacgggggcgagttcacggaggacgcagcggagagggccctcctctccgagaggctcttccagaacctctttccccggctttccgagaagctcctctggctctaccaggaggtggagcggcccctctcccgggtcttggcccacatggaggcccggggggtgaggctggacgtcccccttctggaggccctctcctttgagctggagaaggagatggagcgcctggagggggaggtcttccgcttggccggccaccccttcaacctcaactcccgcgaccagctggaaagggtcctctttgacgagctgggccttaccccggtgggtcggacggagaagacgggcaagcgctccaccgcccagggggccctggaggccctccggggggcccaccccatcgtggagctcatcctccagtaccgggagctttccaagctcaaaagcacctacctggaccccctgccccggctcgtccacccgcggacgggccggcttcacacccgcttcaaccagacggccacggccacgggaaggctttccagctccgaccccaacctgcagaacatccccgtgcgcacccccttggggcagcgcatccgcaaggccttcgtggccgaggaggggtggctccttttggcggcggactactcccagatcgagcttcgggtcctggcccacctctcgggggacgagaacctgaagcgggtcttccgggaggggaaggacatccataccgaaaccgccgcctggatgttcggcttagaccccgctctagtggatccaaagatgcgccggactgccaagacggtcaacttcggcgtcctctacgggatgtccgcccacaggctctcccaggagctcggcatagactacaaggaggcggaggcctttattgagcgctacttccagagcttccccaaggtgcgggcctggatagaaaggaccctggaggagggccggacgcggggctacgtggagaccctgttcggcaggaggcgctatgtgcccgacctggcctcccgggtccgctcggtgcgggaggcggcggagcggatggccttcaacatgcccgtgcagggcaccgccgccgacctgatgaagatcgccatggtcaagctcttccccaggctaaagcccctgggggcccacctcctcctccaggtgcacgacgagctggtcctggaggtgcccgaggaccgggccgaggaggccaaggccctggtcaaggaggtcatggagaacacctaccccttggacgtgcccctcgaggtggaggtgggcgtgggtcgggactggctggaggcgaagggggattgaagcggtcgac

SEQ ID NO: 3181 - DNA, 2605 bp, Artificial Sequence
  Description of Artificial Sequence: Synthetic DNA sequence of Thermus Rt41A DNA Polymerase A692N
atgaaatacctgctgccgaccgctgctgctggtctgctgctcctcgctgcccagccggcgatggccatggatatcggaattaattcggatccgaattccccactttttgacctggaggaaccccccaagcgggtgcttctggtggacggccaccacctggcctaccgcaccttctacgccctgagcctcaccacctcccggggggagccggtgcagatggtctacggcttcgcccggagcctcctcaaggccttgaaggaggacgggcaggcggtggtcgtggtctttgacgccaaggccccctccttccgccacgaggcctacgaggcctacaaggcgggccgggcccccaccccggaggacttcccccgccagctcgccttggtcaagcggctggtggaccttctgggcctggtccgcctcgaggccccgggttacgaggcggacgacgtcctgggcaccctggccaagaaggccgaaagggaggggatggaggtgcgcatcctcacgggagaccgggacttcttccagctcctctccgagaaggtctcggtcctcctgccggacgggaccctggtcaccccaaaggacgtccaggagaagtacggggtgccgccggagcgctgggtggacttccgcgccctcacgggggaccgctcggacaacatccccggggtggcggggataggggagaagaccgcccttcgactcctcgcggagtgggggagcgtggagaacctcctgaagaacctggaccgggtgaagccggactcggtccggcgcaagatagaggcgcaccttgaggacctccgcctctccttggacctggcccgcatccgcaccgacctccccttggaggtggactttaaggccctgcgccgcaggacccccgacctggagggcctgagggcctttttggaggagctggagttcggaagcctccttcatgagttcggcctcctgggaggggagaagccccgggaggaggccccctggcccccgcccgaaggggccttcgtaggcttcctcctctcccgcaaggagcccatgtgggcggagcttctggccctggcggccgccgcagagggccgggtccaccgggcaacaagcccggttgaggccctggccgacctcaaggaggcccgggggttcctggccaaggacctggccgttttggccctgcgggagggggtggccctggaccccacggacgaccccctcctggtggcctacctcctggacccggccaacaccaaccccgagggggtggcccggcgctacgggggcgagttcacggaggacgcagcggagagggccctcctctccgagaggctcttccagaacctctttccccggctttccgagaagctcctctggctctaccaggaggtggagcggcccctctcccgggtcttggcccacatggaggcccggggggtgaggctggacgtcccccttctggaggccctctcctttgagctggagaaggagatggagcgcctggagggggaggtcttccgcttggccggccaccccttcaacctcaactcccgcgaccagctggaaagggtcctctttgacgagctgggccttaccccggtgggtcggacggagaagacgggcaagcgctccaccgcccagggggccctggaggccctccggggggcccaccccatcgtggagctcatcctccagtaccgggagctttccaagctcaaaagcacctacctggaccccctgccccggctcgtccacccgcggacgggccggcttcacacccgcttcaaccagacggccacggccacgggaaggctttccagctccgaccccaacctgcagaacatccccgtgcgcacccccttggggcagcgcatccgcaaggccttcgtggccgaggaggggtggctccttttggcggcggactactcccagatcgagcttcgggtcctggcccacctctcgggggacgagaacctgaagcgggtcttccgggaggggaaggacatccataccgaaaccgccgcctggatgttcggcttagaccccgctctagtggatccaaagatgcgccggaatgccaagacggtcaacttcggcgtcctctacgggatgtccgcccacaggctctcccaggagctcggcatagactacaaggaggcggaggcctttattgagcgctacttccagagcttccccaaggtgcgggcctggatagaaaggaccctggaggagggccggacgcggggctacgtggagaccctgttcggcaggaggcgctatgtgcccgacctggcctcccgggtccgctcggtgcgggaggcggcggagcggatggccttcaacatgcccgtgcagggcaccgccgccgacctgatgaagatcgccatggtcaagctcttccccaggctaaagcccctgggggcccacctcctcctccaggtgcacgacgagctggtcctggaggtgcccgaggaccgggccgaggaggccaaggccctggtcaaggaggtcatggagaacacctaccccttggacgtgcccctcgaggtggaggtgggcgtgggtcgggactggctggaggcgaagggggattgaagcggtcgac
